United States Patent Application Publication US 2006/0150283 A1 - sequence listing, part 21

SEQ ID NO: 80345 - protein, 319 aa, Arabidopsis thaliana
  peptide (1)..(319): Ceres Seq. ID no. 12655426
MKWYSTEVVRGKEDYSTADAMLRFFKQHGVAVRGHNILWNDPKYQPKWVNALSGNDLYNAVKRRVFSVVSRYKGQLAGWDVVNENLHFSYFEDKMGPKASYNIFKMAQAFDPTTTMFMNEYNTLEESSDSDSSLARYLQKLREIRSIRVCGNISLGIGLESHFKTPNIPYMRSALDTLAATGLPIWLTEVDVEAPPNVQAKYFEQVLREGHAHPQVKGIVTWSGYSPSGCYRMCLTDGNFKNVPTGDVVDKLLHEWGGFRRQTTGVTDADGYFEASLFHGDYDLKIAHPLTNSKASHSFKLTSDVSSSQNQPSSFVFRV

SEQ ID NO: 80346 - DNA, 1054 bp, Arabidopsis thaliana
  misc_feature (1)..(1054): Ceres Seq. ID no. 12655431
  misc_feature (1)..(1054): Ortholog of  Ceres SEQ ID NO 13597524 as cited in SEQ ID NO 64782
ctcggagccatcacacgacaatgaccggcgcattgtttagaaacgctgcttccgacgccgctcggatctttcgattacagcgagcaacgatgacgaatccttttggaaagctcgaccctttaccgataggaggaaacatccagcgattgcagtcgaggcctttttatcgtacgcctcagtttctcgggaaagcaaaggaaacaggtgtctctggtttctgttcgtcttcgtcttcgtcttcttcgacggtctctacagcaggattcatcggatggtatttgggaatggtgaaatctcggccggttcttaccaaatccgtcacgtcctcgcttatttacatagcagccgatttgtcttcgcagacaattccacaagcttcagtggattcttatgacttggtaagaacagcaaggatgggaggatatgggttattaatcttgggtcctacacttcactattggttcaatctcatgtcaagtctcttcccaaaacgagatttgatcacaacgtttaagaaaatggccatgggacagacagtctatgggcctgccatgaatgttgttttcttctcactgaatgcagccctacagggtgaaaatggttcagagatagttgctagattgaaaagggacctacttcccacaatgcttaatggtgtcatgtattggcctttgtgtgattttattactttcaagttctgccctgtttatttacagccacttgtgagcaactcgttttcgtatctatggacaatctacataacttatatggcaagccgtgcgacgccaaccgccattgaaatttgaaaaagctctctgggaaactctctcagtttagaaatgaagaaatgaagccaaaaaacacttttactaaaagaaacagggcattcttcaacattctttgtttcctctctccagattttaggaggatataatgtaaggagttttggggaaaactgtgcatttggacatgtcttacactcttagatttaattcaattctatgtttagtattccatgtaatatttgagtaaaatggtggttctttagcttcga

SEQ ID NO: 80347 - protein, 267 aa, Arabidopsis thaliana
  peptide (1)..(267): Ceres Seq. ID no. 12655432
RSHHTTMTGALFRNAASDAARIFRLQRATMTNPFGKLDPLPIGGNIQRLQSRPFYRTPQFLGKAKETGVSGFCSSSSSSSSTVSTAGFIGWYLGMVKSRPVLTKSVTSSLIYIAADLSSQTIPQASVDSYDLVRTARMGGYGLLILGPTLHYWFNLMSSLFPKRDLITTFKKMAMGQTVYGPAMNVVFFSLNAALQGENGSEIVARLKRDLLPTMLNGVMYWPLCDFITFKFCPVYLQPLVSNSFSYLWTIYITYMASRATPTAIEI

SEQ ID NO: 80348 - protein, 261 aa, Arabidopsis thaliana
  peptide (1)..(261): Ceres Seq. ID no. 12655433
MTGALFRNAASDAARIFRLQRATMTNPFGKLDPLPIGGNIQRLQSRPFYRTPQFLGKAKETGVSGFCSSSSSSSSTVSTAGFIGWYLGMVKSRPVLTKSVTSSLIYIAADLSSQTIPQASVDSYDLVRTARMGGYGLLILGPTLHYWFNLMSSLFPKRDLITTFKKMAMGQTVYGPAMNVVFFSLNAALQGENGSEIVARLKRDLLPTMLNGVMYWPLCDFITFKFCPVYLQPLVSNSFSYLWTIYITYMASRATPTAIEI

SEQ ID NO: 80349 - protein, 238 aa, Arabidopsis thaliana
  peptide (1)..(238): Ceres Seq. ID no. 12655434
MTNPFGKLDPLPIGGNIQRLQSRPFYRTPQFLGKAKETGVSGFCSSSSSSSSTVSTAGFIGWYLGMVKSRPVLTKSVTSSLIYIAADLSSQTIPQASVDSYDLVRTARMGGYGLLILGPTLHYWFNLMSSLFPKRDLITTFKKMAMGQTVYGPAMNVVFFSLNAALQGENGSEIVARLKRDLLPTMLNGVMYWPLCDFITFKFCPVYLQPLVSNSFSYLWTIYITYMASRATPTAIEI

SEQ ID NO: 80350 - DNA, 1666 bp, Arabidopsis thaliana
  misc_feature (1)..(1666): Ceres Seq. ID no. 12655435
  misc_feature (1)..(1666): Ortholog of  Ceres SEQ ID NO 13595953 as cited in SEQ ID NO 68200
atcgattgagctttctacttgaaaaccatcttttccgatctatcgaatcggagcggcgaaggaaggagaatgggtgtccgtacaatatctcaggaggcattcgacgatctggttagggaaaatgttgaagatcttggtatggatccctccgaagctctcgaagacgctctctacactctcaagctccaaggcgtcgatctctttgggatcattacatgtgttcctggagaaagtagcgttaaggacaatccggtgattgcttgtttagatagactaaaagaattcgacagtgtttcaatagacggacctcttcgagatgaggttttcgatgagatatcgagtttgttcaagaatctcaatgagctttgtagcagccaagaatcagggaacgctgcaattgcgacaaaacatggtgctgtggatttaacttgctcgatttgttccaaaatcaagatatctactagaagtaatcgtgttcttgttccttgctttaaggctttggctgtgttgatccgtgacattcagagcacagagagattcaggaattgtactggaccaaatatcgttgttgatctcttaaatgattccagctccgattctgatttgttagatgctggttttgcggttgttgctgctgcagcaactggtaatgaagttgtgaaacagttattcatggaactgaaaatcgatgaacttattctgcaagtgttgaatagagagagtaaaactaccattagagctctgtacgatgctatttgtgctcttttgactccagatgacttccgtgttgttgcttcccaagtttatggttatgcacgaacttttgccaaattagggattgcgacagccctcactgaagcattacaggcagggattggctctgatagtttggtgtcagcaagtactgcgttaaaagcaattgctgtcaatgatgaaatatgtaaatctattgctgaatccggtggaatagatacacttcttcggtgtattgatgatagcggtgagcaaggcaacaaaactgctgctaagacatgttgttccctgttgtctaagttggcaggaagtgactctaacaagagtaccatagttgagaagcaaggtctggacaagctaatcacactcgcactacgattctctgatgatcctctagtcatacaagaggtgatgttgataatctctataatctgtctgagatcaccagaccacgcagccaaggctatagaagctggagctggtgatctagcggtccaagcaatgaagaggttcccagtagctgctcaaatgcagagaaacgcttgcaacatgatacggaacattgctgtcagaagtgcagagaacagaactattctgcttgctaatggaatcgagaagctgataagaactgctaaagccaacaatgagacatgcagagccgctgcaactgatgcactgagagaccttggccttgataactacaataactaaggtcaatctttctccattggttggtactcgcaacaaccggaatgaatccagttttttttttcaaaaatttcataaacagtttgcattgagttctctcttttgggtagaaggcattccgatctagtcttttttgcaacgattgcttttgttcgaatgcttgaacatgtagtaaaattgaaaggaattgattgaaaatttcggt

SEQ ID NO: 80351 - protein, 464 aa, Arabidopsis thaliana
  peptide (1)..(464): Ceres Seq. ID no. 12655436
MGVRTISQEAFDDLVRENVEDLGMDPSEALEDALYTLKLQGVDLFGIITCVPGESSVKDNPVIACLDRLKEFDSVSIDGPLRDEVFDEISSLFKNLNELCSSQESGNAAIATKHGAVDLTCSICSKIKISTRSNRVLVPCFKALAVLIRDIQSTERFRNCTGPNIVVDLLNDSSSDSDLLDAGFAVVAAAATGNEVVKQLFMELKIDELILQVLNRESKTTIRALYDAICALLTPDDFRVVASQVYGYARTFAKLGIATALTEALQAGIGSDSLVSASTALKAIAVNDEICKSIAESGGIDTLLRCIDDSGEQGNKTAAKTCCSLLSKLAGSDSNKSTIVEKQGLDKLITLALRFSDDPLVIQEVMLIISIICLRSPDHAAKAIEAGAGDLAVQAMKRFPVAAQMQRNACNMIRNIAVRSAENRTILLANGIEKLIRTAKANNETCRAAATDALRDLGLDNYNN

SEQ ID NO: 80352 - protein, 441 aa, Arabidopsis thaliana
  peptide (1)..(441): Ceres Seq. ID no. 12655437
MDPSEALEDALYTLKLQGVDLFGIITCVPGESSVKDNPVIACLDRLKEFDSVSIDGPLRDEVFDEISSLFKNLNELCSSQESGNAAIATKHGAVDLTCSICSKIKISTRSNRVLVPCFKALAVLIRDIQSTERFRNCTGPNIVVDLLNDSSSDSDLLDAGFAVVAAAATGNEVVKQLFMELKIDELILQVLNRESKTTIRALYDAICALLTPDDFRVVASQVYGYARTFAKLGIATALTEALQAGIGSDSLVSASTALKAIAVNDEICKSIAESGGIDTLLRCIDDSGEQGNKTAAKTCCSLLSKLAGSDSNKSTIVEKQGLDKLITLALRFSDDPLVIQEVMLIISIICLRSPDHAAKAIEAGAGDLAVQAMKRFPVAAQMQRNACNMIRNIAVRSAENRTILLANGIEKLIRTAKANNETCRAAATDALRDLGLDNYNN

SEQ ID NO: 80353 - protein, 263 aa, Arabidopsis thaliana
  peptide (1)..(263): Ceres Seq. ID no. 12655438
MELKIDELILQVLNRESKTTIRALYDAICALLTPDDFRVVASQVYGYARTFAKLGIATALTEALQAGIGSDSLVSASTALKAIAVNDEICKSIAESGGIDTLLRCIDDSGEQGNKTAAKTCCSLLSKLAGSDSNKSTIVEKQGLDKLITLALRFSDDPLVIQEVMLIISIICLRSPDHAAKAIEAGAGDLAVQAMKRFPVAAQMQRNACNMIRNIAVRSAENRTILLANGIEKLIRTAKANNETCRAAATDALRDLGLDNYNN

SEQ ID NO: 80354 - DNA, 1287 bp, Arabidopsis thaliana
  misc_feature (1)..(1287): Ceres Seq. ID no. 12655439
  misc_feature (1)..(1287): Ortholog of  Ceres SEQ ID NO 15177012 as cited in SEQ ID NO 56256
  misc_feature (1)..(1287): Ortholog of  Ceres SEQ ID NO 14314300 as cited in SEQ ID NO 57386
  misc_feature (1)..(1287): Ortholog of  Ceres SEQ ID NO 14311993 as cited in SEQ ID NO 60371
  misc_feature (1)..(1287): Ortholog of  Ceres SEQ ID NO 13596509 as cited in SEQ ID NO 62004
  misc_feature (1)..(1287): Ortholog of  Ceres SEQ ID NO 13500385 as cited in SEQ ID NO 67583
acagagattgaagtcgcaaagagacagaggaaagagggggagaaaatggatcgaccagcagtgagtggtccaatggatttgccgattatgcacgatagtgataggtatgaactcgtcaaggatattggctccggtaattttggagttgcgagattgatgagagacaagcaaagtaatgagcttgttgctgttaaatatatcgagagaggtgagaagatagatgaaaatgtaaaaagggagataatcaaccacaggtccttaagacatcccaatatcgttagattcaaagaggttatattaacaccaacccatttagccattgttatggaatatgcatctggaggagaacttttcgagcgaatctgcaatgcaggccgcttcagcgaagacgaggcgaggtttttcttccagcaactcatttcaggagttagttactgtcatgctatgcaagtatgtcaccgagacttaaagctcgagaatacgttattagatggtagcccggcccctcgtctaaagatatgtgatttcggatattctaagtcatcagtgttacattcgcaaccaaaatcaactgttggaactcctgcttacatcgctcctgaggttttactaaagaaagaatatgatggaaaggttgcagatgtttggtcttgtggggttactctgtatgtcatgctggttggagcatatcctttcgaagatcccgaggaaccaaagaatttcaggaaaactatacatagaatcctgaatgttcagtatgctattccggattatgttcacatatctcctgaatgtcgccatttgatctccagaatatttgttgctgaccctgcaaagaggatatcaattcctgaaataaggaaccatgaatggtttctaaagaatctaccggcagatctaatgaacgataacacgatgaccactcagtttgatgaatcggatcaaccgggccaaagcatagaagaaattatgcagatcattgcagaagcaactgttcctcctgcaggcactcagaatctgaaccattacctcacaggaagcttggacatagatgacgatatggaggaagacttagagagcgaccttgatgatcttgacatcgacagtagcggagagattgtgtacgcaatgtgatactatatatctatttgcatggtttctgctacaaaaatgtcaaacaaaaaatgttgaagaataagattaagatgttttgcttgctattgagttggcccaactttgtctcaatgagtacactttgaatctttgatatgcaaaagactaaatttc

SEQ ID NO: 80355 - protein, 377 aa, Arabidopsis thaliana
  peptide (1)..(377): Ceres Seq. ID no. 12655440
TEIEVAKRQRKEGEKMDRPAVSGPMDLPIMHDSDRYELVKDIGSGNFGVARLMRDKQSNELVAVKYIERGEKIDENVKREIINHRSLRHPNIVRFKEVILTPTHLAIVMEYASGGELFERICNAGRFSEDEARFFFQQLISGVSYCHAMQVCHRDLKLENTLLDGSPAPRLKICDFGYSKSSVLHSQPKSTVGTPAYIAPEVLLKKEYDGKVADVWSCGVTLYVMLVGAYPFEDPEEPKNFRKTIHRILNVQYAIPDYVHISPECRHLISRIFVADPAKRISIPEIRNHEWFLKNLPADLMNDNTMTTQFDESDQPGQSIEEIMQIIAEATVPPAGTQNLNHYLTGSLDIDDDMEEDLESDLDDLDIDSSGEIVYAM

SEQ ID NO: 80356 - protein, 362 aa, Arabidopsis thaliana
  peptide (1)..(362): Ceres Seq. ID no. 12655441
MDRPAVSGPMDLPIMHDSDRYELVKDIGSGNFGVARLMRDKQSNELVAVKYIERGEKIDENVKREIINHRSLRHPNIVRFKEVILTPTHLAIVMEYASGGELFERICNAGRFSEDEARFFFQQLISGVSYCHAMQVCHRDLKLENTLLDGSPAPRLKICDFGYSKSSVLHSQPKSTVGTPAYIAPEVLLKKEYDGKVADVWSCGVTLYVMLVGAYPFEDPEEPKNFRKTIHRILNVQYAIPDYVHISPECRHLISRIFVADPAKRISIPEIRNHEWFLKNLPADLMNDNTMTTQFDESDQPGQSIEEIMQIIAEATVPPAGTQNLNHYLTGSLDIDDDMEEDLESDLDDLDIDSSGEIVYAM

SEQ ID NO: 80357 - protein, 353 aa, Arabidopsis thaliana
  peptide (1)..(353): Ceres Seq. ID no. 12655442
MDLPIMHDSDRYELVKDIGSGNFGVARLMRDKQSNELVAVKYIERGEKIDENVKREIINHRSLRHPNIVRFKEVILTPTHLAIVMEYASGGELFERICNAGRFSEDEARFFFQQLISGVSYCHAMQVCHRDLKLENTLLDGSPAPRLKICDFGYSKSSVLHSQPKSTVGTPAYIAPEVLLKKEYDGKVADVWSCGVTLYVMLVGAYPFEDPEEPKNFRKTIHRILNVQYAIPDYVHISPECRHLISRIFVADPAKRISIPEIRNHEWFLKNLPADLMNDNTMTTQFDESDQPGQSIEEIMQIIAEATVPPAGTQNLNHYLTGSLDIDDDMEEDLESDLDDLDIDSSGEIVYAM

SEQ ID NO: 80358 - DNA, 1761 bp, Arabidopsis thaliana
  misc_feature (1)..(1761): Ceres Seq. ID no. 12655459
  misc_feature (1)..(1761): Ortholog of  Ceres SEQ ID NO 13597574 as cited in SEQ ID NO 64677
  misc_feature (1)..(1761): Ortholog of  Ceres SEQ ID NO 12617417 as cited in SEQ ID NO 65089
  misc_feature (1)..(1761): Ortholog of  Ceres SEQ ID NO 13597678 as cited in SEQ ID NO 65375
  misc_feature (1)..(1761): Ortholog of  Ceres SEQ ID NO 13662880 as cited in SEQ ID NO 65422
  misc_feature (1)..(1761): Ortholog of  Ceres SEQ ID NO 12779098 as cited in SEQ ID NO 67698
  misc_feature (1)..(1761): Ortholog of  Ceres SEQ ID NO 13596180 as cited in SEQ ID NO 67941
  misc_feature (1)..(1761): Ortholog of  Ceres SEQ ID NO 13591190 as cited in SEQ ID NO 68044
accacatcattcaacacgacaagaaaacatcacttttctaggagcttcaaaatctctgatttctttttattattttttaaattttcttttcgatcaaagtcaaacatgagtagtgatcctcatcgtaagctccatgttgtgttcttccctttcatggcttatggtcacatgataccaactctagacatggctaagcttttctctagcagaggagccaaatctacaatcctcaccacacctctcaactccaagatcttccaaaaacccatcgaaagattcaagaacctgaatccgagtttcgaaatcgacatccagatcttcgatttcccttgcgtggatctcgggttaccagaaggatgcgaaaacgtcgatttcttcacctcaaacaacaatgatgatagacagtatctgaccttgaagttctttaagtcgacaaggtttttcaaagatcagcttgagaagctcctcgagacaacgagaccagactgtcttatcgccgacatgttcttcccctgggctacggaagctgctgagaagttcaatgtgccaagacttgtgttccacggtactggctacttttctttatgctctgaatattgcatcagagtgcataacccacaaaacatagtagcttcaaggtacgagccatttgtgattcctgatctcccggggaacatagtgataactcaagaacagatagcagaccgtgacgaagaaagcgagatggggaagtttatgattgaggtcaaagaatctgatgtgaagagctcaggtgttattgtaaacagcttctacgagcttgaacctgattacgccgacttttacaagagtgttgtactgaagagagcgtggcatatcggtccgctttcggtttacaacagaggatttgaggagaaggctgagagaggaaagaaagcaagcattaatgaggttgaatgcctcaaatggcttgactccaagaaaccagattcagtcatttacatttcttttgggagcgtggcttgcttcaagaacgagcagctattcgagatcgctgcaggattagaaacttctggagcaaatttcatctgggttgttaggaaaaacataggtattgaaaaagaagaatggttaccagaagggttcgaagagagggtgaaaggaaaagggatgattataagaggatgggcaccacaggtgctcatacttgatcatcaagcaacttgtgggtttgtgacccattgcggctggaactcgcttctggaaggagtggctgcagggctaccaatggtgacatggcctgtagcagcggagcaattctacaatgagaaattggttacgcaagtgctcagaacaggagtgagcgtgggagcgaaaaagaatgtaagaactacgggagatttcattagcagagagaaagtggttaaagcggtgagggaggtgttggttggggaagaggcggatgagaggcgggagagggcaaagaagttggcagagatggctaaagctgccgtggaaggagggtcttctttcaacgatctaaacagcttcatagaagagtttacctcgtaataagcagagaatatggcagagaagaggctgtgatggccaaagccggcggtggagaaaaaagggtcttcgtttctcgatttgaatagcttcattgaaaagacctcagtaagaaattgaaaattagttcgattctgcttagtctttgtcttggtgataagagtagacctgtgctacaataaacatatatgtatcaaatataccatttgtctt

SEQ ID NO: 80359 - protein, 516 aa, Arabidopsis thaliana
  peptide (1)..(516): Ceres Seq. ID no. 12655460
TTSFNTTRKHHFSRSFKISDFFLLFFKFSFRSKSNMSSDPHRKLHVVFFPFMAYGHMIPTLDMAKLFSSRGAKSTILTTPLNSKIFQKPIERFKNLNPSFEIDIQIFDFPCVDLGLPEGCENVDFFTSNNNDDRQYLTLKFFKSTRFFKDQLEKLLETTRPDCLIADMFFPWATEAAEKFNVPRLVFHGTGYFSLCSEYCIRVHNPQNIVASRYEPFVIPDLPGNIVITQEQIADRDEESEMGKFMIEVKESDVKSSGVIVNSFYELEPDYADFYKSVVLKRAWHIGPLSVYNRGFEEKAERGKKASINEVECLKWLDSKKPDSVIYISFGSVACFKNEQLFEIAAGLETSGANFIWVVRKNIGIEKEEWLPEGFEERVKGKGMIIRGWAPQVLILDHQATCGFVTHCGWNSLLEGVAAGLPMVTWPVAAEQFYNEKLVTQVLRTGVSVGAKKNVRTTGDFISREKVVKAVREVLVGEEADERRERAKKLAEMAKAAVEGGSSFNDLNSFIEEFTS

SEQ ID NO: 80360 - protein, 481 aa, Arabidopsis thaliana
  peptide (1)..(481): Ceres Seq. ID no. 12655461
MSSDPHRKLHVVFFPFMAYGHMIPTLDMAKLFSSRGAKSTILTTPLNSKIFQKPIERFKNLNPSFEIDIQIFDFPCVDLGLPEGCENVDFFTSNNNDDRQYLTLKFFKSTRFFKDQLEKLLETTRPDCLIADMFFPWATEAAEKFNVPRLVFHGTGYFSLCSEYCIRVHNPQNIVASRYEPFVIPDLPGNIVITQEQIADRDEESEMGKFMIEVKESDVKSSGVIVNSFYELEPDYADFYKSVVLKRAWHIGPLSVYNRGFEEKAERGKKASINEVECLKWLDSKKPDSVIYISFGSVACFKNEQLFEIAAGLETSGANFIWVVRKNIGIEKEEWLPEGFEERVKGKGMIIRGWAPQVLILDHQATCGFVTHCGWNSLLEGVAAGLPMVTWPVAAEQFYNEKLVTQVLRTGVSVGAKKNVRTTGDFISREKVVKAVREVLVGEEADERRERAKKLAEMAKAAVEGGSSFNDLNSFIEEFTS

SEQ ID NO: 80361 - protein, 465 aa, Arabidopsis thaliana
  peptide (1)..(465): Ceres Seq. ID no. 12655462
MAYGHMIPTLDMAKLFSSRGAKSTILTTPLNSKIFQKPIERFKNLNPSFEIDIQIFDFPCVDLGLPEGCENVDFFTSNNNDDRQYLTLKFFKSTRFFKDQLEKLLETTRPDCLIADMFFPWATEAAEKFNVPRLVFHGTGYFSLCSEYCIRVHNPQNIVASRYEPFVIPDLPGNIVITQEQIADRDEESEMGKFMIEVKESDVKSSGVIVNSFYELEPDYADFYKSVVLKRAWHIGPLSVYNRGFEEKAERGKKASINEVECLKWLDSKKPDSVIYISFGSVACFKNEQLFEIAAGLETSGANFIWVVRKNIGIEKEEWLPEGFEERVKGKGMIIRGWAPQVLILDHQATCGFVTHCGWNSLLEGVAAGLPMVTWPVAAEQFYNEKLVTQVLRTGVSVGAKKNVRTTGDFISREKVVKAVREVLVGEEADERRERAKKLAEMAKAAVEGGSSFNDLNSFIEEFTS

SEQ ID NO: 80362 - DNA, 1762 bp, Arabidopsis thaliana
  misc_feature (1)..(1762): Ceres Seq. ID no. 12655463
  misc_feature (1)..(1762): Ortholog of  Ceres SEQ ID NO 13597574 as cited in SEQ ID NO 64677
  misc_feature (1)..(1762): Ortholog of  Ceres SEQ ID NO 12617417 as cited in SEQ ID NO 65089
  misc_feature (1)..(1762): Ortholog of  Ceres SEQ ID NO 13597678 as cited in SEQ ID NO 65375
  misc_feature (1)..(1762): Ortholog of  Ceres SEQ ID NO 13662880 as cited in SEQ ID NO 65422
  misc_feature (1)..(1762): Ortholog of  Ceres SEQ ID NO 12779098 as cited in SEQ ID NO 67698
  misc_feature (1)..(1762): Ortholog of  Ceres SEQ ID NO 13596180 as cited in SEQ ID NO 67941
  misc_feature (1)..(1762): Ortholog of  Ceres SEQ ID NO 13591190 as cited in SEQ ID NO 68044
  misc_feature (1)..(1762): Ortholog of  Ceres SEQ ID NO 13595961 as cited in SEQ ID NO 68223
atatatacaacgaggaaaaatagtactattttctacgaacttcagaatctttcgtctctcttaattatttttctcaaatttctcgaaacatctagttttcttttcaaccagccaatcatgggtagtgatcatcatcatcgaaagctccacgttatgttcttccctttcatggcttatggtcacatgataccaactctagacatggctaagcttttctctagcagaggagccaaatccacaatcctcaccacatctctcaactccaagatcctccaaaaacccatcgacacattcaagaatctgaatccgggtctcgaaatcgacatccagatcttcaatttcccttgcgtggagctggggttaccagaaggatgtgaaaacgttgatttcttcacttcaaacaacaatgatgataaaaacgagatgatcgtgaaattctttttctcgacaaggtttttcaaagaccagcttgagaaactcctcgggacaacgagaccagactgtcttatcgccgacatgttcttcccctgggctactgaagctgctgggaagttcaatgtgccaagacttgtgttccacggcactggctacttctctttatgcgctggttattgcatcggagtgcataaaccacagaagagagtggcttcaagctctgagccatttgtgattcccgagctccctgggaacattgtgataactgaagaacagatcatagatggcgatggagaatccgacatgggaaagtttatgactgaagttagggaatcggaagtgaagagctcaggagttgttttgaatagtttctacgagctagaacatgattacgccgatttttacaaaagttgtgtacaaaagagagcgtggcatatcggtccgctatcggtttacaacaggggatttgaggagaaggctgagagaggaaagaaagcgaacattgatgaggctgaatgcctcaaatggcttgactccaagaaaccaaattcagtcatttatgtttcctttgggagcgtggctttcttcaagaatgaacagttattcgagatcgctgcagggttagaagcttccggtacaagtttcatttgggttgttaggaaaaccaaagatgatagagaagaatggttaccagaagggttcgaagagagggtgaaagggaaaggtatgataataagaggatgggcaccacaggtgctgatacttgaccaccaagcaaccggtgggtttgtgacccattgcggctggaactcgcttcttgaaggagtggctgcagggctaccaatggtgacatggcctgtaggagcggagcaattctacaatgagaaattggttacgcaagtgctcagaacaggagtgagcgtgggagcgagcaagcatatgaaagttatgatgggagatttcattagcagagagaaagtggataaagcggtgagggaggttttggctggggaagcagcagaggagaggcggagacgggcaaagaagctagcggcgatggctaaagctgccgtggaagaaggagggtcttccttcaacgatctaaacagcttcatggaagagtttagttcataatcttcatatatatagattctatttagaaattccatagcagaagtaagatgaaagctaatgtaaaatataagagatatgagttaaattcaaatggcagcaacctctaccatagacatcactctaagtctctattatcttcagcataatcctctgttttgttaggagaaaatcaatggttcaagattcactattt

SEQ ID NO: 80363 - protein, 522 aa, Arabidopsis thaliana
  peptide (1)..(522): Ceres Seq. ID no. 12655464
IYTTRKNSTIFYELQNLSSLLIIFLKFLETSSFLFNQPIMGSDHHHRKLHVMFFPFMAYGHMIPTLDMAKLFSSRGAKSTILTTSLNSKILQKPIDTFKNLNPGLEIDIQIFNFPCVELGLPEGCENVDFFTSNNNDDKNEMIVKFFFSTRFFKDQLEKLLGTTRPDCLIADMFFPWATEAAGKFNVPRLVFHGTGYFSLCAGYCIGVHKPQKRVASSSEPFVIPELPGNIVITEEQIIDGDGESDMGKFMTEVRESEVKSSGVVLNSFYELEHDYADFYKSCVQKRAWHIGPLSVYNRGFEEKAERGKKANIDEAECLKWLDSKKPNSVIYVSFGSVAFFKNEQLFEIAAGLEASGTSFIWVVRKTKDDREEWLPEGFEERVKGKGMIIRGWAPQVLILDHQATGGFVTHCGWNSLLEGVAAGLPMVTWPVGAEQFYNEKLVTQVLRTGVSVGASKHMKVMMGDFISREKVDKAVREVLAGEAAEERRRRAKKLAAMAKAAVEEGGSSFNDLNSFMEEFSS

SEQ ID NO: 80364 - protein, 483 aa, Arabidopsis thaliana
  peptide (1)..(483): Ceres Seq. ID no. 12655465
MGSDHHHRKLHVMFFPFMAYGHMIPTLDMAKLFSSRGAKSTILTTSLNSKILQKPIDTFKNLNPGLEIDIQIFNFPCVELGLPEGCENVDFFTSNNNDDKNEMIVKFFFSTRFFKDQLEKLLGTTRPDCLIADMFFPWATEAAGKFNVPRLVFHGTGYFSLCAGYCIGVHKPQKRVASSSEPFVIPELPGNIVITEEQIIDGDGESDMGKFMTEVRESEVKSSGVVLNSFYELEHDYADFYKSCVQKRAWHIGPLSVYNRGFEEKAERGKKANIDEAECLKWLDSKKPNSVIYVSFGSVAFFKNEQLFEIAAGLEASGTSFIWVVRKTKDDREEWLPEGFEERVKGKGMIIRGWAPQVLILDHQATGGFVTHCGWNSLLEGVAAGLPMVTWPVGAEQFYNEKLVTQVLRTGVSVGASKHMKVMMGDFISREKVDKAVREVLAGEAAEERRRRAKKLAAMAKAAVEEGGSSFNDLNSFMEEFSS

SEQ ID NO: 80365 - protein, 471 aa, Arabidopsis thaliana
  peptide (1)..(471): Ceres Seq. ID no. 12655466
MFFPFMAYGHMIPTLDMAKLFSSRGAKSTILTTSLNSKILQKPIDTFKNLNPGLEIDIQIFNFPCVELGLPEGCENVDFFTSNNNDDKNEMIVKFFFSTRFFKDQLEKLLGTTRPDCLIADMFFPWATEAAGKFNVPRLVFHGTGYFSLCAGYCIGVHKPQKRVASSSEPFVIPELPGNIVITEEQIIDGDGESDMGKFMTEVRESEVKSSGVVLNSFYELEHDYADFYKSCVQKRAWHIGPLSVYNRGFEEKAERGKKANIDEAECLKWLDSKKPNSVIYVSFGSVAFFKNEQLFEIAAGLEASGTSFIWVVRKTKDDREEWLPEGFEERVKGKGMIIRGWAPQVLILDHQATGGFVTHCGWNSLLEGVAAGLPMVTWPVGAEQFYNEKLVTQVLRTGVSVGASKHMKVMMGDFISREKVDKAVREVLAGEAAEERRRRAKKLAAMAKAAVEEGGSSFNDLNSFMEEFSS

SEQ ID NO: 80366 - DNA, 2495 bp, Arabidopsis thaliana
  misc_feature (1)..(2495): Ceres Seq. ID no. 12655495
  misc_feature (1)..(2495): Ortholog of  Ceres SEQ ID NO 13598582 as cited in SEQ ID NO 65294
  misc_feature (1)..(2495): Ortholog of  Ceres SEQ ID NO 15176145 as cited in SEQ ID NO 0
accaaaacttctttctttctctctttttctatatctctagagcgcgttactgcgcgtcgtgagtatgtttttattgacgccattgaaattgggttaaatcggtttgaatcggattgaacaaaaactgtattaataataattcttcctctacttttctctctgattgattccaatcttctttcattttcttcttcttcttcttctggggaaggggcaggttaaaattatgccatctattcaaatcgtgcctatcctcagatcttaactcttttctctacgagattcggcatctgggttttattcttcttgagcaaaatgcaatcggataatggaaagcttttcatcggtgggatatcttgggacaccaatgaggaacgtctcaaggagtatttcagcagttttggagaagtgatcgaagctgtcatcttgaaagatcgtaccactggtcgtgctcgtggtttcggttttgttgtttttgctgatcctgctgttgctgagattgttatcaccgaaaaacataatattgatggcagattggttgaagccaagaaagctgttcccagagatgaccaaaacatggtaaatagaagcaacagcagtagcatccaaggttctcccggtggtccaggtcgcacaaggaagatatttgttggaggattaccttcttcggttacagagagtgatttcaagacgtattttgagcagtttggtacaactacggatgtggttgtcatgtatgatcacaacacacaaaggcctagaggtttcgggtttataacctacgattccgaggaggcggttgaaaaggtattgctcaagacattccatgaactaaatggtaaaatggttgaggttaagcgagctgttccaaaggagttatctccaggtccaagtcgcagtcctcttggtgcaggttacagctatggagttaatagggtcaataacctccttaatgggtatgctcaagggtttaatcccgctgcagttggaggctacggacttaggatggatggtcggttcagtccggttggtgctggaagaagcgggtttgcaaattacagttctggatacgggatgaatgtgaactttgatcagggattgcccacagggttcacgggaggtacaaattacaatggaaatgttgactatggccgaggaatgagcccgtactacattggtaacacaaacaggtttggtcctgcggttggctatgaagggggcaacggaggaggaaactcatccttcttcagttcggttacacggaacttatggggaaacaatggtggtcttaactataacaacaataatacaaactcaaactccaatacatatatgggaggatcatcaagtgggaacaacacacttagtggtccatttggaaattcaggagtcaattggggtgctcctggaggaggaaacaatgctgtgagtaacgagaatgtgaagtttggttatggaggaaacggtgaatctggttttgggttgggaacaggtggttatgcagcaagaaacccaggggctaacaaggcagcaccatcctcttcattctcttctgcctcagcaaccaacaacacgggttatgatacagcaggacttgcagagttttacgggaatggtgcagtttatagtgaccctacatggagatcaccaactcctgagacagaagggcctgctccttttagctatgggattggaggaggggttccttcttcagatgtttcagctagaagttcatctccaggttatgttggcagttacagtgtgaacaagagacaaccaaacagaggaattgctacttagtacaatcgtttttgttttaccacgatattgtaggcgagccatcacggtgaacgatctgtgtcttttggcgaatcttttagattatcttcttttcccttcatacaaagccagtgaggacgaaacttgatcatatcatcacctagagctaaccagagaatcccgcagacttttctgtcatggtttggttttctaaattcattgttcctcctaggcttttttctgctttctttttttttctatttttgttttcttttcttctttcaatgagggacagaagaaactgtatcagtctccggcgaggcggtaatacataaggagagttcaaaacaaaaacccaaaaaaaaaaaaaaaaagatgatccttcttcctcagttttcttcttcattgtcatgtaatggttcttcttcttttcttcttcttgggggttatggttaaggtttgtgttttgaggcagattgtactagagttttttttcatgtttcttttgttttgtcgtttttaagtccttttgttttgtttttgatagtgtgagatatggaaagagtatttagccatgtagggctttcgagaataagtctttttatcactatgagattattttgttctcaagctgtttgtatgtcttatgcgaacgcaagcaaactcgtttctgttgatgtacttttattttatagaaaaaactatttttatctttt

SEQ ID NO: 80367 - protein, 494 aa, Arabidopsis thaliana
  peptide (1)..(494): Ceres Seq. ID no. 12655496
MQSDNGKLFIGGISWDTNEERLKEYFSSFGEVIEAVILKDRTTGRARGFGFVVFADPAVAEIVITEKHNIDGRLVEAKKAVPRDDQNMVNRSNSSSIQGSPGGPGRTRKIFVGGLPSSVTESDFKTYFEQFGTTTDVVVMYDHNTQRPRGFGFITYDSEEAVEKVLLKTFHELNGKMVEVKRAVPKELSPGPSRSPLGAGYSYGVNRVNNLLNGYAQGFNPAAVGGYGLRMDGRFSPVGAGRSGFANYSSGYGMNVNFDQGLPTGFTGGTNYNGNVDYGRGMSPYYIGNTNRFGPAVGYEGGNGGGNSSFFSSVTRNLWGNNGGLNYNNNNTNSNSNTYMGGSSSGNNTLSGPFGNSGVNWGAPGGGNNAVSNENVKFGYGGNGESGFGLGTGGYAARNPGANKAAPSSSFSSASATNNTGYDTAGLAEFYGNGAVYSDPTWRSPTPETEGPAPFSYGIGGGVPSSDVSARSSSPGYVGSYSVNKRQPNRGIAT

SEQ ID NO: 80368 - protein, 407 aa, Arabidopsis thaliana
  peptide (1)..(407): Ceres Seq. ID no. 12655497
MVNRSNSSSIQGSPGGPGRTRKIFVGGLPSSVTESDFKTYFEQFGTTTDVVVMYDHNTQRPRGFGFITYDSEEAVEKVLLKTFHELNGKMVEVKRAVPKELSPGPSRSPLGAGYSYGVNRVNNLLNGYAQGFNPAAVGGYGLRMDGRFSPVGAGRSGFANYSSGYGMNVNFDQGLPTGFTGGTNYNGNVDYGRGMSPYYIGNTNRFGPAVGYEGGNGGGNSSFFSSVTRNLWGNNGGLNYNNNNTNSNSNTYMGGSSSGNNTLSGPFGNSGVNWGAPGGGNNAVSNENVKFGYGGNGESGFGLGTGGYAARNPGANKAAPSSSFSSASATNNTGYDTAGLAEFYGNGAVYSDPTWRSPTPETEGPAPFSYGIGGGVPSSDVSARSSSPGYVGSYSVNKRQPNRGIAT

SEQ ID NO: 80369 - protein, 355 aa, Arabidopsis thaliana
  peptide (1)..(355): Ceres Seq. ID no. 12655498
MYDHNTQRPRGFGFITYDSEEAVEKVLLKTFHELNGKMVEVKRAVPKELSPGPSRSPLGAGYSYGVNRVNNLLNGYAQGFNPAAVGGYGLRMDGRFSPVGAGRSGFANYSSGYGMNVNFDQGLPTGFTGGTNYNGNVDYGRGMSPYYIGNTNRFGPAVGYEGGNGGGNSSFFSSVTRNLWGNNGGLNYNNNNTNSNSNTYMGGSSSGNNTLSGPFGNSGVNWGAPGGGNNAVSNENVKFGYGGNGESGFGLGTGGYAARNPGANKAAPSSSFSSASATNNTGYDTAGLAEFYGNGAVYSDPTWRSPTPETEGPAPFSYGIGGGVPSSDVSARSSSPGYVGSYSVNKRQPNRGIAT

SEQ ID NO: 80370 - DNA, 1122 bp, Arabidopsis thaliana
  misc_feature (1)..(1122): Ceres Seq. ID no. 12655519
  misc_feature (1)..(1122): Ortholog of  Ceres SEQ ID NO 13596338 as cited in SEQ ID NO 68005
atggctcggtcgcatgcttgcttatatgaacttttatgttctgagacacccaaatggactcctcttagggttgaagatttgcaaacatcttcttctgatcccagagatcggttggagaagttgctgaagcaacctgggaataaatattgtgctgactgtggctctcctgaaccaaaatgggtatcgttgagtcttggtgtatttatctgcattaagtgttctggtgtacacagaagtcttggagttcatatatcaaaggttctatcagtaaagctagacgagtggacagatgatcaggttgacatgcttgtaggttacggtggaaacacggcagtgaacgaaagattcgaagcttgcaacatcgaccagtcaaagaaaccaaaaccagattctactaatgaggaacgaaatgatttcattagaaaaaaatatgagcagcaccagtttatggatccaaaggatggtgctttgtgcacttatcagcagcctagcagaacaaacacttcaccaccgtctttatgttctgcaagccaccgttctacaaaaaaccgtattggtcatgcatttaggaatagctggggaagaagagaatctgatcacaaaggaccaaagaagagcaattccatggcaggtatggttgagtttgtggggttgattaaggttaacgtggtaaaaggaaccaaccttgcggttcgagacgtgatgaccagcgatccttatgttatccttgctcttggccaacaatcggtaaaaacacgggtgataaagaacaacttgaatcctgtgtggaatgagacgctaatgctttcgatacccgagcccatgcctcctctcaaagtgctagtgtacgacaaggatacattctcgacagatgatttcatgggagaggcagagatagacatacaaccattggtgagtgcagcaaaagcatacgagacatcgagcataaaggaaccgatgcagctgggaagttgggtggcgagcaaagagaacacattggtgagtgatggcataatcttacttgaagacgggaaagtgaaacaagacatttcacttaggctacaaaatgttgaaagaggtgttcttgagatccagcttgaatgtcttcctctcactcaatga

SEQ ID NO: 80371 - protein, 373 aa, Arabidopsis thaliana
  peptide (1)..(373): Ceres Seq. ID no. 12655520
MARSHACLYELLCSETPKWTPLRVEDLQTSSSDPRDRLEKLLKQPGNKYCADCGSPEPKWVSLSLGVFICIKCSGVHRSLGVHISKVLSVKLDEWTDDQVDMLVGYGGNTAVNERFEACNIDQSKKPKPDSTNEERNDFIRKKYEQHQFMDPKDGALCTYQQPSRTNTSPPSLCSASHRSTKNRIGHAFRNSWGRRESDHKGPKKSNSMAGMVEFVGLIKVNVVKGTNLAVRDVMTSDPYVILALGQQSVKTRVIKNNLNPVWNETLMLSIPEPMPPLKVLVYDKDTFSTDDFMGEAEIDIQPLVSAAKAYETSSIKEPMQLGSWVASKENTLVSDGIILLEDGKVKQDISLRLQNVERGVLEIQLECLPLTQ

SEQ ID NO: 80372 - protein, 272 aa, Arabidopsis thaliana; identical to SEQ ID NO: 43618
  peptide (1)..(272): Ceres Seq. ID no. 12655521

SEQ ID NO: 80373 - protein, 224 aa, Arabidopsis thaliana; identical to SEQ ID NO: 43619
  peptide (1)..(224): Ceres Seq. ID no. 12655522

SEQ ID NO: 80374 - DNA, 4104 bp, Arabidopsis thaliana
  misc_feature (1)..(4104): Ceres Seq. ID no. 12655527
  misc_feature (1)..(4104): Ortholog of  Ceres SEQ ID NO 13596198 as cited in SEQ ID NO 68488
atggcgcgacagatgacgtcatcccagttccacaaatcaaagactctcgacaacaaatacatgctaggagatgaaattggtaaaggagcttatggtcgagtttatataggattagacttggagaatggagactttgttgccattaaacaagtctctttggaaaacattggtcaagaggatcttaacaccataatgcaagaaatcgatctcctaaagaacttgaaccataaaaacattgtcaagtatctcggatcgttgaagacaaagactcaccttcacattattctggagtacgttgagaatggctctcttgcaaacattattaaacctaataaatttggacctttcccagagtcgttggtgactgtttacattgcacaggtcttggaaggtttagtatatcttcatgagcagggtgtcatacatcgtgatatcaagggtgcaaatattttgacaaccaaggagggccttgttaagcttgctgattttggagttgccacaaaactcaacgaggctgattttaacactcactcagtggtcggaactccttactggatggctcctgaggttattgaattgtcaggagtttgtgctgcttctgacatttggagtgttggatgcactattattgaacttttgacttgtgtacctccttactatgatctgcaacccatgccagccctctatcgcattgttcaggatgatacccctcctattcctgatagtctttctcctgatattacagacttcctaagactgtgcttcaagaaggattccaggcagaggcctgatgcgaagacacttctctctcacccttggatacgtaactcgagacgagcattgcggtcatcgcttcggcatagtggaaccatcagatatatgaaggaaaccgattcaagttcagagaaggatgctgaaggtagtcaagaagtagttgaaagcgtttcagcagaaaaagtagaggtgacaaaaactaactcgaaaagcaaattacctgttataggtggggcgagttttaggtctgagaaagatcaatcttcacccagtgatcttggtgaagaaggaacggattcagaagatgatatcaattcagatcaaggtcctacattgtctatgcacgataagtcttctcgtcaatccggtacttgcagtatttcttcggatgcaaaggggacatctcaagatgtattagagaaccatgagaaatatgatcgtgatgaaatacctggaaatcttgaaacggaagcttctgaaggtagaaggaatactttagcaacaaagctggttggaaaagaatattctatccagtcatcacatagttttagccaaaaaggtgaagatgggcttagaaaggctgtgaagactccatctagttttggtgggaatgaactgaccagattcagtgatcctcctggggatgcttctttgcatgatttatttcatccactggataaagttcctgagggaaaaacaaatgaagcctcaacatcgacgcctactgcaaatgtaaatcagggtgattctcctgttgcagatggtggaaagaatgatctggcaacgaaattgagggctagaattgctcagaagcaaatggagggtgaaacggggcactcacaagatggtggtgatcttttccgcttaatgatgggtgttttgaaagatgatgtccttaacatcgatgacttggtatttgatgaaaaagttcccccggagaatctttttcctctgcaggcagtcgagttcagcagattggtgagctccttaaggccagatgaatcagaagatgcaatagtaacttcctctttgaaacttgttgccatgtttcgtcagagacctgggcagaaagcagtatttgtgacacagaatggtttcctccctctaatggatctactcgatattcctaaatctcgagtaatatgtgccgtgctgcagctgataaatgaaattgtaaaagataataccgacttcctggaaaatgcttgtcttgttggtcttattcctttggtaatgagttttgctggttttgagagggatcgatcacgagaaattcgtaaggaagcagcctacttcttgcagcagctttgtcagtcaagccccttgacgttgcaaatgttcatatcttgccgtggaatacccgttttggtgggatttcttgaagcagactatgccaaacacagggagatggttcacttggctattgatgggatgtggcaggtatttaaactcaaaaaatccacctcgagaaatgatttttgccgtattgctgcaaagaatggaattcttcttaggctagtcaacactctttatagcttgagtgaggcaactcgactggcttctatatcgggggatgcattgattttggatggtcaaactccacgagcacgctctggtcaacttgaccctaacaatcctatctttagtcagcgtgagacttcacctagtgtgattgatcatcctgatgggttgaaaactaggaatgggggtggtgaagagccttctcatgctttaacttcaaattctcaaagttcagatgtccatcaacccgatgccttgcacccagatggtgataggcctagattaagcagtgttgtagcagatgccacagaggatgttatacaacaacataggatatctctttctgccaatagaacatcaacagataagcttcagaaactggcggagggtgcgtctaatggttttcctgttactcagccagatcaagttcgacctttgcttagcttattggagaaagaacctccttcaagaaaaatttctggtcaactggattacgtaaagcatatcgctggcatagagaggcatgaaagtagacttcctcttttgtatgcatcagacgaaaagaaaaccaatggagacctagaatttataatggctgaatttgcagaagtctctggacgtggaaaggaaaacggaaatcttgatactgcgccaagatattccagcaagacgatgactaagaaggttatggctattgagagagtcgcatctacgtgtgggattgcatctcagacagcatctggtgttctgtcaggttcgggtgttttaaatgctagacctggaagtaccacatcatctggtttacttgcccatgcgctgagtgcagatgtctcaatggattacttggagaaagtggctgatctgcttcttgaatttgcccgagctgaaacgacagtaaaatcatacatgtgcagccaaagtttactcagtcgtcttttccagatgttcaaccgtgtggaacctcctattctgttaaagatactggaatgcaccaatcatttatccacggatccaaattgcttggaaaatcttcagcgtgcagatgcaatcaagcaattgatccccaaccttgagcttaaggaagggcctcttgtttatcagatccatcatgaggtacttagtgcactattcaacctctgcaagataaacaagaggaggcaggaacaagctgctgaaaatggaatcattccgcacctgatgcttttcgtcatgtcggattctcctctgaaacaatatgcattgccactactttgtgatatggctcatgcatctcggaattcaagagagcagttaagggcccacggcggtctggatgtttacctgagtttactcgatgatgaatattggtccgtgatagccttggattcaattgctgtttgcttggcgcaagacgttgaccaaaaggtggagcaggcgtttctcaagaaagatgcaattcagaaattagttaactttttccagaactgtccagagagacattttgtgcacattttggagccattcttgaagatcatcacgaaatcatcttcaatcaataagacattagcgttaaatggactgactccgttactcattgcaagactagaccaccaagatgctattgctcgacttaacctcctgaaactcatcaaggccgtttacgagaagcatccgaagccaaaacagctgatcgtagagaacgatcttccacaaaaactgcagaatctgatagaagaacgacgtgatggacaacgttcaggaggccaagttctggtgaagcaaatggcaacatctctcctcaaagcacttcacatcaacaccatcttgtga

SEQ ID NO: 80375 - protein, 1367 aa, Arabidopsis thaliana
  peptide (1)..(1367): Ceres Seq. ID no. 12655528
MARQMTSSQFHKSKTLDNKYMLGDEIGKGAYGRVYIGLDLENGDFVAIKQVSLENIGQEDLNTIMQEIDLLKNLNHKNIVKYLGSLKTKTHLHIILEYVENGSLANIIKPNKFGPFPESLVTVYIAQVLEGLVYLHEQGVIHRDIKGANILTTKEGLVKLADFGVATKLNEADFNTHSVVGTPYWMAPEVIELSGVCAASDIWSVGCTIIELLTCVPPYYDLQPMPALYRIVQDDTPPIPDSLSPDITDFLRLCFKKDSRQRPDAKTLLSHPWIRNSRRALRSSLRHSGTIRYMKETDSSSEKDAEGSQEVVESVSAEKVEVTKTNSKSKLPVIGGASFRSEKDQSSPSDLGEEGTDSEDDINSDQGPTLSMHDKSSRQSGTCSISSDAKGTSQDVLENHEKYDRDEIPGNLETEASEGRRNTLATKLVGKEYSIQSSHSFSQKGEDGLRKAVKTPSSFGGNELTRFSDPPGDASLHDLFHPLDKVPEGKTNEASTSTPTANVNQGDSPVADGGKNDLATKLRARIAQKQMEGETGHSQDGGDLFRLMMGVLKDDVLNIDDLVFDEKVPPENLFPLQAVEFSRLVSSLRPDESEDAIVTSSLKLVAMFRQRPGQKAVFVTQNGFLPLMDLLDIPKSRVICAVLQLINEIVKDNTDFLENACLVGLIPLVMSFAGFERDRSREIRKEAAYFLQQLCQSSPLTLQMFISCRGIPVLVGFLEADYAKHREMVHLAIDGMWQVFKLKKSTSRNDFCRIAAKNGILLRLVNTLYSLSEATRLASISGDALILDGQTPRARSGQLDPNNPIFSQRETSPSVIDHPDGLKTRNGGGEEPSHALTSNSQSSDVHQPDALHPDGDRPRLSSVVADATEDVIQQHRISLSANRTSTDKLQKLAEGASNGFPVTQPDQVRPLLSLLEKEPPSRKISGQLDYVKHIAGIERHESRLPLLYASDEKKTNGDLEFIMAEFAEVSGRGKENGNLDTAPRYSSKTMTKKVMAIERVASTCGIASQTASGVLSGSGVLNARPGSTTSSGLLAHALSADVSMDYLEKVADLLLEFARAETTVKSYMCSQSLLSRLFQMFNRVEPPILLKILECTNHLSTDPNCLENLQRADAIKQLIPNLELKEGPLVYQIHHEVLSALFNLCKINKRRQEQAAENGIIPHLMLFVMSDSPLKQYALPLLCDMAHASRNSREQLRAHGGLDVYLSLLDDEYWSVIALDSIAVCLAQDVDQKVEQAFLKKDAIQKLVNFFQNCPERHFVHILEPFLKIITKSSSINKTLALNGLTPLLIARLDHQDAIARLNLLKLIKAVYEKHPKPKQLIVENDLPQKLQNLIEERRDGQRSGGQVLVKQMATSLLKALHINTIL

SEQ ID NO: 80376 - protein, 1363 aa, Arabidopsis thaliana
  peptide (1)..(1363): Ceres Seq. ID no. 12655529
MTSSQFHKSKTLDNKYMLGDEIGKGAYGRVYIGLDLENGDFVAIKQVSLENIGQEDLNTIMQEIDLLKNLNHKNIVKYLGSLKTKTHLHIILEYVENGSLANIIKPNKFGPFPESLVTVYIAQVLEGLVYLHEQGVIHRDIKGANILTTKEGLVKLADFGVATKLNEADFNTHSVVGTPYWMAPEVIELSGVCAASDIWSVGCTIIELLTCVPPYYDLQPMPALYRIVQDDTPPIPDSLSPDITDFLRLCFKKDSRQRPDAKTLLSHPWIRNSRRALRSSLRHSGTIRYMKETDSSSEKDAEGSQEVVESVSAEKVEVTKTNSKSKLPVIGGASFRSEKDQSSPSDLGEEGTDSEDDINSDQGPTLSMHDKSSRQSGTCSISSDAKGTSQDVLENHEKYDRDEIPGNLETEASEGRRNTLATKLVGKEYSIQSSHSFSQKGEDGLRKAVKTPSSFGGNELTRFSDPPGDASLHDLFHPLDKVPEGKTNEASTSTPTANVNQGDSPVADGGKNDLATKLRARIAQKQMEGETGHSQDGGDLFRLMMGVLKDDVLNIDDLVFDEKVPPENLFPLQAVEFSRLVSSLRPDESEDAIVTSSLKLVAMFRQRPGQKAVFVTQNGFLPLMDLLDIPKSRVICAVLQLINEIVKDNTDFLENACLVGLIPLVMSFAGFERDRSREIRKEAAYFLQQLCQSSPLTLQMFISCRGIPVLVGFLEADYAKHREMVHLAIDGMWQVFKLKKSTSRNDFCRIAAKNGILLRLVNTLYSLSEATRLASISGDALILDGQTPRARSGQLDPNNPIFSQRETSPSVIDHPDGLKTRNGGGEEPSHALTSNSQSSDVHQPDALHPDGDRPRLSSVVADATEDVIQQHRISLSANRTSTDKLQKLAEGASNGFPVTQPDQVRPLLSLLEKEPPSRKISGQLDYVKHIAGIERHESRLPLLYASDEKKTNGDLEFIMAEFAEVSGRGKENGNLDTAPRYSSKTMTKKVMAIERVASTCGIASQTASGVLSGSGVLNARPGSTTSSGLLAHALSADVSMDYLEKVADLLLEFARAETTVKSYMCSQSLLSRLFQMFNRVEPPILLKILECTNHLSTDPNCLENLQRADAIKQLIPNLELKEGPLVYQIHHEVLSALFNLCKINKRRQEQAAENGIIPHLMLFVMSDSPLKQYALPLLCDMAHASRNSREQLRAHGGLDVYLSLLDDEYWSVIALDSIAVCLAQDVDQKVEQAFLKKDAIQKLVNFFQNCPERHFVHILEPFLKIITKSSSINKTLALNGLTPLLIARLDHQDAIARLNLLKLIKAVYEKHPKPKQLIVENDLPQKLQNLIEERRDGQRSGGQVLVKQMATSLLKALHINTIL

SEQ ID NO: 80377 - protein, 1347 aa, Arabidopsis thaliana
  peptide (1)..(1347): Ceres Seq. ID no. 12655530
MLGDEIGKGAYGRVYIGLDLENGDFVAIKQVSLENIGQEDLNTIMQEIDLLKNLNHKNIVKYLGSLKTKTHLHIILEYVENGSLANIIKPNKFGPFPESLVTVYIAQVLEGLVYLHEQGVIHRDIKGANILTTKEGLVKLADFGVATKLNEADFNTHSVVGTPYWMAPEVIELSGVCAASDIWSVGCTIIELLTCVPPYYDLQPMPALYRIVQDDTPPIPDSLSPDITDFLRLCFKKDSRQRPDAKTLLSHPWIRNSRRALRSSLRHSGTIRYMKETDSSSEKDAEGSQEVVESVSAEKVEVTKTNSKSKLPVIGGASFRSEKDQSSPSDLGEEGTDSEDDINSDQGPTLSMHDKSSRQSGTCSISSDAKGTSQDVLENHEKYDRDEIPGNLETEASEGRRNTLATKLVGKEYSIQSSHSFSQKGEDGLRKAVKTPSSFGGNELTRFSDPPGDASLHDLFHPLDKVPEGKTNEASTSTPTANVNQGDSPVADGGKNDLATKLRARIAQKQMEGETGHSQDGGDLFRLMMGVLKDDVLNIDDLVFDEKVPPENLFPLQAVEFSRLVSSLRPDESEDAIVTSSLKLVAMFRQRPGQKAVFVTQNGFLPLMDLLDIPKSRVICAVLQLINEIVKDNTDFLENACLVGLIPLVMSFAGFERDRSREIRKEAAYFLQQLCQSSPLTLQMFISCRGIPVLVGFLEADYAKHREMVHLAIDGMWQVFKLKKSTSRNDFCRIAAKNGILLRLVNTLYSLSEATRLASISGDALILDGQTPRARSGQLDPNNPIFSQRETSPSVIDHPDGLKTRNGGGEEPSHALTSNSQSSDVHQPDALHPDGDRPRLSSVVADATEDVIQQHRISLSANRTSTDKLQKLAEGASNGFPVTQPDQVRPLLSLLEKEPPSRKISGQLDYVKHIAGIERHESRLPLLYASDEKKTNGDLEFIMAEFAEVSGRGKENGNLDTAPRYSSKTMTKKVMAIERVASTCGIASQTASGVLSGSGVLNARPGSTTSSGLLAHALSADVSMDYLEKVADLLLEFARAETTVKSYMCSQSLLSRLFQMFNRVEPPILLKILECTNHLSTDPNCLENLQRADAIKQLIPNLELKEGPLVYQIHHEVLSALFNLCKINKRRQEQAAENGIIPHLMLFVMSDSPLKQYALPLLCDMAHASRNSREQLRAHGGLDVYLSLLDDEYWSVIALDSIAVCLAQDVDQKVEQAFLKKDAIQKLVNFFQNCPERHFVHILEPFLKIITKSSSINKTLALNGLTPLLIARLDHQDAIARLNLLKLIKAVYEKHPKPKQLIVENDLPQKLQNLIEERRDGQRSGGQVLVKQMATSLLKALHINTIL

SEQ ID NO: 80378 - DNA, 708 bp, Arabidopsis thaliana
  misc_feature (1)..(708): Ceres Seq. ID no. 12655544
  misc_feature (1)..(708): Ortholog of  Ceres SEQ ID NO 14312572 as cited in SEQ ID NO 55151
atgaacgatgcggatgtgtcaaagcagatacagcagatggtccggttcatccggcaagaagcagaagagaaagcaaacgagatctccatctccgccgaggaggaattcaacatagaaagacttcagcttctcgagtctgccaagcgtaagctccgtcaagactatgaccgcaagctcaagcaggttgatatccgcaagcgaatcgactactccacacaactgaatgcaagtaggattaagtaccttcaagctcaagatgacgttgtcactgccatgaaagactccgcagctaaggatcttctccgtgtctccaacgacaagaacaattacaagaagcttcttaagagtctcatcattgagagtttgctgcgcctgaaagagccatcagtgctgctgagatgcagagaaatggacaagaaggttgttgaatcggtcattgaagatgctaaaagacagtacgcggaaaaagccaaagtcgggtctcctaagatcaccatcgacgaaaaggtcttcctccctccacctcctaatccgaagctccctgattcccacgaccctcactgctcgggtggggtggtgctggcctctcaagacggcaagattgtctgcgagaacactttagacgcacgccttgacgtcgccttcagacagaagcttccccagatccggacgcgcctcgttggagctcctgaaacctccagagcatga

SEQ ID NO: 80379 - protein, 235 aa, Arabidopsis thaliana
  peptide (1)..(235): Ceres Seq. ID no. 12655545
MNDADVSKQIQQMVRFIRQEAEEKANEISISAEEEFNIERLQLLESAKRKLRQDYDRKLKQVDIRKRIDYSTQLNASRIKYLQAQDDVVTAMKDSAAKDLLRVSNDKNNYKKLLKSLIIESLLRLKEPSVLLRCREMDKKVVESVIEDAKRQYAEKAKVGSPKITIDEKVFLPPPPNPKLPDSHDPHCSGGVVLASQDGKIVCENTLDARLDVAFRQKLPQIRTRLVGAPETSRA

SEQ ID NO: 80380 - protein, 223 aa, Arabidopsis thaliana
  peptide (1)..(223): Ceres Seq. ID no. 12655546
MVRFIRQEAEEKANEISISAEEEFNIERLQLLESAKRKLRQDYDRKLKQVDIRKRIDYSTQLNASRIKYLQAQDDVVTAMKDSAAKDLLRVSNDKNNYKKLLKSLIIESLLRLKEPSVLLRCREMDKKVVESVIEDAKRQYAEKAKVGSPKITIDEKVFLPPPPNPKLPDSHDPHCSGGVVLASQDGKIVCENTLDARLDVAFRQKLPQIRTRLVGAPETSRA

SEQ ID NO: 80381 - protein, 144 aa, Arabidopsis thaliana
  peptide (1)..(144): Ceres Seq. ID no. 12655547
MKDSAAKDLLRVSNDKNNYKKLLKSLIIESLLRLKEPSVLLRCREMDKKVVESVIEDAKRQYAEKAKVGSPKITIDEKVFLPPPPNPKLPDSHDPHCSGGVVLASQDGKIVCENTLDARLDVAFRQKLPQIRTRLVGAPETSRA

SEQ ID NO: 80382 - DNA, 450 bp, Arabidopsis thaliana
  misc_feature (1)..(450): Ceres Seq. ID no. 12655563
  misc_feature (1)..(450): Ortholog of  Ceres SEQ ID NO 12584790 as cited in SEQ ID NO 62648
atggcttctaagaggatttcaagggaactgagggatatgcagagacatcctccagcaaactgtagcgcaggtcctgtggctgaggaggacatattccattggcaagcaactatcatgggaccgcatgacagtccgtattccggaggcgtatttacggtttctattgatttctcttcggattatcctttcaagccaccaaaggtgaatttcaagactaaggtgtaccacccaaacatcgacagcaaaggaagcatttgccttgacatattgaaagagcaatggagtcctgctcctaccacatccaaggttttgttgtcgatttgctcgctgctgactgacccgaacccaaatgatcctcttgtgccggagatagctcatctctacaaggtagataaatcaaaatacgagtcaactgcacaaaaatggacacagaagtacgcgatgggatga

SEQ ID NO: 80383 - protein, 149 aa, Arabidopsis thaliana
  peptide (1)..(149): Ceres Seq. ID no. 12655564
MASKRISRELRDMQRHPPANCSAGPVAEEDIFHWQATIMGPHDSPYSGGVFTVSIDFSSDYPFKPPKVNFKTKVYHPNIDSKGSICLDILKEQWSPAPTTSKVLLSICSLLTDPNPNDPLVPEIAHLYKVDKSKYESTAQKWTQKYAMG

SEQ ID NO: 80384 - protein, 137 aa, Arabidopsis thaliana
  peptide (1)..(137): Ceres Seq. ID no. 12655565
MQRHPPANCSAGPVAEEDIFHWQATIMGPHDSPYSGGVFTVSIDFSSDYPFKPPKVNFKTKVYHPNIDSKGSICLDILKEQWSPAPTTSKVLLSICSLLTDPNPNDPLVPEIAHLYKVDKSKYESTAQKWTQKYAMG

SEQ ID NO: 80385 - protein, 111 aa, Arabidopsis thaliana
  peptide (1)..(111): Ceres Seq. ID no. 12655566
MGPHDSPYSGGVFTVSIDFSSDYPFKPPKVNFKTKVYHPNIDSKGSICLDILKEQWSPAPTTSKVLLSICSLLTDPNPNDPLVPEIAHLYKVDKSKYESTAQKWTQKYAMG

SEQ ID NO: 80386 - DNA, 1954 bp, Arabidopsis thaliana
  misc_feature (1)..(1954): Ceres Seq. ID no. 12655567
  misc_feature (1)..(1954): Ortholog of  Ceres SEQ ID NO 13599900 as cited in SEQ ID NO 531
  misc_feature (1)..(1954): Ortholog of  Ceres SEQ ID NO 14304811 as cited in SEQ ID NO 53097
  misc_feature (1)..(1954): Ortholog of  Ceres SEQ ID NO 13659971 as cited in SEQ ID NO 67565
  misc_feature (1)..(1954): Ortholog of  Ceres SEQ ID NO 13500385 as cited in SEQ ID NO 67583
gttttactctatatctggatttgtttgaaaattgcttgtgttatgcgccagctttttccctaatatatagactaggtcttaattacagatattagagttcgtttcctcgagggtttctttcgacctcgtgtcctggtgaaattttggaattctaaggctttggggttttatttgggaggggatgatcatctaaaggatattcggtcggtgtcgtgttttcttaatctcaattctgttgactttagctttgcgcttaaagtactttgatggcattgggacacttgtgcagcatccactgtttccttaaaatagggaaacaagaagagcttcttgtcctagatattggtttgcctattcccagtttcttcctcattaactttattggtagcagagcctcatccatctggtgaacttgtgaagcttcctctgtgattcttttggcgattggttagaaatatggtttcttctcagtgttctgttgcaaacaaaaaccagactgggaagccgtttcagaaacatctatctttatccatcagccctccaaaatctgtcttgggtgataaccttgagcttcaattctctgatgtctttggaccaatgcctgaagctaactctgaagaggcctgtgatgttgcttacgacgagcctgctgttgtctacagtcgatcccactcattggttggcccgtctttggttgttagccattctttgaagatgaacaagctcactttacgagaaactgaggactcagttgacttggtggagtgtgttgaaggtgaatcgataaaagagaacgatgaattctctggtaatgatgacactgacagtgagaaatctccagaggaggtctcaggtgtagtaggcattgaggactttgaggtattgaaggttgtgggacaaggtgcatttggaaaagtgtaccaggtgaggaaaaaagacacgtctgagatatacgcgatgaaggtcatgagaaaagataaaattgttgagaagaatcatgctgaatacatgaaagccgagcgcgatattctaaccaaaatcgatcatcctttcattgtgcaacttaaatactcttttcagaccaaatacagattgtatcttgttcttgactttataaacggaggtcatcttttcttccagctctatcaccaagggcttttcagggaggacttggctcgtgtgtacactgcagaaatcgtctctgcagtttcccatctccatgagaaaggcataatgcatagagatcttaaacctgaaaacatactcatggacgtagatggccatgtgatgttaactgattttggtttagcaaaagaatttgaagaaaacacaagatcaaactccatgtgtgggactacggagtatatggcccctgagattgttcgtggaaaaggacatgataaggctgccgactggtggagtgtaggaatccttctgtatgagatgctcactggaaagccgccgtttctcgggagcaaaggaaagatacagcagaaaatcgttaaggacaagatcaagcttccacagtttctgtctaatgaagctcatgccttgctgaaagggctgctgcaaaaagagccagaaaggagactgggaagtggaccgagcggagcagaggagataaaaaaacacaaatggttcaaggcgataaactggaagaagctggaggctagagaagtacaaccaagtttcaagccggcggtttcgggaagacaatgcatagctaattttgacaagtgttggactgacatgtctgttttggattctccagcaagtagtcccaactctgatgctaaggcgaacccttttacaaacttcacatacgtcaggcctcctcattcattccttcatcggaccacatccaacttgtagatgaactataatatgttacccccgcttctgtttttgtaatccgaaacatatgaacatgcacaaaatcaacggttgtttgaag

SEQ ID NO: 80387 - protein, 471 aa, Arabidopsis thaliana
  peptide (1)..(471): Ceres Seq. ID no. 12655568
MVSSQCSVANKNQTGKPFQKHLSLSISPPKSVLGDNLELQFSDVFGPMPEANSEEACDVAYDEPAVVYSRSHSLVGPSLVVSHSLKMNKLTLRETEDSVDLVECVEGESIKENDEFSGNDDTDSEKSPEEVSGVVGIEDFEVLKVVGQGAFGKVYQVRKKDTSEIYAMKVMRKDKIVEKNHAEYMKAERDILTKIDHPFIVQLKYSFQTKYRLYLVLDFINGGHLFFQLYHQGLFREDLARVYTAEIVSAVSHLHEKGIMHRDLKPENILMDVDGHVMLTDFGLAKEFEENTRSNSMCGTTEYMAPEIVRGKGHDKAADWWSVGILLYEMLTGKPPFLGSKGKIQQKIVKDKIKLPQFLSNEAHALLKGLLQKEPERRLGSGPSGAEEIKKHKWFKAINWKKLEAREVQPSFKPAVSGRQCIANFDKCWTDMSVLDSPASSPNSDAKANPFTNFTYVRPPHSFLHRTTSNL

SEQ ID NO: 80388 - protein, 424 aa, Arabidopsis thaliana
  peptide (1)..(424): Ceres Seq. ID no. 12655569
MPEANSEEACDVAYDEPAVVYSRSHSLVGPSLVVSHSLKMNKLTLRETEDSVDLVECVEGESIKENDEFSGNDDTDSEKSPEEVSGVVGIEDFEVLKVVGQGAFGKVYQVRKKDTSEIYAMKVMRKDKIVEKNHAEYMKAERDILTKIDHPFIVQLKYSFQTKYRLYLVLDFINGGHLFFQLYHQGLFREDLARVYTAEIVSAVSHLHEKGIMHRDLKPENILMDVDGHVMLTDFGLAKEFEENTRSNSMCGTTEYMAPEIVRGKGHDKAADWWSVGILLYEMLTGKPPFLGSKGKIQQKIVKDKIKLPQFLSNEAHALLKGLLQKEPERRLGSGPSGAEEIKKHKWFKAINWKKLEAREVQPSFKPAVSGRQCIANFDKCWTDMSVLDSPASSPNSDAKANPFTNFTYVRPPHSFLHRTTSNL

SEQ ID NO: 80389 - protein, 385 aa, Arabidopsis thaliana
  peptide (1)..(385): Ceres Seq. ID no. 12655570
MNKLTLRETEDSVDLVECVEGESIKENDEFSGNDDTDSEKSPEEVSGVVGIEDFEVLKVVGQGAFGKVYQVRKKDTSEIYAMKVMRKDKIVEKNHAEYMKAERDILTKIDHPFIVQLKYSFQTKYRLYLVLDFINGGHLFFQLYHQGLFREDLARVYTAEIVSAVSHLHEKGIMHRDLKPENILMDVDGHVMLTDFGLAKEFEENTRSNSMCGTTEYMAPEIVRGKGHDKAADWWSVGILLYEMLTGKPPFLGSKGKIQQKIVKDKIKLPQFLSNEAHALLKGLLQKEPERRLGSGPSGAEEIKKHKWFKAINWKKLEAREVQPSFKPAVSGRQCIANFDKCWTDMSVLDSPASSPNSDAKANPFTNFTYVRPPHSFLHRTTSNL

SEQ ID NO: 80390 - DNA, 2058 bp, Arabidopsis thaliana
  misc_feature (1)..(2058): Ceres Seq. ID no. 12655585
  misc_feature (1)..(2058): Ortholog of  Ceres SEQ ID NO 12586556 as cited in SEQ ID NO 64667
  misc_feature (1)..(2058): Ortholog of  Ceres SEQ ID NO 13660894 as cited in SEQ ID NO 67475
atgagcatcgtcaccgttccatcagcaacatcaaaagtccagcagatcaaaactctaatctccgtcgcatgcaccgtcaatcatctgaaacaaatccacgtctctctcattaaccaccatctccaccacgacaccttcctcgtcaacctcctcctcaagcgaactctcttcttccgccaaaccaaatactcctatctcctcttctctcatacccaattccccaacattttcctctacaatagtctcatcaatggcttcgtcaataatcatctcttccatgaaaccctcgatctcttcctctccatccgcaaacatggtctctacctccatggtttcaccttccctttggttctcaaggcatgcaccagagcctcgagtcgcaagcttgggattgatcttcattcccttgtggtcaaatgtgggtttaatcacgatgtggccgctatgacgagcctgctctctatctactctggatccgggcgtttgaatgatgcccacaaactgttcgacgaaattcctgacagaagcgttgttacttggacggctttgtttagtgggtatactacttcaggaagacacagggaagccattgatttgtttaagaagatggtggagatgggtgtgaaacccgatagctactttattgttcaggttttatctgcttgtgttcatgtaggggatctcgacagtggggagtggatagttaagtacatggaagagatggagatgcagaagaattcctttgtgcggacaacacttgtcaatctctatgccaagtgtgggaagatggagaaagcacgttctgttttcgactcgatggtggagaaagatatagttacttggagcactatgatacaagggtatgcatcgaacagcttcccaaaagaaggaatagagttatttctccagatgttgcaggaaaatctgaaaccggaccagttttctattgtcgggtttctttcgtcttgtgcaagcttaggagcccttgatctaggtgaatggggaattagtttaatagataggcatgagtttttgaccaatctgtttatggccaatgccctgatcgacatgtacgcgaaatgtggggctatggctcgaggttttgaagtatttaaagaaatgaaggagaaagatatagttatcatgaatgctgcaatttctggtctggccaagaatggccacgttaagctctcatttgcggtttttggacaaacagagaagttaggtatctcacctgatgggtccacgttccttggactgctctgtgggtgcgttcacgcaggcctaatccaagacgggcttcggtttttcaatgccataagctgtgtttatgctttgaaacgcacggttgagcactatggttgcatggtagatctttggggcagagcaggaatgttagatgacgcataccgtttgatctgcgatatgcccatgaggccaaacgcgatagtctggggagcgttactgagcggatgcagactggtcaaagatacgcagttagctgaaactgttctcaaagagctcatcgctttggagccatggaatgcaggaaactatgttcaattatccaacatatactctgttggtggcagatgggacgaagctgctgaagtaagggacatgatgaacaagaaaggtatgaagaagatcccgggatatagttggatcgagttggaagggaaggtccatgagtttctagcagatgataaatctcatcctctaagcgacaagatatatgcaaagctagaagatttgggtaatgaaatgaggcttatgggttttgttccaacgacagaatttgttttcttcgatgttgaagaggaagaaaaagaaagggtcttggggtatcacagcgagaagcttgcggttgcgttagggctgatcagtacggatcatggccaagtgattcgggtggtgaagaatctaagggtatgtggagattgtcatgaagtgatgaagttgatatcgaagatcacaagacgagagatcgttgttagagacaacaataggtttcattgttttacaaacggctcttgttcttgcaatgactactggtga

SEQ ID NO: 80391 - protein, 685 aa, Arabidopsis thaliana
  peptide (1)..(685): Ceres Seq. ID no. 12655586
MSIVTVPSATSKVQQIKTLISVACTVNHLKQIHVSLINHHLHHDTFLVNLLLKRTLFFRQTKYSYLLFSHTQFPNIFLYNSLINGFVNNHLFHETLDLFLSIRKHGLYLHGFTFPLVLKACTRASSRKLGIDLHSLVVKCGFNHDVAAMTSLLSIYSGSGRLNDAHKLFDEIPDRSVVTWTALFSGYTTSGRHREAIDLFKKMVEMGVKPDSYFIVQVLSACVHVGDLDSGEWIVKYMEEMEMQKNSFVRTTLVNLYAKCGKMEKARSVFDSMVEKDIVTWSTMIQGYASNSFPKEGIELFLQMLQENLKPDQFSIVGFLSSCASLGALDLGEWGISLIDRHEFLTNLFMANALIDMYAKCGAMARGFEVFKEMKEKDIVIMNAAISGLAKNGHVKLSFAVFGQTEKLGISPDGSTFLGLLCGCVHAGLIQDGLRFFNAISCVYALKRTVEHYGCMVDLWGRAGMLDDAYRLICDMPMRPNAIVWGALLSGCRLVKDTQLAETVLKELIALEPWNAGNYVQLSNIYSVGGRWDEAAEVRDMMNKKGMKKIPGYSWIELEGKVHEFLADDKSHPLSDKIYAKLEDLGNEMRLMGFVPTTEFVFFDVEEEEKERVLGYHSEKLAVALGLISTDHGQVIRVVKNLRVCGDCHEVMKLISKITRREIVVRDNNRFHCFTNGSCSCNDYW

SEQ ID NO: 80392 - protein, 537 aa, Arabidopsis thaliana
  peptide (1)..(537): Ceres Seq. ID no. 12655587
MTSLLSIYSGSGRLNDAHKLFDEIPDRSVVTWTALFSGYTTSGRHREAIDLFKKMVEMGVKPDSYFIVQVLSACVHVGDLDSGEWIVKYMEEMEMQKNSFVRTTLVNLYAKCGKMEKARSVFDSMVEKDIVTWSTMIQGYASNSFPKEGIELFLQMLQENLKPDQFSIVGFLSSCASLGALDLGEWGISLIDRHEFLTNLFMANALIDMYAKCGAMARGFEVFKEMKEKDIVIMNAAISGLAKNGHVKLSFAVFGQTEKLGISPDGSTFLGLLCGCVHAGLIQDGLRFFNAISCVYALKRTVEHYGCMVDLWGRAGMLDDAYRLICDMPMRPNAIVWGALLSGCRLVKDTQLAETVLKELIALEPWNAGNYVQLSNIYSVGGRWDEAAEVRDMMNKKGMKKIPGYSWIELEGKVHEFLADDKSHPLSDKIYAKLEDLGNEMRLMGFVPTTEFVFFDVEEEEKERVLGYHSEKLAVALGLISTDHGQVIRVVKNLRVCGDCHEVMKLISKITRREIVVRDNNRFHCFTNGSCSCNDYW

SEQ ID NO: 80393 - protein, 483 aa, Arabidopsis thaliana
  peptide (1)..(483): Ceres Seq. ID no. 12655588
MVEMGVKPDSYFIVQVLSACVHVGDLDSGEWIVKYMEEMEMQKNSFVRTTLVNLYAKCGKMEKARSVFDSMVEKDIVTWSTMIQGYASNSFPKEGIELFLQMLQENLKPDQFSIVGFLSSCASLGALDLGEWGISLIDRHEFLTNLFMANALIDMYAKCGAMARGFEVFKEMKEKDIVIMNAAISGLAKNGHVKLSFAVFGQTEKLGISPDGSTFLGLLCGCVHAGLIQDGLRFFNAISCVYALKRTVEHYGCMVDLWGRAGMLDDAYRLICDMPMRPNAIVWGALLSGCRLVKDTQLAETVLKELIALEPWNAGNYVQLSNIYSVGGRWDEAAEVRDMMNKKGMKKIPGYSWIELEGKVHEFLADDKSHPLSDKIYAKLEDLGNEMRLMGFVPTTEFVFFDVEEEEKERVLGYHSEKLAVALGLISTDHGQVIRVVKNLRVCGDCHEVMKLISKITRREIVVRDNNRFHCFTNGSCSCNDYW

SEQ ID NO: 80394 - DNA, 2082 bp, Arabidopsis thaliana
  misc_feature (1)..(2082): Ceres Seq. ID no. 12655593
  misc_feature (1)..(2082): Ortholog of  Ceres SEQ ID NO 13655640 as cited in SEQ ID NO 63844
atgggcatagcaagatccataaactcgttcatgttcttcttctttctaatgatattatcaaacgcttctaaaagctctgttcttgctgaggccacgacagcgaaattcacattcataggtttcaaagaaaaccaaacggatattcaaacagaaggagcttccacaatccaacacgacaatgatcttcttagactaactaatcggaaacaaaacgtcactggaacagcgttttaccgcaaaccaatcagattgcgtgagttaaccaattcctccgatatcaaagtttgttcctttagcacttctttcgtcttcgtcatactcccttcaagtcccggcaacggtggttttggtttcacgttcacactttctccgaccccgaatcgtccaggagccgaatctgcacagtatttgggtctgttgaacagaaccaacaacggtaatccatcgaatcacgtattcgcagtggaattcgacacggtacaaggatttaaagacggcgcagacagaagaggaaaccacatcggtcttaatttcaacaacctctcctccaatgtacaagaaccactcatttactacgacacagaggatcgaaaggaagattttcagctcgagagcggcgaaccaatccgagttcttatcgattacgacggatccagcgaaaccttaaacgttacaatctatccgacgagattagagtttaaacccaagaagcctctaatctcgcgacgagtttcagagctgtcggagattgtgaaggatgaaatgtacgtcggattcaccgccgcgactggaaaagaccagtcgagtgctcactatgtaatgggttggagtttttcaagctgcggagaaaatccaatggcggattggctcgagatctcgcggcttcctcctccacctcgcttgagtaacaagaaaggttacaattctcaagtcattgttttgattgttgctttatcgatcgtcacactggtcttgcttgtgttactatttatatttgtgatgtacaaaaggcgaatccaagaagaagatactctagaggattgggagattgattatcctcataggtttagatacagagatctctacttagcaacgaagaaattcaaagagagtgagattatcggtactggaggatttggaatcgtttacagaggaaatctatcttcttcgggtccaatcgcagtgaagaagataacctcaaatagcttacaaggtgttcgagaatttatggcagagatcgagagtttaggaagattaggtcataagaacctcgtgaatcttcaaggatggtgcaaacacaagaacgagctcttgttaatttacgattatatacccaacggaagtctcgactcgttgctgtaccaaacgccgagaagaaacggcatcgtgttgccgtgggacgtgcgtttcgagatcataaagggaatcgcgtcgggactgttgtaccttcatgaggaatgggaacagatcgtggttcatagagacgtgaaaccgagcaatgttcttattgatgaagatatgaacgctaaattaggcgattttggactcgcgaggctttatgaacgcggaacgttaacgcagaccacgaaaatcgttggcactttagggtacatggcgcctgagctcacacgtaacggtaaaggctcaaccgcgtctgacgttttcgcgtttggcgttttgttgttagaaatagtgtgtgggaataaaccaacgaatgcagagaacttcttcttagctgattgggtaatggaatttcatactaatggtggaatcctttgcgtcgtggatcagaatctcgggtctagtttcaatggcagagaggctaaactagctcttgttgtggggttactatgttgccatcagaaaccaaaatttaggccatcgatgagaatggtgcttagatatttgaatggtgaagagaatgttccacagattgatgaaaattggggattctcggattcttcgagagacgatcataaatcgaatgttgtaggttatgtttcgtctgatagagcctcgagctcgaatactttttcgtctttctccaatgtttcttcaagctctatcgttagtggtagatag

SEQ ID NO: 80395 - protein, 693 aa, Arabidopsis thaliana
  peptide (1)..(693): Ceres Seq. ID no. 12655594
MGIARSINSFMFFFFLMILSNASKSSVLAEATTAKFTFIGFKENQTDIQTEGASTIQHDNDLLRLTNRKQNVTGTAFYRKPIRLRELTNSSDIKVCSFSTSFVFVILPSSPGNGGFGFTFTLSPTPNRPGAESAQYLGLLNRTNNGNPSNHVFAVEFDTVQGFKDGADRRGNHIGLNFNNLSSNVQEPLIYYDTEDRKEDFQLESGEPIRVLIDYDGSSETLNVTIYPTRLEFKPKKPLISRRVSELSEIVKDEMYVGFTAATGKDQSSAHYVMGWSFSSCGENPMADWLEISRLPPPPRLSNKKGYNSQVIVLIVALSIVTLVLLVLLFIFVMYKRRIQEEDTLEDWEIDYPHRFRYRDLYLATKKFKESEIIGTGGFGIVYRGNLSSSGPIAVKKITSNSLQGVREFMAEIESLGRLGHKNLVNLQGWCKHKNELLLIYDYIPNGSLDSLLYQTPRRNGIVLPWDVRFEIIKGIASGLLYLHEEWEQIVVHRDVKPSNVLIDEDMNAKLGDFGLARLYERGTLTQTTKIVGTLGYMAPELTRNGKGSTASDVFAFGVLLLEIVCGNKPTNAENFFLADWVMEFHTNGGILCVVDQNLGSSFNGREAKLALVVGLLCCHQKPKFRPSMRMVLRYLNGEENVPQIDENWGFSDSSRDDHKSNVVGYVSSDRASSSNTFSSFSNVSSSSIVSGR

SEQ ID NO: 80396 - protein, 683 aa, Arabidopsis thaliana
  peptide (1)..(683): Ceres Seq. ID no. 12655595
MFFFFLMILSNASKSSVLAEATTAKFTFIGFKENQTDIQTEGASTIQHDNDLLRLTNRKQNVTGTAFYRKPIRLRELTNSSDIKVCSFSTSFVFVILPSSPGNGGFGFTFTLSPTPNRPGAESAQYLGLLNRTNNGNPSNHVFAVEFDTVQGFKDGADRRGNHIGLNFNNLSSNVQEPLIYYDTEDRKEDFQLESGEPIRVLIDYDGSSETLNVTIYPTRLEFKPKKPLISRRVSELSEIVKDEMYVGFTAATGKDQSSAHYVMGWSFSSCGENPMADWLEISRLPPPPRLSNKKGYNSQVIVLIVALSIVTLVLLVLLFIFVMYKRRIQEEDTLEDWEIDYPHRFRYRDLYLATKKFKESEIIGTGGFGIVYRGNLSSSGPIAVKKITSNSLQGVREFMAEIESLGRLGHKNLVNLQGWCKHKNELLLIYDYIPNGSLDSLLYQTPRRNGIVLPWDVRFEIIKGIASGLLYLHEEWEQIVVHRDVKPSNVLIDEDMNAKLGDFGLARLYERGTLTQTTKIVGTLGYMAPELTRNGKGSTASDVFAFGVLLLEIVCGNKPTNAENFFLADWVMEFHTNGGILCVVDQNLGSSFNGREAKLALVVGLLCCHQKPKFRPSMRMVLRYLNGEENVPQIDENWGFSDSSRDDHKSNVVGYVSSDRASSSNTFSSFSNVSSSSIVSGR

SEQ ID NO: 80397 - protein, 677 aa, Arabidopsis thaliana
  peptide (1)..(677): Ceres Seq. ID no. 12655596
MILSNASKSSVLAEATTAKFTFIGFKENQTDIQTEGASTIQHDNDLLRLTNRKQNVTGTAFYRKPIRLRELTNSSDIKVCSFSTSFVFVILPSSPGNGGFGFTFTLSPTPNRPGAESAQYLGLLNRTNNGNPSNHVFAVEFDTVQGFKDGADRRGNHIGLNFNNLSSNVQEPLIYYDTEDRKEDFQLESGEPIRVLIDYDGSSETLNVTIYPTRLEFKPKKPLISRRVSELSEIVKDEMYVGFTAATGKDQSSAHYVMGWSFSSCGENPMADWLEISRLPPPPRLSNKKGYNSQVIVLIVALSIVTLVLLVLLFIFVMYKRRIQEEDTLEDWEIDYPHRFRYRDLYLATKKFKESEIIGTGGFGIVYRGNLSSSGPIAVKKITSNSLQGVREFMAEIESLGRLGHKNLVNLQGWCKHKNELLLIYDYIPNGSLDSLLYQTPRRNGIVLPWDVRFEIIKGIASGLLYLHEEWEQIVVHRDVKPSNVLIDEDMNAKLGDFGLARLYERGTLTQTTKIVGTLGYMAPELTRNGKGSTASDVFAFGVLLLEIVCGNKPTNAENFFLADWVMEFHTNGGILCVVDQNLGSSFNGREAKLALVVGLLCCHQKPKFRPSMRMVLRYLNGEENVPQIDENWGFSDSSRDDHKSNVVGYVSSDRASSSNTFSSFSNVSSSSIVSGR

SEQ ID NO: 80398 - DNA, 2064 bp, Arabidopsis thaliana
  misc_feature (1)..(2064): Ceres Seq. ID no. 12655608
  misc_feature (1)..(2064): Ortholog of  Ceres SEQ ID NO 13657677 as cited in SEQ ID NO 66119
atggtcgtgttcccaaagtcgctgtcacccaaacacgtccttaagctcttgaaatcggagaagaacccgcgtgcggcttttgctctattcgattcggcgactcgccatccaggctatgcacactccgccgtcgtttaccaccatatcctccgacgtctctcggagacgcggatggttaatcatgtaagtcgaatcgtcgagcttattaggtcacaagaatgtaaatgcgacgaagatgtcgctttatcggttatcaaaacctacggaaagaactccatgcctgatcaagctctagatgttttcaaacgaatgcgagagattttcgggtgcgagcctgcgattcgatcttataacactctacttaatgcgttcgtggaggcgaaacaatgggttaaagtcgagtccttgttcgcctacttcgagactgctggagtggcgccaaatctgcagacgtataatgttttgattaaaatgtcttgtaagaagaaggagttcgagaaagcgagagggtttctagattggatgtggaaagaggggtttaagcctgatgtgtttagttacagcactgtgatcaacgatcttgctaaagctgggaaattggatgatgcactggaactgttcgatgaaatgtctgaaagaggagtggcacctgatgtcacgtgttataatatcttaattgatgggtttcttaaggaaaaagatcacaagacggctatggaactgtgggacagactgttggaggactcttctgtttatccgaatgttaagactcacaacatcatgattagtggtttgagcaaatgcggaagagtagatgattgtttaaagatatgggagagaatgaaacaaaatgagcgtgaaaaagatttatatacatatagcagtttgatacatgggctgtgcgatgcaggtaatgttgataaggctgaaagtgtgtttaatgagttggacgaaaggaaagcctcgattgatgtggttacatacaatactatgcttggtgggttttgccgttgtgggaaaattaaggagagtttggagttgtggagaatcatggagcacaagaattcagttaacatagtgagttataacattttgattaaagggttgttggagaatgggaagatcgatgaagcaacaatgatttggaggcttatgcctgccaagggctatgcagctgacaaaactacttacggtatttttattcacgggttatgtgtgaatggttatgtgaataaagccttgggggtgatgcaagaggtggagagcagtggtgggcatctggatgtttatgcatatgcgtcaattatagactgtttgtgcaaaaagaaaagattagaagaagcgtcaaatttggtaaaagagatgagtaagcatggcgtggagctaaattctcatgtctgtaatgcattaataggtggtttaatccgagactcaagacttggtgaggcttccttttttctgagagagatggggaagaacggttgtcgcccgactgttgtatcctacaacattcttatttgcggtttgtgtaaagcagggaaatttggtgaagcatctgcttttgtgaaagaaatgcttgaaaacggatggaaaccagatctgaaaacttatagtatactcttatgtggtctttgccgcgacaggaagatcgatttggcccttgaattgtggcaccaatttcttcaatcgggactcgaaaccgatgtgatgatgcataacatactaattcatggtctgtgctctgttgggaaacttgatgatgcaatgactgtcatggcaaatatggagcatcggaattgcactgcaaatcttgtaacctacaacaccttgatggaaggattcttcaaagttggagatagcaacagagccacagtgatttggggttacatgtacaagatggggttgcaacctgatattatatcctacaatactataatgaaagggttgtgtatgtgccgcggagtgtcgtatgctatggaattctttgatgatgctagaaaccatggcatttttccaactgtttacacctggaacatacttgttcgagctgtcgtgaatcgctaa

SEQ ID NO: 80399 - protein, 687 aa, Arabidopsis thaliana
  peptide (1)..(687): Ceres Seq. ID no. 12655609
MVVFPKSLSPKHVLKLLKSEKNPRAAFALFDSATRHPGYAHSAVVYHHILRRLSETRMVNHVSRIVELIRSQECKCDEDVALSVIKTYGKNSMPDQALDVFKRMREIFGCEPAIRSYNTLLNAFVEAKQWVKVESLFAYFETAGVAPNLQTYNVLIKMSCKKKEFEKARGFLDWMWKEGFKPDVFSYSTVINDLAKAGKLDDALELFDEMSERGVAPDVTCYNILIDGFLKEKDHKTAMELWDRLLEDSSVYPNVKTHNIMISGLSKCGRVDDCLKIWERMKQNEREKDLYTYSSLIHGLCDAGNVDKAESVFNELDERKASIDVVTYNTMLGGFCRCGKIKESLELWRIMEHKNSVNIVSYNILIKGLLENGKIDEATMIWRLMPAKGYAADKTTYGIFIHGLCVNGYVNKALGVMQEVESSGGHLDVYAYASIIDCLCKKKRLEEASNLVKEMSKHGVELNSHVCNALIGGLIRDSRLGEASFFLREMGKNGCRPTVVSYNILICGLCKAGKFGEASAFVKEMLENGWKPDLKTYSILLCGLCRDRKIDLALELWHQFLQSGLETDVMMHNILIHGLCSVGKLDDAMTVMANMEHRNCTANLVTYNTLMEGFFKVGDSNRATVIWGYMYKMGLQPDIISYNTIMKGLCMCRGVSYAMEFFDDARNHGIFPTVYTWNILVRAVVNR

SEQ ID NO: 80400 - protein, 630 aa, Arabidopsis thaliana
  peptide (1)..(630): Ceres Seq. ID no. 12655610
MVNHVSRIVELIRSQECKCDEDVALSVIKTYGKNSMPDQALDVFKRMREIFGCEPAIRSYNTLLNAFVEAKQWVKVESLFAYFETAGVAPNLQTYNVLIKMSCKKKEFEKARGFLDWMWKEGFKPDVFSYSTVINDLAKAGKLDDALELFDEMSERGVAPDVTCYNILIDGFLKEKDHKTAMELWDRLLEDSSVYPNVKTHNIMISGLSKCGRVDDCLKIWERMKQNEREKDLYTYSSLIHGLCDAGNVDKAESVFNELDERKASIDVVTYNTMLGGFCRCGKIKESLELWRIMEHKNSVNIVSYNILIKGLLENGKIDEATMIWRLMPAKGYAADKTTYGIFIHGLCVNGYVNKALGVMQEVESSGGHLDVYAYASIIDCLCKKKRLEEASNLVKEMSKHGVELNSHVCNALIGGLIRDSRLGEASFFLREMGKNGCRPTVVSYNILICGLCKAGKFGEASAFVKEMLENGWKPDLKTYSILLCGLCRDRKIDLALELWHQFLQSGLETDVMMHNILIHGLCSVGKLDDAMTVMANMEHRNCTANLVTYNTLMEGFFKVGDSNRATVIWGYMYKMGLQPDIISYNTIMKGLCMCRGVSYAMEFFDDARNHGIFPTVYTWNILVRAVVNR

SEQ ID NO: 80401 - protein, 595 aa, Arabidopsis thaliana
  peptide (1)..(595): Ceres Seq. ID no. 12655611
MPDQALDVFKRMREIFGCEPAIRSYNTLLNAFVEAKQWVKVESLFAYFETAGVAPNLQTYNVLIKMSCKKKEFEKARGFLDWMWKEGFKPDVFSYSTVINDLAKAGKLDDALELFDEMSERGVAPDVTCYNILIDGFLKEKDHKTAMELWDRLLEDSSVYPNVKTHNIMISGLSKCGRVDDCLKIWERMKQNEREKDLYTYSSLIHGLCDAGNVDKAESVFNELDERKASIDVVTYNTMLGGFCRCGKIKESLELWRIMEHKNSVNIVSYNILIKGLLENGKIDEATMIWRLMPAKGYAADKTTYGIFIHGLCVNGYVNKALGVMQEVESSGGHLDVYAYASIIDCLCKKKRLEEASNLVKEMSKHGVELNSHVCNALIGGLIRDSRLGEASFFLREMGKNGCRPTVVSYNILICGLCKAGKFGEASAFVKEMLENGWKPDLKTYSILLCGLCRDRKIDLALELWHQFLQSGLETDVMMHNILIHGLCSVGKLDDAMTVMANMEHRNCTANLVTYNTLMEGFFKVGDSNRATVIWGYMYKMGLQPDIISYNTIMKGLCMCRGVSYAMEFFDDARNHGIFPTVYTWNILVRAVVNR

SEQ ID NO: 80402 - DNA, 2058 bp, Arabidopsis thaliana
  misc_feature (1)..(2058): Ceres Seq. ID no. 12655612
  misc_feature (1)..(2058): Ortholog of  Ceres SEQ ID NO 14309779 as cited in SEQ ID NO 229
atgaatccagctactgacccagtctccgccgccgcagctgctcttgctccgcctccacaacctccgcagcctcaccgtctctctacctcttgcaaccgtcacccagaagagcggttcaccggtttttgcccttcttgtctctgtgaacgtctctcagtcttagatcagaccaacaatggcggttcctcttcttcctctaaaaagcctccgaccatctctgctgcggctctcaaggctctctttaagccttccggaaacaacggagtgggcggtgtaaatacaaacggaaacggccgggttaaacccggattcttcccggagctccgtcgtacgaaatctttctcagcatccaagaacaacgaaggattctccggcgtgtttgagccacaacgtaggtcttgtgacgtcaggcttcgaagctctctttggaacttgtttagccaagatgagcaacgaaaccttccaagcaatgtcaccggcggtgagattgatgtcgagccgaggaaatcaagcgttgcggagcctgttctagaggtaaacgatgaaggagaagctgaaagtgacgacgaagaacttgaagaggaggaggaggaagactacgttgaagctggcgactttgagattctcaatgattccggcgaactaatgagggaaaaaagcgacgagattgttgaagttagagaggagattgaagaagcggtgaaaccaacaaagggtttaagcgaagaggagttaaagccaataaaggattacatagatcttgattctcaaaccaagaagccatcggtacgacggagtttttggtcggcggcctctgttttcagcaagaagcttcagaaatggaggcagaatcaaaagatgaagaagcggcgtaacggcggcgaccatcggccaggatcagctagattaccggtggagaaaccgattgggagacagctccgggatactcaatcggagattgctgattacggatatggtcggaggtcgtgcgataccgaccctcgattctctctagacgccggaagattctctcttgacgccggtagattctccgttgacatcggtaggatctcgcttgatgatcctcgttattcgtttgacgagccgagagcttcttgggacgggtctttgattggacggacaatgtttcctcccgccgcgagagctcctccgccgccgtcaatgctctcggtggtggaggatgcgccgccgccggtgcaccgtcacgtaacccgagcggatatgcagtttccggtggaagaaccggcgccaccaccaccggtggttaaccaaaccaacggtgtgtcagacccggttatcatacccggcggatcaatccaaacccgagactactatactgactcatcgtcaaggaggcggaaaagtctcgacaggtctagtagctccatgaggaaaacggctgcagccgttgtggcggatatggacgagccaaagctttcagtgtcgtcggctatatcaattgacgcttactcaggatcactgagagataacaacaactacgccgtggagacggcagataacggatctttccgggaaccggcgatgatgatcggcgataggaaagtgaatagtaacgataataacaagaagtcgagacggtgggggaagtggagcattttaggacttatttacaggaagagtgttaacaagtatgaggaagaggaggaggaggaagaggataggtataggagattaaacggtggaatggtggagagatcgttatcggagtcatggccggagctgaggaatggaggaggaggaggaggagggccgaggatggtgaggagtaatagcaatgtgagctggaggagttccggaggtggatcagcgaggaaagtcaacggattggataggaggaataagagttcaaggtactcacctaagaatggggaaaacggaatgttgaagttttacttgccacatatgaaagctagtcggagaatgagcggtacaggaggagcaggaggtggcggcggcggagggtgggcgaatagtcacgggcattctatagcgaggagtgtaatgaggctgtattga

SEQ ID NO: 80403 - protein, 685 aa, Arabidopsis thaliana
  peptide (1)..(685): Ceres Seq. ID no. 12655613
MNPATDPVSAAAAALAPPPQPPQPHRLSTSCNRHPEERFTGFCPSCLCERLSVLDQTNNGGSSSSSKKPPTISAAALKALFKPSGNNGVGGVNTNGNGRVKPGFFPELRRTKSFSASKNNEGFSGVFEPQRRSCDVRLRSSLWNLFSQDEQRNLPSNVTGGEIDVEPRKSSVAEPVLEVNDEGEAESDDEELEEEEEEDYVEAGDFEILNDSGELMREKSDEIVEVREEIEEAVKPTKGLSEEELKPIKDYIDLDSQTKKPSVRRSFWSAASVFSKKLQKWRQNQKMKKRRNGGDHRPGSARLPVEKPIGRQLRDTQSEIADYGYGRRSCDTDPRFSLDAGRFSLDAGRFSVDIGRISLDDPRYSFDEPRASWDGSLIGRTMFPPAARAPPPPSMLSVVEDAPPPVHRHVTRADMQFPVEEPAPPPPVVNQTNGVSDPVIIPGGSIQTRDYYTDSSSRRRKSLDRSSSSMRKTAAAVVADMDEPKLSVSSAISIDAYSGSLRDNNNYAVETADNGSFREPAMMIGDRKVNSNDNNKKSRRWGKWSILGLIYRKSVNKYEEEEEEEEDRYRRLNGGMVERSLSESWPELRNGGGGGGGPRMVRSNSNVSWRSSGGGSARKVNGLDRRNKSSRYSPKNGENGMLKFYLPHMKASRRMSGTGGAGGGGGGGWANSHGHSIARSVMRLY

SEQ ID NO: 80404 - protein, 470 aa, Arabidopsis thaliana
  peptide (1)..(470): Ceres Seq. ID no. 12655614
MREKSDEIVEVREEIEEAVKPTKGLSEEELKPIKDYIDLDSQTKKPSVRRSFWSAASVFSKKLQKWRQNQKMKKRRNGGDHRPGSARLPVEKPIGRQLRDTQSEIADYGYGRRSCDTDPRFSLDAGRFSLDAGRFSVDIGRISLDDPRYSFDEPRASWDGSLIGRTMFPPAARAPPPPSMLSVVEDAPPPVHRHVTRADMQFPVEEPAPPPPVVNQTNGVSDPVIIPGGSIQTRDYYTDSSSRRRKSLDRSSSSMRKTAAAVVADMDEPKLSVSSAISIDAYSGSLRDNNNYAVETADNGSFREPAMMIGDRKVNSNDNNKKSRRWGKWSILGLIYRKSVNKYEEEEEEEEDRYRRLNGGMVERSLSESWPELRNGGGGGGGPRMVRSNSNVSWRSSGGGSARKVNGLDRRNKSSRYSPKNGENGMLKFYLPHMKASRRMSGTGGAGGGGGGGWANSHGHSIARSVMRLY

SEQ ID NO: 80405 - protein, 399 aa, Arabidopsis thaliana
  peptide (1)..(399): Ceres Seq. ID no. 12655615
MKKRRNGGDHRPGSARLPVEKPIGRQLRDTQSEIADYGYGRRSCDTDPRFSLDAGRFSLDAGRFSVDIGRISLDDPRYSFDEPRASWDGSLIGRTMFPPAARAPPPPSMLSVVEDAPPPVHRHVTRADMQFPVEEPAPPPPVVNQTNGVSDPVIIPGGSIQTRDYYTDSSSRRRKSLDRSSSSMRKTAAAVVADMDEPKLSVSSAISIDAYSGSLRDNNNYAVETADNGSFREPAMMIGDRKVNSNDNNKKSRRWGKWSILGLIYRKSVNKYEEEEEEEEDRYRRLNGGMVERSLSESWPELRNGGGGGGGPRMVRSNSNVSWRSSGGGSARKVNGLDRRNKSSRYSPKNGENGMLKFYLPHMKASRRMSGTGGAGGGGGGGWANSHGHSIARSVMRLY

SEQ ID NO: 80406 - DNA, 1358 bp, Arabidopsis thaliana
  misc_feature (1)..(1358): Ceres Seq. ID no. 12655628
  misc_feature (1)..(1358): Ortholog of  Ceres SEQ ID NO 13656752 as cited in SEQ ID NO 65725
gtctcactgaaactgtgaaaattttatctcttttatagataaagaatcttgcttttttcagttttcagtatgaagaagaattgaagagagtgtccgaggaaggagacctttggtttcagtttgtgagtcttgttgtaatggctttatcaatggagtttgggttttcaattgggtcatgcttcaaggcaccaaacccacctgttctaatctctgcaagccctaataagatcaatttcacgttgagaaggagaaagaaaagattcttacttagagtctctgctgtgtcgtataaggaattcgcagagtctgctttagaagaaaccaggaaaaggatcgttcttgaaccttcacatctccaggaaaagtatagtagcatgacaggactagatggtaagaccgaacttcaaatgcttgcttttaaatcttcaaagattagactcttgaggagtatggcaatagagaatgagacaatgcaggtctttgactttgcgggtttcatggagcctgagtatgatactcccatattctgtgctaactttttcacatctaccaacgttaacatagttgtattggaccttaatcctttgcatcagttgactgaccagacggattaccaagacaagtattataacaagataatgtccatatatcacaaatatgctgagactttcccatggggagggaaattgactggtgaatccataaagtttttctcgcctttggtgatgtggactaggttttcgtctagcaaagaaaaacataaggctttgttctctgcgtttctagagtactatcaggcatggcttgagatgacaatccaagtgagggaggagatggaaccatctcatgtgagagccaattgtgaagcacaacacaagtacctgacatggcgagcacaaaaggatcctggacatggtcttcttaaaagattagtaggtgaagcaaaggcaaaggagctgctaagggatttcctgttcaatggggtggatgagttaggcacaaaaacattcattgattactttccagagtaccaaacagaagatggaactgtaagcgataaacgaagtatcattgggaagtcatatgaaactcgtccatgggatttaacaggacaatttatcggctaacaatgatatatgtgaacaagtcagatttcagagtcatcaacacaagaggacgtgaacttagggaagtaggaataagaaagagcagcatgaggagtctctcaggtctatctgcatttcaagatgattgtttgagttaccatgcattgtagttttacaagtgtagctctcagcccttcatcaaaatgagaatcctcgagtatgatatgattttaatgaaaatgtattcgtctc

SEQ ID NO: 80407 - protein, 329 aa, Arabidopsis thaliana; identical to SEQ ID NO: 38491
  peptide (1)..(329): Ceres Seq. ID no. 12655629

SEQ ID NO: 80408 - protein, 325 aa, Arabidopsis thaliana; identical to SEQ ID NO: 38492
  peptide (1)..(325): Ceres Seq. ID no. 12655630

SEQ ID NO: 80409 - protein, 250 aa, Arabidopsis thaliana; identical to SEQ ID NO: 38493
  peptide (1)..(250): Ceres Seq. ID no. 12655631

SEQ ID NO: 80410 - DNA, 756 bp, Arabidopsis thaliana
  misc_feature (1)..(756): Ceres Seq. ID no. 12655658
  misc_feature (1)..(756): Ortholog of  Ceres SEQ ID NO 15175666 as cited in SEQ ID NO 54985
  misc_feature (1)..(756): Ortholog of  Ceres SEQ ID NO 14310460 as cited in SEQ ID NO 55105
  misc_feature (1)..(756): Ortholog of  Ceres SEQ ID NO 15179888 as cited in SEQ ID NO 66879
  misc_feature (1)..(756): Ortholog of  Ceres SEQ ID NO 13596056 as cited in SEQ ID NO 68307
  misc_feature (1)..(756): Ortholog of  Ceres SEQ ID NO 12388689 as cited in SEQ ID NO 0
atggtgaagaagagttacccggaagtgaaagaagagtacaagaaagctgttcagagatgcaagaggaagctccgtggtcttattgccgagaagcactgtgctcccatcgtcctccgtcttgcatggcactcggctgggacatttgatgtgaagacgaagacaggaggaccgtttgggacgataaggcatccccaagagctagcccatgatgccaacaatggtcttgatattgccgttaggcttcttgaccctatcaaggagctgttccctattctgtcatatgctgacttctaccagctagctggagtagttgctgttgagatcactggaggaccagagattccatttcatcctggtagactggacaaagttgagccacctcctgaaggtcgtctgcctcaggccaccaaaggtgtggatcatctaagagatgtgtttggtcggatgggactcaatgacaaagatatcgttgcattgtctggtggacacaccttgggtcggtgccacaaggagcgttcaggattcgagggtgcatggacaccaaacccgctcatttttgacaactcctatttcaaagagatactaagcggagagaaagaaggacttcttcaactaccaaccgacaaggctcttcttgatgatcctctctttctcccatttgttgaaaaatatgctgcagatgaggatgccttcttcgaagactatacggaagctcatctaaagttgtcagaactcgggtttgctgacaaggagtaa

SEQ ID NO: 80411 - protein, 251 aa, Arabidopsis thaliana
  peptide (1)..(251): Ceres Seq. ID no. 12655659
MVKKSYPEVKEEYKKAVQRCKRKLRGLIAEKHCAPIVLRLAWHSAGTFDVKTKTGGPFGTIRHPQELAHDANNGLDIAVRLLDPIKELFPILSYADFYQLAGVVAVEITGGPEIPFHPGRLDKVEPPPEGRLPQATKGVDHLRDVFGRMGLNDKDIVALSGGHTLGRCHKERSGFEGAWTPNPLIFDNSYFKEILSGEKEGLLQLPTDKALLDDPLFLPFVEKYAADEDAFFEDYTEAHLKLSELGFADKE

SEQ ID NO: 80412 - DNA, 2133 bp, Arabidopsis thaliana
  misc_feature (1)..(2133): Ceres Seq. ID no. 12655706
  misc_feature (1)..(2133): Ortholog of  Ceres SEQ ID NO 13657677 as cited in SEQ ID NO 66119
atggtatcttctgtacctaaactccatgctttgtttgtctccaagtctcaaccagttctccgagccgccaaagttaccaatgaagaaaggtccaccaaatcaaaactcgccaggtccttggcccgtgccgtgaactctaacccgtggtcggacgaactcgagtcttcactatcatctcttcatccgtcccaaaccatctccagaaccaccgttctccaaaccctgcgtctcatcaaggtccctgcggatggtctccggttctttgactgggtttccaacaaggggttttctcacaaagagcagtctttcttcctcatgttagagttcctcggtcgagctcgcaatctcaatgtggctcgcaatttcttgttctccatcgagagaaggtctaatggctgcgtcaagctccaggatcgctacttcaacagcttgattaggagctacgggaacgctgggctcttccaggagtcagtgaagctgttccagaccatgaagcagatgggcatctccccttccgttcttaccttcaacagtcttctctccattttgctcaagcgtggcagaactggaatggcccatgacttgttcgacgaaatgcgtcgtacctacggggttaccccagactcctatactttcaatacattgataaatgggttttgtaagaactccatggtcgatgaagcctttaggatttttaaggatatggagctgtatcattgcaatcctgacgttgttacatataacacgatcatcgatgggttatgcagagccggcaaggtcaagattgcacataatgttttgagtggaatgttgaagaaagcaaccgatgtgcatcccaacgttgttagttacactactctggtgcgaggctattgtatgaagcaggaaattgatgaagcagtgcttgtgtttcatgacatgctgagtagagggctgaaacccaatgctgttacttacaatactctgatcaaggggctctctgaggctcacagatatgatgagatcaaagatatcttgattggagggaacgacgcatttaccactttcgctccagatgcctgcacttttaatattttgatcaaagcccactgcgatgctggtcatttggatgcagcgatgaaggtgttccaagaaatgctgaatatgaagttgcatcctgattcagcttcttatagtgttttgattcgtactctgtgcatgagaaacgaatttgatagagctgagacattgttcaatgagttatttgagaaggaagtattgttaggtaaggatgaatgcaagcctctcgctgcagcttataacccaatgtttgaatacttatgtgccaatgggaaaacaaaacaagcggagaaagttttcaggcagctgatgaaaagaggagtgcaagatccgccctcttacaagactttgataacgggtcactgcagagaaggtaaattcaagcctgcttatgagctgttggttctaatgctcaggcgggaatttgtacctgatcttgaaacttacgagttattgattgatggactgttgaagataggtgaagctcttcttgctcacgataccctacaaaggatgctaaggagctcttatcttcctgttgcaaccactttccattctgtacttgcagaacttgcgaaaaggaaatttgctaacgagtctttctgcttggtaacgctaatgttggaaaaacgaataagacagaacattgatctttcaacgcaggttgtcagattgctttttagtagtgcacagaaagagaaggcatttctgattgttaggttgctttatgataacgggtatttggttaagatggaggaattacttggttacctctgcgagaatagaaaactacttgatgcacatacacttgttctgttttgtctggaaaaaagtcaaatggtagatatcgacacatgcaacacggtcatagaaggactctgtaagcataagagacactctgaagcgtttagtttgtacaatgaattagtagaactaggaaaccaccaacagcttagctgccacgtggttttgaggaatgccttagaggctgctggaaagtgggaagaacttcagtttgtgtcaaagaggatggctacattgagagaatcagatgattgctctgtattagaatga

SEQ ID NO: 80413 - protein, 710 aa, Arabidopsis thaliana
  peptide (1)..(710): Ceres Seq. ID no. 12655707
MVSSVPKLHALFVSKSQPVLRAAKVTNEERSTKSKLARSLARAVNSNPWSDELESSLSSLHPSQTISRTTVLQTLRLIKVPADGLRFFDWVSNKGFSHKEQSFFLMLEFLGRARNLNVARNFLFSIERRSNGCVKLQDRYFNSLIRSYGNAGLFQESVKLFQTMKQMGISPSVLTFNSLLSILLKRGRTGMAHDLFDEMRRTYGVTPDSYTFNTLINGFCKNSMVDEAFRIFKDMELYHCNPDVVTYNTIIDGLCRAGKVKIAHNVLSGMLKKATDVHPNVVSYTTLVRGYCMKQEIDEAVLVFHDMLSRGLKPNAVTYNTLIKGLSEAHRYDEIKDILIGGNDAFTTFAPDACTFNILIKAHCDAGHLDAAMKVFQEMLNMKLHPDSASYSVLIRTLCMRNEFDRAETLFNELFEKEVLLGKDECKPLAAAYNPMFEYLCANGKTKQAEKVFRQLMKRGVQDPPSYKTLITGHCREGKFKPAYELLVLMLRREFVPDLETYELLIDGLLKIGEALLAHDTLQRMLRSSYLPVATTFHSVLAELAKRKFANESFCLVTLMLEKRIRQNIDLSTQVVRLLFSSAQKEKAFLIVRLLYDNGYLVKMEELLGYLCENRKLLDAHTLVLFCLEKSQMVDIDTCNTVIEGLCKHKRHSEAFSLYNELVELGNHQQLSCHVVLRNALEAAGKWEELQFVSKRMATLRESDDCSVLE

SEQ ID NO: 80414 - protein, 605 aa, Arabidopsis thaliana
  peptide (1)..(605): Ceres Seq. ID no. 12655708
MLEFLGRARNLNVARNFLFSIERRSNGCVKLQDRYFNSLIRSYGNAGLFQESVKLFQTMKQMGISPSVLTFNSLLSILLKRGRTGMAHDLFDEMRRTYGVTPDSYTFNTLINGFCKNSMVDEAFRIFKDMELYHCNPDVVTYNTIIDGLCRAGKVKIAHNVLSGMLKKATDVHPNVVSYTTLVRGYCMKQEIDEAVLVFHDMLSRGLKPNAVTYNTLIKGLSEAHRYDEIKDILIGGNDAFTTFAPDACTFNILIKAHCDAGHLDAAMKVFQEMLNMKLHPDSASYSVLIRTLCMRNEFDRAETLFNELFEKEVLLGKDECKPLAAAYNPMFEYLCANGKTKQAEKVFRQLMKRGVQDPPSYKTLITGHCREGKFKPAYELLVLMLRREFVPDLETYELLIDGLLKIGEALLAHDTLQRMLRSSYLPVATTFHSVLAELAKRKFANESFCLVTLMLEKRIRQNIDLSTQVVRLLFSSAQKEKAFLIVRLLYDNGYLVKMEELLGYLCENRKLLDAHTLVLFCLEKSQMVDIDTCNTVIEGLCKHKRHSEAFSLYNELVELGNHQQLSCHVVLRNALEAAGKWEELQFVSKRMATLRESDDCSVLE

SEQ ID NO: 80415 - protein, 547 aa, Arabidopsis thaliana
  peptide (1)..(547): Ceres Seq. ID no. 12655709
MKQMGISPSVLTFNSLLSILLKRGRTGMAHDLFDEMRRTYGVTPDSYTFNTLINGFCKNSMVDEAFRIFKDMELYHCNPDVVTYNTIIDGLCRAGKVKIAHNVLSGMLKKATDVHPNVVSYTTLVRGYCMKQEIDEAVLVFHDMLSRGLKPNAVTYNTLIKGLSEAHRYDEIKDILIGGNDAFTTFAPDACTFNILIKAHCDAGHLDAAMKVFQEMLNMKLHPDSASYSVLIRTLCMRNEFDRAETLFNELFEKEVLLGKDECKPLAAAYNPMFEYLCANGKTKQAEKVFRQLMKRGVQDPPSYKTLITGHCREGKFKPAYELLVLMLRREFVPDLETYELLIDGLLKIGEALLAHDTLQRMLRSSYLPVATTFHSVLAELAKRKFANESFCLVTLMLEKRIRQNIDLSTQVVRLLFSSAQKEKAFLIVRLLYDNGYLVKMEELLGYLCENRKLLDAHTLVLFCLEKSQMVDIDTCNTVIEGLCKHKRHSEAFSLYNELVELGNHQQLSCHVVLRNALEAAGKWEELQFVSKRMATLRESDDCSVLE

SEQ ID NO: 80416 - DNA, 1153 bp, Arabidopsis thaliana
  misc_feature (1)..(1153): Ceres Seq. ID no. 12655740
  misc_feature (1)..(1153): Ortholog of  Ceres SEQ ID NO 15170881 as cited in SEQ ID NO 54654
gcggaacacatcgagagagcttcttccaaaaacctcaaacgctcctcacacaacgggtttaggagtgatggggtctctcgttcgtgaatgggttgggtttcagcaatttccagcagctacccaggaaaagctgattgaattcttcggaaaattgaagcaaaaggatatgaactcaatgacagttcttgttctgggtaaaggcggtgtcggaaaatcatccactgtcaattctcttatcggcgaacaagtcgtccgtgtcagtcctttccaagctgaaggattgagaccagtgatggtttcaagaacaatgggagggttcactatcaacattattgacacccctggacttgtggaagctggatatgtcaatcaccaagctctcgagttaatcaaagggtttcttgtgaacagaacaatagatgtcttgctctatgttgatcgtttggatgtgtatagagtcgatgagctagataagcaagttgttatagcaatcacccaaacctttggaaaagagatatggtgcaaaaccttgcttgttctgactcatgctcaattttcccctcccgatgaactttcctacgaaactttttcctccaagagatcagattctctcctcaaaactatccgggctggttctaagatgcgaaaacaagagtttgaggattctgcaatcgcggtagtctatgcagagaacagcggaagatgcagcaagaacgataaggacgaaaaggctcttccaaatggtgaagcgtggatcccgaacttggttaaggcgataactgatgtagcaacaaaccagaggaaagcaattcatgtagacaagaagatggtagatggatcttactctgatgataaaggaaagaaactcatccctcttatcataggcgctcagtatttgatcgttaagatgattcaaggagcaatcagaaatgatatcaagacaagtggaaagccactttaagaggctctgaagaagaggttttgttgtgagcaaattacaaggagaagaagagtttttcgattgttctttcttttgttagattttatctgcaacattttcttgtttccggctttatctttgtctgtaatttatggagatttgttcaaagaaaagattgccatgctttctggttaaatgaaatggatgtttccc

SEQ ID NO: 80417 - protein, 319 aa, Arabidopsis thaliana
  peptide (1)..(319): Ceres Seq. ID no. 12655741
RNTSRELLPKTSNAPHTTGLGVMGSLVREWVGFQQFPAATQEKLIEFFGKLKQKDMNSMTVLVLGKGGVGKSSTVNSLIGEQVVRVSPFQAEGLRPVMVSRTMGGFTINIIDTPGLVEAGYVNHQALELIKGFLVNRTIDVLLYVDRLDVYRVDELDKQVVIAITQTFGKEIWCKTLLVLTHAQFSPPDELSYETFSSKRSDSLLKTIRAGSKMRKQEFEDSAIAVVYAENSGRCSKNDKDEKALPNGEAWIPNLVKAITDVATNQRKAIHVDKKMVDGSYSDDKGKKLIPLIIGAQYLIVKMIQGAIRNDIKTSGKPL

SEQ ID NO: 80418 - protein, 297 aa, Arabidopsis thaliana
  peptide (1)..(297): Ceres Seq. ID no. 12655742
MGSLVREWVGFQQFPAATQEKLIEFFGKLKQKDMNSMTVLVLGKGGVGKSSTVNSLIGEQVVRVSPFQAEGLRPVMVSRTMGGFTINIIDTPGLVEAGYVNHQALELIKGFLVNRTIDVLLYVDRLDVYRVDELDKQVVIAITQTFGKEIWCKTLLVLTHAQFSPPDELSYETFSSKRSDSLLKTIRAGSKMRKQEFEDSAIAVVYAENSGRCSKNDKDEKALPNGEAWIPNLVKAITDVATNQRKAIHVDKKMVDGSYSDDKGKKLIPLIIGAQYLIVKMIQGAIRNDIKTSGKPL

SEQ ID NO: 80419 - protein, 264 aa, Arabidopsis thaliana
  peptide (1)..(264): Ceres Seq. ID no. 12655743
MNSMTVLVLGKGGVGKSSTVNSLIGEQVVRVSPFQAEGLRPVMVSRTMGGFTINIIDTPGLVEAGYVNHQALELIKGFLVNRTIDVLLYVDRLDVYRVDELDKQVVIAITQTFGKEIWCKTLLVLTHAQFSPPDELSYETFSSKRSDSLLKTIRAGSKMRKQEFEDSAIAVVYAENSGRCSKNDKDEKALPNGEAWIPNLVKAITDVATNQRKAIHVDKKMVDGSYSDDKGKKLIPLIIGAQYLIVKMIQGAIRNDIKTSGKPL

SEQ ID NO: 80420 - DNA, 1789 bp, Arabidopsis thaliana
  misc_feature (1)..(1789): Ceres Seq. ID no. 12655755
  misc_feature (1)..(1789): Ortholog of  Ceres SEQ ID NO 15169264 as cited in SEQ ID NO 55026
gacatgcagagtctagattccagcgacaccatataatatagttattagaaaacgagaggtcaaaaccatgtccggtaataagatctcgactcttcaagctcttgtcttcttcttgtaccggtttttcattctccgtcgttggtgtcatcgtagccctaaacaaaaataccaaaaatgcccttctcacggcctccaccaatatcaagacctatcgaatcacactttgatattcaacgtcgaaggagctctactcaaatcaaactctttattcccttacttcatggttgtggcattcgaagccggaggggtgataaggtcacttttcctcttagttctttatccatttataagcttgatgagctacgaaatgggcttgaagacgatggtgatgctgagcttctttggagttaaaaaggaaagcttccgagtggggaaatcagttttgcctaagtattttctagaagatgttgggctcgagatgttccaggttttgaaaagaggaggcaagagagttgctgtgagtgatttaccacaagttatgattgatgtattcttgcgagattacttggagatagaagttgtggtcggaagagacatgaaaatggtcggtggttactacctaggcatcgtggaggataagaagaaccttgaaattgcttttgataaagtggttcaagaagaaagacttggtagtggtcgtcgtcttattggcatcacttcctttaactcgccaagtcacagatctctcttctctcaattttgccaggaaatttacttcgtcagaaattcagacaagaaaagttggcaaaccctaccacaagatcaataccctaaaccattgattttccacgatggtcgtttagccgttaagccaacacctttaaacacactcgtattattcatgtgggccccattcgccgccgtcttagccgctgcaagactcgtcttcggcctaaacttaccttactccctagccaatcccttcctcgccttttccggtatccaccttactctcactgtcaacaaccacaacgacctaatatccgccgacagaaaaagaggttgtctctttgtgtgtaaccatagaacgttattggacccactttacatttcatacgctctaagaaagaaaaacatgaaagccgtgacgtatagtctaagcagattatctgagcttctggctccgatcaagaccgttagattgactcgtgatcgagtcaaagatggtcaagccatggagaaattgctgagccagggagatctcgtggtttgtccggaagggactacgtgtagagagccttacttgcttcggtttagtccacttttctctgaggtttgtgacgtcatcgtacctgttgctattgactcacacgtgactttcttctatggcacgacggctagtggtcttaaggcatttgatcccattttcttccttttgaatcctttcccttcctacaccgtcaaattgcttgaccctgtctctggaagtagctcgtccacgtgtcgaggagtccctgacaatggaaaagttaacttcgaggtggctaatcacgtgcagcatgagatcgggaatgcgttggggtttgagtgcaccaacctcacgagaagagataagtacttgatcttggccggtaataacggagttgtcaagaaaaaataattgatttgagtagtttattttcttaattagggcctttttgtgtgacgtacactttatttcttataagattttttttctatgatgtatctatctttttttagttaaatgtaattatctaattgtgtgacc

SEQ ID NO: 80421 - protein, 530 aa, Arabidopsis thaliana
  peptide (1)..(530): Ceres Seq. ID no. 12655756
MSGNKISTLQALVFFLYRFFILRRWCHRSPKQKYQKCPSHGLHQYQDLSNHTLIFNVEGALLKSNSLFPYFMVVAFEAGGVIRSLFLLVLYPFISLMSYEMGLKTMVMLSFFGVKKESFRVGKSVLPKYFLEDVGLEMFQVLKRGGKRVAVSDLPQVMIDVFLRDYLEIEVVVGRDMKMVGGYYLGIVEDKKNLEIAFDKVVQEERLGSGRRLIGITSFNSPSHRSLFSQFCQEIYFVRNSDKKSWQTLPQDQYPKPLIFHDGRLAVKPTPLNTLVLFMWAPFAAVLAAARLVFGLNLPYSLANPFLAFSGIHLTLTVNNHNDLISADRKRGCLFVCNHRTLLDPLYISYALRKKNMKAVTYSLSRLSELLAPIKTVRLTRDRVKDGQAMEKLLSQGDLVVCPEGTTCREPYLLRFSPLFSEVCDVIVPVAIDSHVTFFYGTTASGLKAFDPIFFLLNPFPSYTVKLLDPVSGSSSSTCRGVPDNGKVNFEVANHVQHEIGNALGFECTNLTRRDKYLILAGNNGVVKKK

SEQ ID NO: 80422 - protein, 459 aa, Arabidopsis thaliana
  peptide (1)..(459): Ceres Seq. ID no. 12655757
MVVAFEAGGVIRSLFLLVLYPFISLMSYEMGLKTMVMLSFFGVKKESFRVGKSVLPKYFLEDVGLEMFQVLKRGGKRVAVSDLPQVMIDVFLRDYLEIEVVVGRDMKMVGGYYLGIVEDKKNLEIAFDKVVQEERLGSGRRLIGITSFNSPSHRSLFSQFCQEIYFVRNSDKKSWQTLPQDQYPKPLIFHDGRLAVKPTPLNTLVLFMWAPFAAVLAAARLVFGLNLPYSLANPFLAFSGIHLTLTVNNHNDLISADRKRGCLFVCNHRTLLDPLYISYALRKKNMKAVTYSLSRLSELLAPIKTVRLTRDRVKDGQAMEKLLSQGDLVVCPEGTTCREPYLLRFSPLFSEVCDVIVPVAIDSHVTFFYGTTASGLKAFDPIFFLLNPFPSYTVKLLDPVSGSSSSTCRGVPDNGKVNFEVANHVQHEIGNALGFECTNLTRRDKYLILAGNNGVVKKK

SEQ ID NO: 80423 - protein, 434 aa, Arabidopsis thaliana
  peptide (1)..(434): Ceres Seq. ID no. 12655758
MSYEMGLKTMVMLSFFGVKKESFRVGKSVLPKYFLEDVGLEMFQVLKRGGKRVAVSDLPQVMIDVFLRDYLEIEVVVGRDMKMVGGYYLGIVEDKKNLEIAFDKVVQEERLGSGRRLIGITSFNSPSHRSLFSQFCQEIYFVRNSDKKSWQTLPQDQYPKPLIFHDGRLAVKPTPLNTLVLFMWAPFAAVLAAARLVFGLNLPYSLANPFLAFSGIHLTLTVNNHNDLISADRKRGCLFVCNHRTLLDPLYISYALRKKNMKAVTYSLSRLSELLAPIKTVRLTRDRVKDGQAMEKLLSQGDLVVCPEGTTCREPYLLRFSPLFSEVCDVIVPVAIDSHVTFFYGTTASGLKAFDPIFFLLNPFPSYTVKLLDPVSGSSSSTCRGVPDNGKVNFEVANHVQHEIGNALGFECTNLTRRDKYLILAGNNGVVKKK

SEQ ID NO: 80424 - DNA, 990 bp, Arabidopsis thaliana
  misc_feature (1)..(990): Ceres Seq. ID no. 12655759
  misc_feature (1)..(990): Ortholog of  Ceres SEQ ID NO 14313583 as cited in SEQ ID NO 55431
  misc_feature (1)..(990): Ortholog of  Ceres SEQ ID NO 14302844 as cited in SEQ ID NO 65379
  misc_feature (1)..(990): Ortholog of  Ceres SEQ ID NO 15226354 as cited in SEQ ID NO 0
atggttttgccatcttcaacaccgttacaaaccaccggaaagaagacgatatcctcgccggaatataacttcccggtgatcgatttctccttaaacgatcggtcaaaactatcggagaagatcgtaaaagcctgtgaggttaatgggtttttcaaggtgataaaccatggagttaaaccggagataataaagagattcgagcatgaaggagaagagttctttaataaaccggaatcagataagctacgagccggtccggcgagtccgttcggttacggatgcaagaacatcgggttcaacggcgatttgggtgagcttgagtatcttcttctccacgcaaatccgacagctgtcgctgataaatctgaaactatatctcatgatgatcctttcaagttcagctcggcgacgaatgattacatacgcacggttagagatttggcatgtgagatcattgatctgacgatcgagaatttatggggacagaagtctagcgaagtgagtgagctgatcagagacgttcgtagcgattcgatcctacggttgaatcactatccaccagcaccgtacgcgttaagtggcgttggtcaaataggtttcggagaacattctgaccctcagatcttgacggtgttaagatccaacgacgtagatggacttgagatttgctcacgtgacggcttgtggatcccaatcccatctgaccctacatgcttcttcgtattggtcggtgactgccttcaggcattgacgaatgggagattcactagcgtgaggcatagggttttagcaaacacagcaaagaagccacgtatgtcggcgatgtactttgcagctccaccgttagaggcgaaaatatcaccgttgccaaaaatggtgtcgccggaaaatccaagacgttataattcattcacatggggtgactacaaaaaagctacatactctctccgtttagatgtccctcgtctcgagtttttcaagactttatag

SEQ ID NO: 80425 - protein, 329 aa, Arabidopsis thaliana [sequence omitted]

SEQ ID NO: 80426 - DNA, 369 bp, Arabidopsis thaliana
  misc_feature (1)..(369): Ceres Seq. ID no. 12655784
  misc_feature (1)..(369): Ortholog of  Ceres SEQ ID NO 13595704 as cited in SEQ ID NO 51001
  misc_feature (1)..(369): Ortholog of  Ceres SEQ ID NO 13638279 as cited in SEQ ID NO 57674
  misc_feature (1)..(369): Ortholog of  Ceres SEQ ID NO 15177534 as cited in SEQ ID NO 0
atgggccctctcactcgggtattgattcttgttgagtggttttcacaggttgatgctctggtctacttagtggatgcttatgaccaggagagatttgcagaatcaaaaaaggagcttgatgcacttctctcagacgaatccttagccactgtcccattcctcatcttaggaaacaaaatcgacataccttacgctgcatctgaggacgagcttcgattccatcttggcctctccaatttcacaactggtaaaggcaaagtgaatctaactgattcgaatgtgagaccattggaggtgtttatgtgcagcattgttagaaaaatgggatatggtgaaggcttcaagtggctctctcaatacatcaaataa

SEQ ID NO: 80427 - protein, 122 aa, Arabidopsis thaliana
  peptide (1)..(122): Ceres Seq. ID no. 12655785
MGPLTRVLILVEWFSQVDALVYLVDAYDQERFAESKKELDALLSDESLATVPFLILGNKIDIPYAASEDELRFHLGLSNFTTGKGKVNLTDSNVRPLEVFMCSIVRKMGYGEGFKWLSQYIK

SEQ ID NO: 80428 - DNA, 4116 bp, Arabidopsis thaliana
  misc_feature (1)..(4116): Ceres Seq. ID no. 12655805
  misc_feature (1)..(4116): Ortholog of  Ceres SEQ ID NO 13600485 as cited in SEQ ID NO 1221
atggttggagaaggaggcgcacacaagcctactacaaatgacgcgcttaaataccttagagccgtgaaggctaaatttcaaggtcaacgtgaaaaatatgacgagtttcttcagatcatgatagattataaaactcagagaattgatatatctggtgttataataaggatgaaagaactcttgaaagaacaacaaggattacttttgggtttcaatgccttcttaccaaatggttatatgatcacacatcatgaacaaccttcacagaagaaacctgtcgagttaggggaagcaattagttttattaacaagattaagacaaggtttcagggcgatgatcgtgtatacaaatcagttttagacattttaaacatgtacagaaaggataggaagcccatcaccgcggtctaccgggagaagctaactacaaacgacgctcttgcatatcttaaagccgtgaaggacaaatttcaggatcaacgtggaaaatatgacgagtttctcgaggttatgaagaattttaaatctcaaagagttgatacagctggtgtgataactagggtaaaagaacttttcaaaggacaccaagagttgattttggggtttaatactttcttgcctaagggttttgagatcacacttcaacctgaggatggacaacctccactgaagaaacgtgttgagtttgaggaagctattagctttgttaacaagattaagacaaggtttcagggagatgatcgtgtatacaaatcatttttagacattttaaacatgtacagaagggatagcaagtccatcactgaggtctaccaggaggttgcgatcctatttcgggatcattcagatctgctcgtggagtttactcactttctacctgatacttcagcaacggcctctattccatctgttaaaacttcagttcgtgagagaggggtttctctggctgataagaaggaccggatcattactccacatcctgaccatgactatggtactgaacatattgaccaggaccgggagagacctattaagaaagaaaataaagaacacatgagaggtactaacaaagaaaatgagcatagggatgccagagatttcgaaccacatagcaaaaaagagcaatttctcaacaagaagcagaaactacatattagaggcgatgatcctgctgaaatttccaatcaaagtaaactttctggagcggttcctagttcatctacttatgatgaaaaaggtgccatgaaaagttacagtcaagatctagctattgtcgatagagtaaaggaaaagcttaacgcctcagagtaccaggagtttttacgttgtcttaatctcttttcaaaagagataatcagccgaccagaactgcaatctttggtagggaatttaatcggagtatatcctgacctcatggattcctttatagagtttttggtgcaatgtgaaaagaatgaaggactgctctctggtattctgactaagaaatccttgtggagtgaaggcaaatatcctcaaccgtcactggacaatgatagagaccaggaacataagagagatgacgggcttagagatagagatcatgaaaaggaaaggcttgaaaaagcagctgcaaatctgaaatgggcaaagccaatcagtgaactagatctctcgaactgtgaacaatgcactcctagttatcggttacttccaaagaattacccaatttctattgcaagccagaagacagagatcggtaaactggttcttaatgatcactgggtctccgtcacatcaggaagtgaagattattcatttagccacatgcgtaagaaccagtatgaagagagcctcttcaaatgtgaggatgacaggtttgagctggacatgctattagagtctgtaaattcaacgacaaagcatgtggaagaattattgacaaaaattaacagtaatgaactgaaaaccaacagtcccatccgtgtcgaggatcacctcacagctctaaacttaagatgcatagaacggttgtatggtgatcacgggctcgatgtgatggatgtgctgaagaagaacgtgtctcttgctttacctgttatcctaacacgtttgaaacagaagcaagaagagtgggcaaggtgtcgttctgattttgacaaagtctgggctgagatatatgctaagaattactacaagtcgcttgatcatcgaagtttctacttcaaacagcaggattcaaagaagctgagcatgaaagcattgttggcagagataaaagagattactgaaaagaagcgagaggatgattcacttcttgcatttgcagccggaaatagactatccatttccccagatttggagtttgattatccggatcatgaccttcatgaagatctttaccagctgatcaaatattcgtgtgcagaaatgtgctctaccgaacagttagataaggtaatgaagatttggacaactttcgtggaacaaatatttggtgttccttctcgccctcaaggtgctgaagaccaagaagacgttgtcaagtccatgaaccagaatgtaaagagcggtagttcaagtgctggcgagagtgagggaagtcctcacaattacgctagtgttgccgactctagacgctcaaagtcatctcgaaaagctaatgaacatagtcagttggggcaaactagtaattcggagagggatggcgccgctggtaggacatcagatgccttatgtgagactgctcagcatgagaaaatgctgaagaatgtagttacgtctgatgaaaagcctgaaagaacatccaaagttgaaagagaagaaggtgaactttctccaaatggagactttgaggaagataattttgcagtttatgcaaaaactgattttgagaccttcagcaaagcgaatgatagtactggaaataacattagcggagatagaagtagagaaggggaaccatcttgtctggagacaagggctgagaatgacgctgaaggtgacgaaaacgccgcaagatcatcagaggacagcagaaatgaatatgagaacggtgatgtttctggaacggaatctggtggtggtgaagatccggaggatgatttggataacaataacaaaggagaaagcgaaggtgaggctgaatgtatggctgatgcacatgatgctgaagaaaatgggtctgccttacccgtttcagcacgattcttgctgcatgtaaagcccttagtaaagtatgttccttcagctatagctttgcatgacaaggacaaagactctctgaagaactcccaagttttctatggaaatgattcgttttacgtgcttttcaggctgcaccggatattgtatgagagaatactatcagcaaaagttaactcatcatccccggaaggaaagtggaggacctcaaataccaaaaatcctactgattcctatgctagattcatgactgcactctacaacttacttgatggtacatctgataatgccaagtttgaagatgactgccgagcgataatcgggactcagtcttatattctcttcacattggacaaactgatccataaattcatcaagcatctacaagtagtagtagctgatgagatggacaacaagcttcttcagctttatttttatgagaaatccagaaggcctgaaacgatttttgatgctgtgtattacgataatacccgtgtcctcctccctgatgagaatatttaccgtattgaatgtagattatcaaccccagcgaaactctctattcagcttatgtgcaacggtcttgataagcccgatgtgacatctgtatccattgacccgacctttgcagcttatctccacaatgacttcctctccatacaaccaaatgcaagggaggatcgcagaatctatttaaataggaacaagcgcaaagtttgtcgtgaagatgaacagttatacagcacagatgaagttaagatcaaaaatggtttggagtgtaagatagcttgcggttcttcaaaggtctcctatgtactagaaacagaagatttgttggtgcgagttaaaaagagaagaaaaactttgtgccacaatcaggattcttgggtaaggcaaatgaggttacaatattacaaaaataacttcttgtga

SEQ ID NO: 80429 - protein, 1371 aa, Arabidopsis thaliana
  peptide (1)..(1371): Ceres Seq. ID no. 12655806
MVGEGGAHKPTTNDALKYLRAVKAKFQGQREKYDEFLQIMIDYKTQRIDISGVIIRMKELLKEQQGLLLGFNAFLPNGYMITHHEQPSQKKPVELGEAISFINKIKTRFQGDDRVYKSVLDILNMYRKDRKPITAVYREKLTTNDALAYLKAVKDKFQDQRGKYDEFLEVMKNFKSQRVDTAGVITRVKELFKGHQELILGFNTFLPKGFEITLQPEDGQPPLKKRVEFEEAISFVNKIKTRFQGDDRVYKSFLDILNMYRRDSKSITEVYQEVAILFRDHSDLLVEFTHFLPDTSATASIPSVKTSVRERGVSLADKKDRIITPHPDHDYGTEHIDQDRERPIKKENKEHMRGTNKENEHRDARDFEPHSKKEQFLNKKQKLHIRGDDPAEISNQSKLSGAVPSSSTYDEKGAMKSYSQDLAIVDRVKEKLNASEYQEFLRCLNLFSKEIISRPELQSLVGNLIGVYPDLMDSFIEFLVQCEKNEGLLSGILTKKSLWSEGKYPQPSLDNDRDQEHKRDDGLRDRDHEKERLEKAAANLKWAKPISELDLSNCEQCTPSYRLLPKNYPISIASQKTEIGKLVLNDHWVSVTSGSEDYSFSHMRKNQYEESLFKCEDDRFELDMLLESVNSTTKHVEELLTKINSNELKTNSPIRVEDHLTALNLRCIERLYGDHGLDVMDVLKKNVSLALPVILTRLKQKQEEWARCRSDFDKVWAEIYAKNYYKSLDHRSFYFKQQDSKKLSMKALLAEIKEITEKKREDDSLLAFAAGNRLSISPDLEFDYPDHDLHEDLYQLIKYSCAEMCSTEQLDKVMKIWTTFVEQIFGVPSRPQGAEDQEDVVKSMNQNVKSGSSSAGESEGSPHNYASVADSRRSKSSRKANEHSQLGQTSNSERDGAAGRTSDALCETAQHEKMLKNVVTSDEKPERTSKVEREEGELSPNGDFEEDNFAVYAKTDFETFSKANDSTGNNISGDRSREGEPSCLETRAENDAEGDENAARSSEDSRNEYENGDVSGTESGGGEDPEDDLDNNNKGESEGEAECMADAHDAEENGSALPVSARFLLHVKPLVKYVPSAIALHDKDKDSLKNSQVFYGNDSFYVLFRLHRILYERILSAKVNSSSPEGKWRTSNTKNPTDSYARFMTALYNLLDGTSDNAKFEDDCRAIIGTQSYILFTLDKLIHKFIKHLQVVVADEMDNKLLQLYFYEKSRRPETIFDAVYYDNTRVLLPDENIYRIECRLSTPAKLSIQLMCNGLDKPDVTSVSIDPTFAAYLHNDFLSIQPNAREDRRIYLNRNKRKVCREDEQLYSTDEVKIKNGLECKIACGSSKVSYVLETEDLLVRVKKRRKTLCHNQDSWVRQMRLQYYKNNFL

SEQ ID NO: 80430 - protein, 1332 aa, Arabidopsis thaliana
  peptide (1)..(1332): Ceres Seq. ID no. 12655807
MIDYKTQRIDISGVIIRMKELLKEQQGLLLGFNAFLPNGYMITHHEQPSQKKPVELGEAISFINKIKTRFQGDDRVYKSVLDILNMYRKDRKPITAVYREKLTTNDALAYLKAVKDKFQDQRGKYDEFLEVMKNFKSQRVDTAGVITRVKELFKGHQELILGFNTFLPKGFEITLQPEDGQPPLKKRVEFEEAISFVNKIKTRFQGDDRVYKSFLDILNMYRRDSKSITEVYQEVAILFRDHSDLLVEFTHFLPDTSATASIPSVKTSVRERGVSLADKKDRIITPHPDHDYGTEHIDQDRERPIKKENKEHMRGTNKENEHRDARDFEPHSKKEQFLNKKQKLHIRGDDPAEISNQSKLSGAVPSSSTYDEKGAMKSYSQDLAIVDRVKEKLNASEYQEFLRCLNLFSKEIISRPELQSLVGNLIGVYPDLMDSFIEFLVQCEKNEGLLSGILTKKSLWSEGKYPQPSLDNDRDQEHKRDDGLRDRDHEKERLEKAAANLKWAKPISELDLSNCEQCTPSYRLLPKNYPISIASQKTEIGKLVLNDHWVSVTSGSEDYSFSHMRKNQYEESLFKCEDDRFELDMLLESVNSTTKHVEELLTKINSNELKTNSPIRVEDHLTALNLRCIERLYGDHGLDVMDVLKKNVSLALPVILTRLKQKQEEWARCRSDFDKVWAEIYAKNYYKSLDHRSFYFKQQDSKKLSMKALLAEIKEITEKKREDDSLLAFAAGNRLSISPDLEFDYPDHDLHEDLYQLIKYSCAEMCSTEQLDKVMKIWTTFVEQIFGVPSRPQGAEDQEDVVKSMNQNVKSGSSSAGESEGSPHNYASVADSRRSKSSRKANEHSQLGQTSNSERDGAAGRTSDALCETAQHEKMLKNVVTSDEKPERTSKVEREEGELSPNGDFEEDNFAVYAKTDFETFSKANDSTGNNISGDRSREGEPSCLETRAENDAEGDENAARSSEDSRNEYENGDVSGTESGGGEDPEDDLDNNNKGESEGEAECMADAHDAEENGSALPVSARFLLHVKPLVKYVPSAIALHDKDKDSLKNSQVFYGNDSFYVLFRLHRILYERILSAKVNSSSPEGKWRTSNTKNPTDSYARFMTALYNLLDGTSDNAKFEDDCRAIIGTQSYILFTLDKLIHKFIKHLQVVVADEMDNKLLQLYFYEKSRRPETIFDAVYYDNTRVLLPDENIYRIECRLSTPAKLSIQLMCNGLDKPDVTSVSIDPTFAAYLHNDFLSIQPNAREDRRIYLNRNKRKVCREDEQLYSTDEVKIKNGLECKIACGSSKVSYVLETEDLLVRVKKRRKTLCHNQDSWVRQMRLQYYKNNFL

SEQ ID NO: 80431 - protein, 1315 aa, Arabidopsis thaliana
  peptide (1)..(1315): Ceres Seq. ID no. 12655808
MKELLKEQQGLLLGFNAFLPNGYMITHHEQPSQKKPVELGEAISFINKIKTRFQGDDRVYKSVLDILNMYRKDRKPITAVYREKLTTNDALAYLKAVKDKFQDQRGKYDEFLEVMKNFKSQRVDTAGVITRVKELFKGHQELILGFNTFLPKGFEITLQPEDGQPPLKKRVEFEEAISFVNKIKTRFQGDDRVYKSFLDILNMYRRDSKSITEVYQEVAILFRDHSDLLVEFTHFLPDTSATASIPSVKTSVRERGVSLADKKDRIITPHPDHDYGTEHIDQDRERPIKKENKEHMRGTNKENEHRDARDFEPHSKKEQFLNKKQKLHIRGDDPAEISNQSKLSGAVPSSSTYDEKGAMKSYSQDLAIVDRVKEKLNASEYQEFLRCLNLFSKEIISRPELQSLVGNLIGVYPDLMDSFIEFLVQCEKNEGLLSGILTKKSLWSEGKYPQPSLDNDRDQEHKRDDGLRDRDHEKERLEKAAANLKWAKPISELDLSNCEQCTPSYRLLPKNYPISIASQKTEIGKLVLNDHWVSVTSGSEDYSFSHMRKNQYEESLFKCEDDRFELDMLLESVNSTTKHVEELLTKINSNELKTNSPIRVEDHLTALNLRCIERLYGDHGLDVMDVLKKNVSLALPVILTRLKQKQEEWARCRSDFDKVWAEIYAKNYYKSLDHRSFYFKQQDSKKLSMKALLAEIKEITEKKREDDSLLAFAAGNRLSISPDLEFDYPDHDLHEDLYQLIKYSCAEMCSTEQLDKVMKIWTTFVEQIFGVPSRPQGAEDQEDVVKSMNQNVKSGSSSAGESEGSPHNYASVADSRRSKSSRKANEHSQLGQTSNSERDGAAGRTSDALCETAQHEKMLKNVVTSDEKPERTSKVEREEGELSPNGDFEEDNFAVYAKTDFETFSKANDSTGNNISGDRSREGEPSCLETRAENDAEGDENAARSSEDSRNEYENGDVSGTESGGGEDPEDDLDNNNKGESEGEAECMADAHDAEENGSALPVSARFLLHVKPLVKYVPSAIALHDKDKDSLKNSQVFYGNDSFYVLFRLHRILYERILSAKVNSSSPEGKWRTSNTKNPTDSYARFMTALYNLLDGTSDNAKFEDDCRAIIGTQSYILFTLDKLIHKFIKHLQVVVADEMDNKLLQLYFYEKSRRPETIFDAVYYDNTRVLLPDENIYRIECRLSTPAKLSIQLMCNGLDKPDVTSVSIDPTFAAYLHNDFLSIQPNAREDRRIYLNRNKRKVCREDEQLYSTDEVKIKNGLECKIACGSSKVSYVLETEDLLVRVKKRRKTLCHNQDSWVRQMRLQYYKNNFL

SEQ ID NO: 80432 - DNA, 575 bp, Arabidopsis thaliana
  misc_feature (1)..(575): Ceres Seq. ID no. 12655872
  misc_feature (1)..(575): Ortholog of  Ceres SEQ ID NO 14301686 as cited in SEQ ID NO 61373
  misc_feature (1)..(575): Ortholog of  Ceres SEQ ID NO 15173983 as cited in SEQ ID NO 0
atcacaatcaataaacctcaaaccctaaaataaattaaacgagttctacgtaagaaggagagagagaagaatgggtcgccaaaacattgtcgtcgtggttgccctcgtcttcatggccatcattggccttgccgcagctgcctcctctccatctccttcagcgtctccctccaaagctccagctgcctccaaaaccgatcatgtcgaggctccagtcaccgatgaccaaatcggaaccaccgatgacgatgcagctcctactcctggtgacggtgacgttgcagtggctggtcctctaggaagtgactcctcgtacgacaatgcgcctacaggctctgctgattctgccaaaagcggtgcggcagctcttggcgtctctgcggtcgtcgttggtgtacatccattgctggttctttcttgttactctaagttgggcattgttttatgataagaaggttattttaaacgaagattatttatatgtaaggatgattgtgatgatcttgttgtaatttgtttctcctttgttaggagaaacgttgtctttgtaataatactgaaaaaaaaaacttttc

SEQ ID NO: 80433 - protein, 125 aa, Arabidopsis thaliana
  peptide (1)..(125): Ceres Seq. ID no. 12655873
MGRQNIVVVVALVFMAIIGLAAAASSPSPSASPSKAPAASKTDHVEAPVTDDQIGTTDDDAAPTPGDGDVAVAGPLGSDSSYDNAPTGSADSAKSGAAALGVSAVVVGVHPLLVLSCYSKLGIVL

SEQ ID NO: 80434 - protein, 111 aa, Arabidopsis thaliana
  peptide (1)..(111): Ceres Seq. ID no. 12655874
MAIIGLAAAASSPSPSASPSKAPAASKTDHVEAPVTDDQIGTTDDDAAPTPGDGDVAVAGPLGSDSSYDNAPTGSADSAKSGAAALGVSAVVVGVHPLLVLSCYSKLGIVL

SEQ ID NO: 80435 - protein, 63 aa, Arabidopsis thaliana
  peptide (1)..(63): Ceres Seq. ID no. 12655875
MRLQALLILPKAVRQLLASLRSSLVYIHCWFFLVTLSWALFYDKKVILNEDYLYVRMIVMILL

SEQ ID NO: 80436 - DNA, 1454 bp, Arabidopsis thaliana
  misc_feature (1)..(1454): Ceres Seq. ID no. 12655876
  misc_feature (1)..(1454): Ortholog of  Ceres SEQ ID NO 15170804 as cited in SEQ ID NO 52653
  misc_feature (1)..(1454): Ortholog of  Ceres SEQ ID NO 15170203 as cited in SEQ ID NO 53291
  misc_feature (1)..(1454): Ortholog of  Ceres SEQ ID NO 14303083 as cited in SEQ ID NO 66573
gaatcactttagttatcaatcgatagaaacgcctttcaattaccaaacatcgaaaccaccatgagggttatctcaaaactgttcgattccgacagaagacgaatacccaaatcgccgaagcatttggattccggcgaaagcgccacgtcatcttcctcactcagcgacgtaaccaccggctcaagcagccttcatagcagtctctctctccaaacgcttccttcagttccctctcttcagaaaatcccatccaccaccgtcaccgtctctcactccgttacctcctcgtttaaactccgtgaacggagtcttcctgtaacttgtctcgccgtcaatggtggttacctcttcgccgtgtctggacacgaagtaagtatctacgatcgcgacatgtgtgctcatctcgacacattcaacggccaagatcctttctcaggaaccgtgaagtccgtcggcttctccggtgagaaaatcttcacggcgcatcaagacggtaaaatcggagtttggaaacttacggcgaaaagcggttataaacagttaacgacgcttcctactttaaacgaccgtttacgacgtttcgctcttcctaaaaactacgttcaagtacgccgtcataagaaacgtctctggatcgaacatgctgacgccgttactgctctcgccgttagtgacggattcatttactctgtttcttgggataagactttgaagatatggagagcctccgatcttcgttgcaaagaatcaatcaaagctcacgatgacgccgttaatgccattgccgtttctactaacggcaccgtttacactggatccgcggatagacgtatccgggtttgggccaaaccgaccggtgagaaacgtcacacgttagttgcgactttagagaagcacaaatcggcggttaacgcattagcattaaacgacgacggatcggttttgttctccggttcgtgtgaccggtctattttggtttgggagagagaggatacttccaattacatggcggtgagaggtgcgttgaggggacatgataaagcaatacttagcttgttcaacgtctctgatttgctactcagtggatcagctgatcggacggtcaggatttggcgacgtggacccgattctagttatagttgtttggaggttctttccggtcataccaagccggttaagtcgttggcggcggttagagaaaaggagttagacgatgtcgtttcgatcattagtggaagtcttgacggagaggttaaatgttggaaggtgtccgtcaccaaaccggataattcattttacacgaatctcgttcaataaattagtggcattaatttgttcttttgtcggtgtgttttatttatttgttagtactttagtattgttcggcgaacaaacaatttggcgtttttcagaagtcatttacacaaaatgagtaagaaataattgagcattat

SEQ ID NO: 80437 - protein, 418 aa, Arabidopsis thaliana; identical to SEQ ID NO: 35445
  peptide (1)..(418): Ceres Seq. ID no. 12655877

SEQ ID NO: 80438 - protein, 308 aa, Arabidopsis thaliana; identical to SEQ ID NO: 35446
  peptide (1)..(308): Ceres Seq. ID no. 12655878

SEQ ID NO: 80439 - DNA, 5097 bp, Arabidopsis thaliana
  misc_feature (1)..(5097): Ceres Seq. ID no. 12655895
  misc_feature (1)..(5097): Ortholog of  Ceres SEQ ID NO 14311059 as cited in SEQ ID NO 53484
atggcttgtggaatcacagacagtccctcaaaggcttttccaagagcgttgcgagatgtaaaggataggagcgggcaagaggagtttctctgggaagctgatatggttaaaataaaggcccaagatttgaaggggaaagaggtgcgattaaacactcgtcttctgtaccagcagacaaagttcaacttactccgtgaagaaagcgagggatatgccaaattggccactcttttgtgccgaggatctgcaagttcttcgcacaatgcatcagcagcaacgatgggaattatcaagtcattaattgggcattttgacctggatccaaaccgtgttttcgacattgttttagattgctttgaactcgaacaagattacgacacatttctcaatctaattcctatctttcccaagtctcatgcttcacaaattcttggatttaaattccaatactatcagagactagaggtgaatagccctgttccagttgggctctataagcttacagccttgctagtaaaggaagaatatgcacatctgctacctaaggacgaggaagtttttgaggattataatgtttcttctgcaaagcggtttgaagaggccaataaaattggaaagattaatctcgctgctactgggaaggatcttatggaagatgagaagcaaggagatgtcacagtagatctctttgctgctttagacatggaaagtgaagctgttactgagcgattaccagagcttgaaaataatcagactctgggcctacttaatggtttcctctctgtggacgattggtatcatgcaaatatcttgttcgagcgtcttgcacctcttaatccagtggcacacgatcagatctgtagtgggttgtttaggcttatagagaagtcaatcactcattcttatcgcattgctcgtcagacacgttttcaaagttcttcttctgcgagcacagttaagctcacacccactgctaatacgacagctaataggacttatctagatcttccgaaagaagtgtttcaaatgcttgttactgttggaccctacctctaccgcaatacacaattgttgcagaagatttgtagagtattaagggcttactacttgtcggccttggatcttgttcgcgatgggtcaaatcaagaaggtagtgcatatgaagtttctcgtgggcacctgaaagaagttaggttgagagtggaagaagctctaggaacatgtcttctgccatcgttacagttagtacctgcaaatccagcagttggtcatgagatttgggaagtgatgagtctccttccatatgaggctcgttatcgcttatatggtgagtgggaaaaggacgatgagcagaatcctttgttgttggcagcaaggcaagtggcaaagttggatactagaagaattctgaaacggcttgcaaaagaaaatctgaagcagttaggaaggatggtggcaaaactagctcatgccaatcccatgacggtgcttcggacaattgtaaatcagattgaagcatacagagatatgattgctcctgttgtggatgccttcaagtacttgacacagcttgagtatgatatcctggaatatgtagtgattgagagactggcacaaagcggacgagataaacttaaagacgacgggattaatttatcagactggcttcaatctttggcatccttttggggtcacctgtgtaagaagtatccatcaatggagttgaggggtctttttcagtatctcgtaaaccagttaaagaggggccaagggattgagcttgttcttctccaggaactggtccagcagatggcaaatgtacaatacactgagaaccttactgaagatcagttggatgccatggcaggaagtgagactttacgttatcatgcaacatcatttggcatgatgcgaaacaacaaggcacttatcaaatcatcaaaccgtctacgagattcgttacttccaaatgatgaaccaaagttagctatcccccttttgttacttatcgcgcagcatcgttctctagttgtggtgaatgcggatgcgccttatattaagatggtcactgaacagttcgacagatgtcatggaattcttctccaatacgtggacttcctttctagtgctgtcagtcctactactgcttatgctcggctggtaccttcgcttgatgagcttgttcatacataccatctcgaagcagaggtcgcatttttggtatttcgccctgtgatgaggctcttcaagtgtcgacggaatggtgatgtttcatggcctttagatagtggggaatctatggatgcggattctgaaatatcagagtctgagagttccatgattctcgatgtcggtacatctgaaaaagctgtaacgtggtctgatgttcttgatacagtaaggacaatgctgccctcaaaagcttggaatagtctatcgccagacctctacgctacattttgggggcttacgctttatgatctccatgtccccagaaatcgttatgagtctgagatatctaaacagcatactgcccttaagacacttgaagaggttgctgataattctagctcagcaattaccaagaggaagaaagagaaggaaaggattcaagagtctcttgatcgtctaaccggtgagctgaaaaagcatgaagaacatgtggcttctgtccgtagaaggctttcacgtgaaaaggatacatggttgagctcctgtccagatactttgaagattaatatggagttcctgcagcgttgtattttccctcgttgcacatttagcatggcagattctgtgtactgcgcgatgtttgtaaatatgcttcactcgcttggaacacccttttttaacactgtcaaccacattgatgtcctgatatgtaaaacgctgcaaccaatgatctgctgctgtactgaatatgaagttggaagactggggaggtttttgtttgagaccttgaagattgcataccactggaagagtaaagaatcagtctatgaacatgagtgcggaaacatgccagggtttgctgtttattatagatacccgaacagccagcgtgtcacatttggacaatttgtgaagtatttagctatcacgtgttctgcttcaattaatggtaacaaagtcttgttccttctgtgtttcatgtctgtttcatctgttgatctgaaagccaagattaaaaatgatgagcgagaggaccttaaggtcttagcaactggtgttggggctgctctgtctgcaagaaaaccacattgggttacagacgaagaatttagcatgggcttccttgaactaaaggctccgccagtacatactccaaaacatgcttcttcccagaatggcttgttagttggtgtctcccaaggtgaaccaactggggaaagagctactgttaaccagcagcctgagtctggtggattgggcaaggaccagatgttgaaaactaaacctctagatggaagaacggaaagtataccttcaaaatctgatcaaggacatctaaaatcaaagggaggcaatccattggattcccaaccatccatatctaagaagtcaatggaacaaaaggaaacagatgaaacacccagaatatctgacgagaatcctgtcaaacctgcttcaaaatattctgaagccgagttaaaagcttcctctaaacgaggtgcgtcagtgaacaaatctgcaaagcaagattttggaaaagatgatggaaagtccggtaaagctattggaagaacatccacagctgacaaagatcttaattatctggagagcaggcaatcaggtttgaccaaagctctttccagcacagcagccaatggtagcatagctactgggtcgtccaaagtaaaagatgatggcgctgaagctttggatgcacaaaagcaatcttctcggactgttcattcccctaggcatgaaattgtcacttctgtgagatccagtgataggttacaaaaacgagctaatgctgttgaagatagtgaaaggataagtaaacgtcgtaaaggagatgctgagcacaaagagcatgacagtgagcctcgatcgagtgaccgagatagatcagtcgaggcccgattggatttaaacaaaacagttactgatgaccaaagcacccatagggatcaagatagatcaaaggataagggttatgaaagacaggatcgagaccacagagaaagagtcgatcgttctgataaacctcgtggagatgatgttgagaaagcacgagacaaatccttggaacgtcatggtagagaacgctcagttgagaagggtctagataaaggaacaactaggagttatgatagaaacaaggatgaaagaaacaaagatgatagaagcaaactgcgtcatagtgaagcatcacttgagaaatctcatcctgatgaccattttcattctcaaggtttacccccacctccacctttacctcctaacatcattccacattctatggccgcaaaagaagacctcgaaagaagggctggcggtgcaaggcattctcagaggctttccccgaggcatgaagaaagagagaaacgacgctctgaagagaatttatcagtttctgtggatgatgcaaaacgtagaagagatgatgatattagggaccgaaagcgagatgaccgagaaacaatcactgtgaagggagaagaaagagaaagggaaagggaaagagagagggaaagagaaaaaagcctccctttgaaagaggattttgaagcctccaagagaaggaagcttaagagggagcaacaggtcccatctgcagagccaggagaatactctcctatgccacatcattcgtctttatcgaccagtatgggaccatcatcgtacgaaggcagagagcggaagagcagtagtatgattcaacacggaggttatcttgaagagccaagcatcagacttcttggaaaagaagcttccagcaaaatggctcgtcgtgatcctgacccaattgcaaaatccaaatccaagaatagcaatttccttgacattgctctagaatctatgaccgtgaatgggaagacgacaagaggagagcagagcggaagcggagagatcggaagtagagagtga

SEQ ID NO: 80440 - protein, 1698 aa, Arabidopsis thaliana
  peptide (1)..(1698): Ceres Seq. ID no. 12655896
MACGITDSPSKAFPRALRDVKDRSGQEEFLWEADMVKIKAQDLKGKEVRLNTRLLYQQTKFNLLREESEGYAKLATLLCRGSASSSHNASAATMGIIKSLIGHFDLDPNRVFDIVLDCFELEQDYDTFLNLIPIFPKSHASQILGFKFQYYQRLEVNSPVPVGLYKLTALLVKEEYAHLLPKDEEVFEDYNVSSAKRFEEANKIGKINLAATGKDLMEDEKQGDVTVDLFAALDMESEAVTERLPELENNQTLGLLNGFLSVDDWYHANILFERLAPLNPVAHDQICSGLFRLIEKSITHSYRIARQTRFQSSSSASTVKLTPTANTTANRTYLDLPKEVFQMLVTVGPYLYRNTQLLQKICRVLRAYYLSALDLVRDGSNQEGSAYEVSRGHLKEVRLRVEEALGTCLLPSLQLVPANPAVGHEIWEVMSLLPYEARYRLYGEWEKDDEQNPLLLAARQVAKLDTRRILKRLAKENLKQLGRMVAKLAHANPMTVLRTIVNQIEAYRDMIAPVVDAFKYLTQLEYDILEYVVIERLAQSGRDKLKDDGINLSDWLQSLASFWGHLCKKYPSMELRGLFQYLVNQLKRGQGIELVLLQELVQQMANVQYTENLTEDQLDAMAGSETLRYHATSFGMMRNNKALIKSSNRLRDSLLPNDEPKLAIPLLLLIAQHRSLVVVNADAPYIKMVTEQFDRCHGILLQYVDFLSSAVSPTTAYARLVPSLDELVHTYHLEAEVAFLVFRPVMRLFKCRRNGDVSWPLDSGESMDADSEISESESSMILDVGTSEKAVTWSDVLDTVRTMLPSKAWNSLSPDLYATFWGLTLYDLHVPRNRYESEISKQHTALKTLEEVADNSSSAITKRKKEKERIQESLDRLTGELKKHEEHVASVRRRLSREKDTWLSSCPDTLKINMEFLQRCIFPRCTFSMADSVYCAMFVNMLHSLGTPFFNTVNHIDVLICKTLQPMICCCTEYEVGRLGRFLFETLKIAYHWKSKESVYEHECGNMPGFAVYYRYPNSQRVTFGQFVKYLAITCSASINGNKVLFLLCFMSVSSVDLKAKIKNDEREDLKVLATGVGAALSARKPHWVTDEEFSMGFLELKAPPVHTPKHASSQNGLLVGVSQGEPTGERATVNQQPESGGLGKDQMLKTKPLDGRTESIPSKSDQGHLKSKGGNPLDSQPSISKKSMEQKETDETPRISDENPVKPASKYSEAELKASSKRGASVNKSAKQDFGKDDGKSGKAIGRTSTADKDLNYLESRQSGLTKALSSTAANGSIATGSSKVKDDGAEALDAQKQSSRTVHSPRHEIVTSVRSSDRLQKRANAVEDSERISKRRKGDAEHKEHDSEPRSSDRDRSVEARLDLNKTVTDDQSTHRDQDRSKDKGYERQDRDHRERVDRSDKPRGDDVEKARDKSLERHGRERSVEKGLDKGTTRSYDRNKDERNKDDRSKLRHSEASLEKSHPDDHFHSQGLPPPPPLPPNIIPHSMAAKEDLERRAGGARHSQRLSPRHEEREKRRSEENLSVSVDDAKRRRDDDIRDRKRDDRETITVKGEEREREREREREREKSLPLKEDFEASKRRKLKREQQVPSAEPGEYSPMPHHSSLSTSMGPSSYEGRERKSSSMIQHGGYLEEPSIRLLGKEASSKMARRDPDPIAKSKSKNSNFLDIALESMTVNGKTTRGEQSGSGEIGSRE

SEQ ID NO: 80441 - protein, 1664 aa, Arabidopsis thaliana
  peptide (1)..(1664): Ceres Seq. ID no. 12655897
MVKIKAQDLKGKEVRLNTRLLYQQTKFNLLREESEGYAKLATLLCRGSASSSHNASAATMGIIKSLIGHFDLDPNRVFDIVLDCFELEQDYDTFLNLIPIFPKSHASQILGFKFQYYQRLEVNSPVPVGLYKLTALLVKEEYAHLLPKDEEVFEDYNVSSAKRFEEANKIGKINLAATGKDLMEDEKQGDVTVDLFAALDMESEAVTERLPELENNQTLGLLNGFLSVDDWYHANILFERLAPLNPVAHDQICSGLFRLIEKSITHSYRIARQTRFQSSSSASTVKLTPTANTTANRTYLDLPKEVFQMLVTVGPYLYRNTQLLQKICRVLRAYYLSALDLVRDGSNQEGSAYEVSRGHLKEVRLRVEEALGTCLLPSLQLVPANPAVGHEIWEVMSLLPYEARYRLYGEWEKDDEQNPLLLAARQVAKLDTRRILKRLAKENLKQLGRMVAKLAHANPMTVLRTIVNQIEAYRDMIAPVVDAFKYLTQLEYDILEYVVIERLAQSGRDKLKDDGINLSDWLQSLASFWGHLCKKYPSMELRGLFQYLVNQLKRGQGIELVLLQELVQQMANVQYTENLTEDQLDAMAGSETLRYHATSFGMMRNNKALIKSSNRLRDSLLPNDEPKLAIPLLLLIAQHRSLVVVNADAPYIKMVTEQFDRCHGILLQYVDFLSSAVSPTTAYARLVPSLDELVHTYHLEAEVAFLVFRPVMRLFKCRRNGDVSWPLDSGESMDADSEISESESSMILDVGTSEKAVTWSDVLDTVRTMLPSKAWNSLSPDLYATFWGLTLYDLHVPRNRYESEISKQHTALKTLEEVADNSSSAITKRKKEKERIQESLDRLTGELKKHEEHVASVRRRLSREKDTWLSSCPDTLKINMEFLQRCIFPRCTFSMADSVYCAMFVNMLHSLGTPFFNTVNHIDVLICKTLQPMICCCTEYEVGRLGRFLFETLKIAYHWKSKESVYEHECGNMPGFAVYYRYPNSQRVTFGQFVKYLAITCSASINGNKVLFLLCFMSVSSVDLKAKIKNDEREDLKVLATGVGAALSARKPHWVTDEEFSMGFLELKAPPVHTPKHASSQNGLLVGVSQGEPTGERATVNQQPESGGLGKDQMLKTKPLDGRTESIPSKSDQGHLKSKGGNPLDSQPSISKKSMEQKETDETPRISDENPVKPASKYSEAELKASSKRGASVNKSAKQDFGKDDGKSGKAIGRTSTADKDLNYLESRQSGLTKALSSTAANGSIATGSSKVKDDGAEALDAQKQSSRTVHSPRHEIVTSVRSSDRLQKRANAVEDSERISKRRKGDAEHKEHDSEPRSSDRDRSVEARLDLNKTVTDDQSTHRDQDRSKDKGYERQDRDHRERVDRSDKPRGDDVEKARDKSLERHGRERSVEKGLDKGTTRSYDRNKDERNKDDRSKLRHSEASLEKSHPDDHFHSQGLPPPPPLPPNIIPHSMAAKEDLERRAGGARHSQRLSPRHEEREKRRSEENLSVSVDDAKRRRDDDIRDRKRDDRETITVKGEEREREREREREREKSLPLKEDFEASKRRKLKREQQVPSAEPGEYSPMPHHSSLSTSMGPSSYEGRERKSSSMIQHGGYLEEPSIRLLGKEASSKMARRDPDPIAKSKSKNSNFLDIALESMTVNGKTTRGEQSGSGEIGSRE

SEQ ID NO: 80442 - protein, 1605 aa, Arabidopsis thaliana
  peptide (1)..(1605): Ceres Seq. ID no. 12655898
MGIIKSLIGHFDLDPNRVFDIVLDCFELEQDYDTFLNLIPIFPKSHASQILGFKFQYYQRLEVNSPVPVGLYKLTALLVKEEYAHLLPKDEEVFEDYNVSSAKRFEEANKIGKINLAATGKDLMEDEKQGDVTVDLFAALDMESEAVTERLPELENNQTLGLLNGFLSVDDWYHANILFERLAPLNPVAHDQICSGLFRLIEKSITHSYRIARQTRFQSSSSASTVKLTPTANTTANRTYLDLPKEVFQMLVTVGPYLYRNTQLLQKICRVLRAYYLSALDLVRDGSNQEGSAYEVSRGHLKEVRLRVEEALGTCLLPSLQLVPANPAVGHEIWEVMSLLPYEARYRLYGEWEKDDEQNPLLLAARQVAKLDTRRILKRLAKENLKQLGRMVAKLAHANPMTVLRTIVNQIEAYRDMIAPVVDAFKYLTQLEYDILEYVVIERLAQSGRDKLKDDGINLSDWLQSLASFWGHLCKKYPSMELRGLFQYLVNQLKRGQGIELVLLQELVQQMANVQYTENLTEDQLDAMAGSETLRYHATSFGMMRNNKALIKSSNRLRDSLLPNDEPKLAIPLLLLIAQHRSLVVVNADAPYIKMVTEQFDRCHGILLQYVDFLSSAVSPTTAYARLVPSLDELVHTYHLEAEVAFLVFRPVMRLFKCRRNGDVSWPLDSGESMDADSEISESESSMILDVGTSEKAVTWSDVLDTVRTMLPSKAWNSLSPDLYATFWGLTLYDLHVPRNRYESEISKQHTALKTLEEVADNSSSAITKRKKEKERIQESLDRLTGELKKHEEHVASVRRRLSREKDTWLSSCPDTLKINMEFLQRCIFPRCTFSMADSVYCAMFVNMLHSLGTPFFNTVNHIDVLICKTLQPMICCCTEYEVGRLGRFLFETLKIAYHWKSKESVYEHECGNMPGFAVYYRYPNSQRVTFGQFVKYLAITCSASINGNKVLFLLCFMSVSSVDLKAKIKNDEREDLKVLATGVGAALSARKPHWVTDEEFSMGFLELKAPPVHTPKHASSQNGLLVGVSQGEPTGERATVNQQPESGGLGKDQMLKTKPLDGRTESIPSKSDQGHLKSKGGNPLDSQPSISKKSMEQKETDETPRISDENPVKPASKYSEAELKASSKRGASVNKSAKQDFGKDDGKSGKAIGRTSTADKDLNYLESRQSGLTKALSSTAANGSIATGSSKVKDDGAEALDAQKQSSRTVHSPRHEIVTSVRSSDRLQKRANAVEDSERISKRRKGDAEHKEHDSEPRSSDRDRSVEARLDLNKTVTDDQSTHRDQDRSKDKGYERQDRDHRERVDRSDKPRGDDVEKARDKSLERHGRERSVEKGLDKGTTRSYDRNKDERNKDDRSKLRHSEASLEKSHPDDHFHSQGLPPPPPLPPNIIPHSMAAKEDLERRAGGARHSQRLSPRHEEREKRRSEENLSVSVDDAKRRRDDDIRDRKRDDRETITVKGEEREREREREREREKSLPLKEDFEASKRRKLKREQQVPSAEPGEYSPMPHHSSLSTSMGPSSYEGRERKSSSMIQHGGYLEEPSIRLLGKEASSKMARRDPDPIAKSKSKNSNFLDIALESMTVNGKTTRGEQSGSGEIGSRE

SEQ ID NO: 80443 - DNA, 2868 bp, Arabidopsis thaliana
  misc_feature (1)..(2868): Ceres Seq. ID no. 12655902
  misc_feature (1)..(2868): Ortholog of  Ceres SEQ ID NO 13663942 as cited in SEQ ID NO 67573
atgcgtctgcgtcaccaaggaggacaatacttggctcgcggtatggaacccgtgtactggtcaaacaaggtggattcaacccatgacttatatgacaactatactctcggatcctaccaaaataatagctacaatatattggcacacactggttttggctacgaccacgaattccaaatttatgaaattaactccaattcatggaggattattgatgccactttggacttcaaattagggtatattggtcgtggcgtgtctttgaagggaaagacttactggattgctagtggtgaagaagagaaacggcttggcaaattcttaatcagttttgattatacgacagaaagatttgaacgtctatgtcttccgaataagtatccttgttatgcaactctggctctatccgttgttagagaagagaaactttccatgttatcgcaacgcggaattaaatcaaaggcagaaatatgggtgacaaataagattggtgagacacaagtggtgtcgtggagcatggtcttagctttggatttgcagcctaaacgttgtattggggaaagcggaagtttcttggtcgacgagaagaagagagtggtcgtgtgttgtgataatattagagaccaaggaaaaaccacgtttgactcaaatctaccaaggtatcacaggcaaaagaaaaagggacgaatgatcatagtgtttgacgttgaatcaatgagactccccgtcaccgtcaaagccactaagccgtcgtttctcgtcatttggatccgatactcctccgccgcgtcgtcgccgacagtctccttgaatccaagtggacgattacagcaaactctcgcaggatctgtggaagtgaaaggaaaatctctgcactccggtaagttctcgacggtgaagctaaatccggagatcgccggagctggtaggttcttcgagtttcgatccagattcatccctgcgtcgattgaatttgctcaggaatcgcctctttgcacgacgctgttgaaagatgagctcaaaatccgaaccgttgagcatttgttatcagctcttgaggcgaagggagttgataattgcaggattcaaatcgagagcgaaagttccgatgatcgagaagtcgaggtccctatttttgatggatcagctaaagaatgggtcgatgcgatacaaggagttggcataaacgcggctcaaaaccatgatggtgaaagtgtagagaagatggtcgcacatgtgaacaagcctgtgtatgtttgcaagaacgatacttttgttgctgcatttccggctctagagactcggatcacttgtggtatcgacttcccacaggtgcctgctataggctgccaatggttttcttggagacctatccatgagtcttcttttgcaaaggatatcgcatcatcaagaaccttctgtgtctatgaagaggtggagcgtatgcgtgaagcagggctcattaaaggaggttctctggataacgccatagtttgtagcgctgagcatggatggatgaatcctcctctgcggtttgatgatgaagcatgtcgacataagattcttgacctaatcggtgacctctcccttgtttcacggggcggaaatggaggactccccgtggctcacatagtcgcatataagaatgaggaggaggaggtgcgatcttcaaccgaagagaacgagaatgtgcgatcttcaaccgaagagaacgagtatgtgcgatcttccaccgaagctggtaggggagaagatcctcacgaggattccgataacatctctgagagcggtgcgatccacttgcaaattatggaacgctttaaccaaagatcgggttctggcaaggaggaagaagaagacacgatggatctatctataaagcaggtagatttgcttaatcaagtcgagatatctagagtgtatcactgcgacggcttgttgttatgcgtggctaaggacaactcgagggtcgtggtttggaacccttatttggggcaaacaagatggatcagacccagaacagaatccaacataggagacagctatgctcttggatacgacatcaaccgtaaccacaaaatcttgaggatggtgcagacaagaaacgtttccgtttacaggtacgaaatctacgacttgcgctctaattcatggagggttctcgaggtcactcccaacggggaaatggaccctaatcatcccctctacggcgtttctgtgaagggaaatacctacttttttgcgcatgaggatagcagcagtggtgaaattgatgaagatggcgacataatcgatcttgaagatttcttactctgttttgattttacaacagagacatttggtctgcgtctgcctcttccgtttcactctactatcgatgcgactgtgaccctctcttgtgttagagaccagcagctcgcggtgctatatcataatgagggtcttcacagtgatgatcggtttaccacagttgagttttgggttactactagtattgagcccaactctgtgtcctggagcaagtttttgacagtggatatgagaccattggcactcactggtgttcggtttgacaatgatatgggtgccaccttcttcattgacgaggatgagaaagtcgctgtggttttcgatctagacggatacctaagcaccgagagcgctcgttaccacaccgcttttatcagtggaaaggatggattctttaaacctgtgactctaggagtagctcccaatgtcggggaaccttgtcccagaaccgggcatattccgactacatatcgtcccccgcttgtctgctcgtctacttaccttccgagtttagtgcaagtcaaccaacagcgcaaaaggaaagaaagacatgtttag

SEQ ID NO: 80444 - protein, 955 aa, Arabidopsis thaliana
  peptide (1)..(955): Ceres Seq. ID no. 12655903
MRLRHQGGQYLARGMEPVYWSNKVDSTHDLYDNYTLGSYQNNSYNILAHTGFGYDHEFQIYEINSNSWRIIDATLDFKLGYIGRGVSLKGKTYWIASGEEEKRLGKFLISFDYTTERFERLCLPNKYPCYATLALSVVREEKLSMLSQRGIKSKAEIWVTNKIGETQVVSWSMVLALDLQPKRCIGESGSFLVDEKKRVVVCCDNIRDQGKTTFDSNLPRYHRQKKKGRMIIVFDVESMRLPVTVKATKPSFLVIWIRYSSAASSPTVSLNPSGRLQQTLAGSVEVKGKSLHSGKFSTVKLNPEIAGAGRFFEFRSRFIPASIEFAQESPLCTTLLKDELKIRTVEHLLSALEAKGVDNCRIQIESESSDDREVEVPIFDGSAKEWVDAIQGVGINAAQNHDGESVEKMVAHVNKPVYVCKNDTFVAAFPALETRITCGIDFPQVPAIGCQWFSWRPIHESSFAKDIASSRTFCVYEEVERMREAGLIKGGSLDNAIVCSAEHGWMNPPLRFDDEACRHKILDLIGDLSLVSRGGNGGLPVAHIVAYKNEEEEVRSSTEENENVRSSTEENEYVRSSTEAGRGEDPHEDSDNISESGAIHLQIMERFNQRSGSGKEEEEDTMDLSIKQVDLLNQVEISRVYHCDGLLLCVAKDNSRVVVWNPYLGQTRWIRPRTESNIGDSYALGYDINRNHKILRMVQTRNVSVYRYEIYDLRSNSWRVLEVTPNGEMDPNHPLYGVSVKGNTYFFAHEDSSSGEIDEDGDIIDLEDFLLCFDFTTETFGLRLPLPFHSTIDATVTLSCVRDQQLAVLYHNEGLHSDDRFTTVEFWVTTSIEPNSVSWSKFLTVDMRPLALTGVRFDNDMGATFFIDEDEKVAVVFDLDGYLSTESARYHTAFISGKDGFFKPVTLGVAPNVGEPCPRTGHIPTTYRPPLVCSSTYLPSLVQVNQQRKRKERHV

SEQ ID NO: 80445 - protein, 941 aa, Arabidopsis thaliana
  peptide (1)..(941): Ceres Seq. ID no. 12655904
MEPVYWSNKVDSTHDLYDNYTLGSYQNNSYNILAHTGFGYDHEFQIYEINSNSWRIIDATLDFKLGYIGRGVSLKGKTYWIASGEEEKRLGKFLISFDYTTERFERLCLPNKYPCYATLALSVVREEKLSMLSQRGIKSKAEIWVTNKIGETQVVSWSMVLALDLQPKRCIGESGSFLVDEKKRVVVCCDNIRDQGKTTFDSNLPRYHRQKKKGRMIIVFDVESMRLPVTVKATKPSFLVIWIRYSSAASSPTVSLNPSGRLQQTLAGSVEVKGKSLHSGKFSTVKLNPEIAGAGRFFEFRSRFIPASIEFAQESPLCTTLLKDELKIRTVEHLLSALEAKGVDNCRIQIESESSDDREVEVPIFDGSAKEWVDAIQGVGINAAQNHDGESVEKMVAHVNKPVYVCKNDTFVAAFPALETRITCGIDFPQVPAIGCQWFSWRPIHESSFAKDIASSRTFCVYEEVERMREAGLIKGGSLDNAIVCSAEHGWMNPPLRFDDEACRHKILDLIGDLSLVSRGGNGGLPVAHIVAYKNEEEEVRSSTEENENVRSSTEENEYVRSSTEAGRGEDPHEDSDNISESGAIHLQIMERFNQRSGSGKEEEEDTMDLSIKQVDLLNQVEISRVYHCDGLLLCVAKDNSRVVVWNPYLGQTRWIRPRTESNIGDSYALGYDINRNHKILRMVQTRNVSVYRYEIYDLRSNSWRVLEVTPNGEMDPNHPLYGVSVKGNTYFFAHEDSSSGEIDEDGDIIDLEDFLLCFDFTTETFGLRLPLPFHSTIDATVTLSCVRDQQLAVLYHNEGLHSDDRFTTVEFWVTTSIEPNSVSWSKFLTVDMRPLALTGVRFDNDMGATFFIDEDEKVAVVFDLDGYLSTESARYHTAFISGKDGFFKPVTLGVAPNVGEPCPRTGHIPTTYRPPLVCSSTYLPSLVQVNQQRKRKERHV

SEQ ID NO: 80446 - protein, 811 aa, Arabidopsis thaliana
  peptide (1)..(811): Ceres Seq. ID no. 12655905
MLSQRGIKSKAEIWVTNKIGETQVVSWSMVLALDLQPKRCIGESGSFLVDEKKRVVVCCDNIRDQGKTTFDSNLPRYHRQKKKGRMIIVFDVESMRLPVTVKATKPSFLVIWIRYSSAASSPTVSLNPSGRLQQTLAGSVEVKGKSLHSGKFSTVKLNPEIAGAGRFFEFRSRFIPASIEFAQESPLCTTLLKDELKIRTVEHLLSALEAKGVDNCRIQIESESSDDREVEVPIFDGSAKEWVDAIQGVGINAAQNHDGESVEKMVAHVNKPVYVCKNDTFVAAFPALETRITCGIDFPQVPAIGCQWFSWRPIHESSFAKDIASSRTFCVYEEVERMREAGLIKGGSLDNAIVCSAEHGWMNPPLRFDDEACRHKILDLIGDLSLVSRGGNGGLPVAHIVAYKNEEEEVRSSTEENENVRSSTEENEYVRSSTEAGRGEDPHEDSDNISESGAIHLQIMERFNQRSGSGKEEEEDTMDLSIKQVDLLNQVEISRVYHCDGLLLCVAKDNSRVVVWNPYLGQTRWIRPRTESNIGDSYALGYDINRNHKILRMVQTRNVSVYRYEIYDLRSNSWRVLEVTPNGEMDPNHPLYGVSVKGNTYFFAHEDSSSGEIDEDGDIIDLEDFLLCFDFTTETFGLRLPLPFHSTIDATVTLSCVRDQQLAVLYHNEGLHSDDRFTTVEFWVTTSIEPNSVSWSKFLTVDMRPLALTGVRFDNDMGATFFIDEDEKVAVVFDLDGYLSTESARYHTAFISGKDGFFKPVTLGVAPNVGEPCPRTGHIPTTYRPPLVCSSTYLPSLVQVNQQRKRKERHV

SEQ ID NO: 80447 - DNA, 831 bp, Arabidopsis thaliana
  misc_feature (1)..(831): Ceres Seq. ID no. 12655906
  misc_feature (1)..(831): Ortholog of  Ceres SEQ ID NO 15224924 as cited in SEQ ID NO 64061
atggcggcttctacattgtacaaatcctgtcttcttcaacccaagtctggctccaccactcgccgcctaaacccttctctcgttaaccctcttacgaatcccacaagagtttccgttttggggaagagtcgtagagatgtctttgcgaaagcttcgattgaaatggcggaatcgaattcgataccttccgttgttgtcaattcctctaagcagcatggtccaatcatcgtgattgataattacgacagcttcacatacaatctctgccagtatatgggagagctaggatgccattttgaagtttaccgcaatgatgaacttacagtagaagagctgaaaaaaaaaaatccaagaggggtgttgatttctccagggcctggtacccctcaagactctgggatttccttgcaaactgttttggaactcggaccacttgttcctttatttggagtatgtatgggtttgcagtgtataggagaagcatttggaggaaagattgtgcggtcaccatttggtgttatgcatgggaaaagctcaatggttcactatgatgagaaaggagaagaaggcttgttctctggattatcaaaccctttcattgtaggtagatatcacagtctcgtgatcgaaaaagatacatttcctagtgatgaactcgaggttacagcatggacagaagatggtctggtaatggctgcccgtcacagaaagtacaagcatatacagggagtccaatttcatccggagagtattataacaactgagggcaagacaattgtccgcaatttcatcaaaatagtagagaaaaaggagtccgagaagctgacatag

SEQ ID NO: 80448 - protein, 276 aa, Arabidopsis thaliana; identical to SEQ ID NO: 28763
  peptide (1)..(276): Ceres Seq. ID no. 12655907

SEQ ID NO: 80449 - protein, 222 aa, Arabidopsis thaliana; identical to SEQ ID NO: 28764
  peptide (1)..(222): Ceres Seq. ID no. 12655908

SEQ ID NO: 80450 - protein, 185 aa, Arabidopsis thaliana
  peptide (1)..(185): Ceres Seq. ID no. 12655909
MGELGCHFEVYRNDELTVEELKKKNPRGVLISPGPGTPQDSGISLQTVLELGPLVPLFGVCMGLQCIGEAFGGKIVRSPFGVMHGKSSMVHYDEKGEEGLFSGLSNPFIVGRYHSLVIEKDTFPSDELEVTAWTEDGLVMAARHRKYKHIQGVQFHPESIITTEGKTIVRNFIKIVEKKESEKLT

SEQ ID NO: 80451 - DNA, 1992 bp, Arabidopsis thaliana
  misc_feature (1)..(1992): Ceres Seq. ID no. 12655922
  misc_feature (1)..(1992): Ortholog of  Ceres SEQ ID NO 12586556 as cited in SEQ ID NO 64667
  misc_feature (1)..(1992): Ortholog of  Ceres SEQ ID NO 13660894 as cited in SEQ ID NO 67475
atggtctctggctattgtgcttccggtgatatcaccctcgctcgaggggtttttgagaaagctcctgtgtgtatgcgtgatactgtaatgtacaatgcgatgatcactggcttttcacataacaatgatggttactctgctattaacctcttttgtaagatgaagcatgaaggattcaaacctgacaacttcactttcgcaagtgttctcgcgggtttagcgttagttgccgatgacgagaagcaatgtgtgcaatttcatgccgcagctctgaaatctggtgctggttatattacttcggtttctaacgctctggtgtctgtgtattcgaaatgtgcgtcttctccgtctctgctacattcagctagaaaagtgtttgatgagattcttgagaaagatgagaggtcgtggacgactatgatgacgggttatgtaaagaatggttattttgatttaggggaagagttgcttgaggggatggacgacaatatgaagctggttgcttataatgctatgatttctggttatgttaatcgtggtttttatcaggaggcattggagatggtaagaaggatggtttcatctggaattgagctcgatgagtttacatatcctagcgttattagggcgtgtgccacagctggattgcttcagttgggaaagcaagttcatgcttatgtattaagaagggaggatttctcgtttcattttgacaattcgttagtttcgttatactacaaatgcgagatgaaagagaagaatattctatcatggatgataatgatatccgggttagctgaaaatgggtttggagaagaaggtttgaagctgttttcttgtatgaagagagaaggtttcgagccttgtgattacgctttttccggggcaatcaaatcatgtgccgtgctgggagcatattgcaatgggcaacagtaccatgcacagttgcttaaaatagggtttgactctagcctctctgctggaaacgctctgattacaatgtatgcgaaatgcggggttgtggaggaagctcgacaggtgtttcgaactatgccttgtctggattcggtttcctggaatgcgttgattgctgcattgggacagcatggccatggtgctgaagcagtagatgtgtatgaggagatgctaaagaaagggataagaccggatcggattacgttgcttacagttttgacagcatgtagccacgcgggtttagtggaccagggacggaaatattttgattctatggagactgtttaccgtatacctccaggtgcagatcattacgcaaggctgatcgatttgctttgtcgttctgggaaattctctgatgcggaaagtgtaatcgaatcattacctttcaaacctactgcagaaatctgggaagctcttctttctggttgcagagtgcatggaaacatggaactagggatcatcgctgcagacaaactcttcggtctcataccagaacatgatgggacatacatgctcttatcaaacatgcacgcagctactggccagtgggaggaagtggcaagggtacgtaaactaatgcgggatcgaggtgtaaaaaaagaagtagcttgtagttggattgaaatggagacacaagtgcatacatttctagttgatgatacatcacatccagaagcagaagctgtttacatctatcttcaagacctgggtaaagagatgaggagactcgggtatgtaccagacacgagcttcgtgttgcacgacgtagagtctgatggtcacaaggaagatatgttgacaactcatagtgagaagattgcggttgcttttgggctaatgaaacttcctccgggaacaactattaggattttcaagaacttgaggacttgtggagattgccataacttcttcaggttcttgtcgtgggtggtgcagcgagacattatcttgagagacaggaagaggtttcatcatttccggaatggcgagtgttcttgtggtaacttctggtag

SEQ ID NO: 80452 - protein, 663 aa, Arabidopsis thaliana
  peptide (1)..(663): Ceres Seq. ID no. 12655923
MVSGYCASGDITLARGVFEKAPVCMRDTVMYNAMITGFSHNNDGYSAINLFCKMKHEGFKPDNFTFASVLAGLALVADDEKQCVQFHAAALKSGAGYITSVSNALVSVYSKCASSPSLLHSARKVFDEILEKDERSWTTMMTGYVKNGYFDLGEELLEGMDDNMKLVAYNAMISGYVNRGFYQEALEMVRRMVSSGIELDEFTYPSVIRACATAGLLQLGKQVHAYVLRREDFSFHFDNSLVSLYYKCEMKEKNILSWMIMISGLAENGFGEEGLKLFSCMKREGFEPCDYAFSGAIKSCAVLGAYCNGQQYHAQLLKIGFDSSLSAGNALITMYAKCGVVEEARQVFRTMPCLDSVSWNALIAALGQHGHGAEAVDVYEEMLKKGIRPDRITLLTVLTACSHAGLVDQGRKYFDSMETVYRIPPGADHYARLIDLLCRSGKFSDAESVIESLPFKPTAEIWEALLSGCRVHGNMELGIIAADKLFGLIPEHDGTYMLLSNMHAATGQWEEVARVRKLMRDRGVKKEVACSWIEMETQVHTFLVDDTSHPEAEAVYIYLQDLGKEMRRLGYVPDTSFVLHDVESDGHKEDMLTTHSEKIAVAFGLMKLPPGTTIRIFKNLRTCGDCHNFFRFLSWVVQRDIILRDRKRFHHFRNGECSCGNFW

SEQ ID NO: 80453 - protein, 639 aa, Arabidopsis thaliana
  peptide (1)..(639): Ceres Seq. ID no. 12655924
MRDTVMYNAMITGFSHNNDGYSAINLFCKMKHEGFKPDNFTFASVLAGLALVADDEKQCVQFHAAALKSGAGYITSVSNALVSVYSKCASSPSLLHSARKVFDEILEKDERSWTTMMTGYVKNGYFDLGEELLEGMDDNMKLVAYNAMISGYVNRGFYQEALEMVRRMVSSGIELDEFTYPSVIRACATAGLLQLGKQVHAYVLRREDFSFHFDNSLVSLYYKCEMKEKNILSWMIMISGLAENGFGEEGLKLFSCMKREGFEPCDYAFSGAIKSCAVLGAYCNGQQYHAQLLKIGFDSSLSAGNALITMYAKCGVVEEARQVFRTMPCLDSVSWNALIAALGQHGHGAEAVDVYEEMLKKGIRPDRITLLTVLTACSHAGLVDQGRKYFDSMETVYRIPPGADHYARLIDLLCRSGKFSDAESVIESLPFKPTAEIWEALLSGCRVHGNMELGIIAADKLFGLIPEHDGTYMLLSNMHAATGQWEEVARVRKLMRDRGVKKEVACSWIEMETQVHTFLVDDTSHPEAEAVYIYLQDLGKEMRRLGYVPDTSFVLHDVESDGHKEDMLTTHSEKIAVAFGLMKLPPGTTIRIFKNLRTCGDCHNFFRFLSWVVQRDIILRDRKRFHHFRNGECSCGNFW

SEQ ID NO: 80454 - protein, 634 aa, Arabidopsis thaliana
  peptide (1)..(634): Ceres Seq. ID no. 12655925
MYNAMITGFSHNNDGYSAINLFCKMKHEGFKPDNFTFASVLAGLALVADDEKQCVQFHAAALKSGAGYITSVSNALVSVYSKCASSPSLLHSARKVFDEILEKDERSWTTMMTGYVKNGYFDLGEELLEGMDDNMKLVAYNAMISGYVNRGFYQEALEMVRRMVSSGIELDEFTYPSVIRACATAGLLQLGKQVHAYVLRREDFSFHFDNSLVSLYYKCEMKEKNILSWMIMISGLAENGFGEEGLKLFSCMKREGFEPCDYAFSGAIKSCAVLGAYCNGQQYHAQLLKIGFDSSLSAGNALITMYAKCGVVEEARQVFRTMPCLDSVSWNALIAALGQHGHGAEAVDVYEEMLKKGIRPDRITLLTVLTACSHAGLVDQGRKYFDSMETVYRIPPGADHYARLIDLLCRSGKFSDAESVIESLPFKPTAEIWEALLSGCRVHGNMELGIIAADKLFGLIPEHDGTYMLLSNMHAATGQWEEVARVRKLMRDRGVKKEVACSWIEMETQVHTFLVDDTSHPEAEAVYIYLQDLGKEMRRLGYVPDTSFVLHDVESDGHKEDMLTTHSEKIAVAFGLMKLPPGTTIRIFKNLRTCGDCHNFFRFLSWVVQRDIILRDRKRFHHFRNGECSCGNFW

SEQ ID NO: 80455 - DNA, 1167 bp, Arabidopsis thaliana
  misc_feature (1)..(1167): Ceres Seq. ID no. 12655960
  misc_feature (1)..(1167): Ortholog of  Ceres SEQ ID NO 14312266 as cited in SEQ ID NO 59225
  misc_feature (1)..(1167): Ortholog of  Ceres SEQ ID NO 13597620 as cited in SEQ ID NO 65383
attcatcttttagctcttcagcgaatgttcgtctcgtctatttgctctctctcgacgactgttaattaactccggcgattgatcactccgtcttctttgtaacacagccggagaaaaatcgaaagtttcgtttttttcttctccttcgtagctaattcgccgtcgattttataattcggcagccatgagctcggttttgcagggttttacgaagtcacttgctatgacctttgtatcggagattggtgacaagacgtttttcgctgcagcaattttggctatgcgttatcctaggagacttgtgttggctggttgtttatcggctctgattgttatgactatcctctctgctactcttggatgggctgctcctaatctgatctctcgcaaatggactcatcacataacaacattgttgttctttggttttgggctatggtctttgtgggacggtttcaaagaaggaggagggggttcggaagaattggctgaagtcgaagcagaactggatgctgatttgaaggctaatggtaaatctccaaaagacagtagtaagagagaagatgaaaacaaaaagcagaatagggcgttcctcacgcaatttttctctccaatttttctcaaggctttttcgattaatttctttggagaatggggtgacaagagtcagcttgctacaattggtttagctgcagatgaaaatccatttggggtggtccttggtggagttgtggcacagtttttgtgcaccactgctgctgtaattggaggaaagagcttagcgtctcaaatttccgaaagaatagtggctctttctggtggaatgcttttcatcatttttggcatccaatcgtatcttacttctgttgaggcttaatgctttcttatggtttgtagggagactgatgaagaggaagaacgttactatccatagtttattagacatttaattttgtttattagacatttacacaagtgattacaaaacaaatctgagagtttgattgtctacagtgaaaacattgaaatgtgctgaagcagccatctgacttcaataaagtttttttggtaatcagttttaatcctcttttgttttttggagtcatttggattttgaaatgttttgcaaggatttgactcaatgagatacaaaatgtggttttgttt

SEQ ID NO: 80456 - protein, 230 aa, Arabidopsis thaliana; identical to SEQ ID NO: 25522
  peptide (1)..(230): Ceres Seq. ID no. 12655961

SEQ ID NO: 80457 - protein, 217 aa, Arabidopsis thaliana; identical to SEQ ID NO: 25523
  peptide (1)..(217): Ceres Seq. ID no. 12655962

SEQ ID NO: 80458 - protein, 198 aa, Arabidopsis thaliana; identical to SEQ ID NO: 25524
  peptide (1)..(198): Ceres Seq. ID no. 12655963

SEQ ID NO: 80459 - DNA, 939 bp, Arabidopsis thaliana
  misc_feature (1)..(939): Ceres Seq. ID no. 12655980
  misc_feature (1)..(939): Ortholog of  Ceres SEQ ID NO 14308430 as cited in SEQ ID NO 55350
  misc_feature (1)..(939): Ortholog of  Ceres SEQ ID NO 15177799 as cited in SEQ ID NO 59221
  misc_feature (1)..(939): Ortholog of  Ceres SEQ ID NO 13662846 as cited in SEQ ID NO 65519
atggatctgaaactcttgagtcggccggattgggatcaagaatcttacccagattcttctgatttcttggtcctcatcttctttgctccattcttcctttttcttcgcttaatcctcgacagatgcatattcgagagggtcgctagaagactggtagttcctaaaggactatgtgctgattcaaacgagagaagaaagaaggtagtgaaattcaaagaatccgcttggaaatgtttgtgctctttctcggtggaagcttttgctctctacgttacttataaggagccatggtttaaagacaccagatccttctggttaggaccaggagaccaggtatggcctgaccaaaagataaagttgaaaatgaagggaatgtatatgtttgttggcgggttaaatgtatatgccttttttgctttgttcttttgggaaacaagacgatctgatttcaaagtcatgttagttcatcacattgtaacttcattcctcatcatcttgtcttacgttttcagatttgctcgtataggttctgtaatattagctcttcacgaaatcagcgacgtgtttctagagataggcaagatgtgcaaatacagcggcgccgaaactatgactagcgtctcgtttgtcctatttttcttgtcgtggaccactttgcgactcatctattaccctttctggatcctatggagcaccagctacgaatcaataaaagtgaaaacggagtactgggacaagaagcatctgatggaaaccggaccaccccttatacttttctactatgtcttcaacacacttctttattgcttacagattctgcacatctactggtggatcttgatatatcgtgtgctcataagccaaatacgtgccaaaggcaaagtcgctaaagacattcgttctgattctgaaggtgaagatgatgaacaccaggattga

SEQ ID NO: 80460 - protein, 312 aa, Arabidopsis thaliana
  peptide (1)..(312): Ceres Seq. ID no. 12655981
MDLKLLSRPDWDQESYPDSSDFLVLIFFAPFFLFLRLILDRCIFERVARRLVVPKGLCADSNERRKKVVKFKESAWKCLCSFSVEAFALYVTYKEPWFKDTRSFWLGPGDQVWPDQKIKLKMKGMYMFVGGLNVYAFFALFFWETRRSDFKVMLVHHIVTSFLIILSYVFRFARIGSVILALHEISDVFLEIGKMCKYSGAETMTSVSFVLFFLSWTTLRLIYYPFWILWSTSYESIKVKTEYWDKKHLMETGPPLILFYYVFNTLLYCLQILHIYWWILIYRVLISQIRAKGKVAKDIRSDSEGEDDEHQD

SEQ ID NO: 80461 - protein, 191 aa, Arabidopsis thaliana
  peptide (1)..(191): Ceres Seq. ID no. 12655982
MKGMYMFVGGLNVYAFFALFFWETRRSDFKVMLVHHIVTSFLIILSYVFRFARIGSVILALHEISDVFLEIGKMCKYSGAETMTSVSFVLFFLSWTTLRLIYYPFWILWSTSYESIKVKTEYWDKKHLMETGPPLILFYYVFNTLLYCLQILHIYWWILIYRVLISQIRAKGKVAKDIRSDSEGEDDEHQD

SEQ ID NO: 80462 - protein, 188 aa, Arabidopsis thaliana
  peptide (1)..(188): Ceres Seq. ID no. 12655983
MYMFVGGLNVYAFFALFFWETRRSDFKVMLVHHIVTSFLIILSYVFRFARIGSVILALHEISDVFLEIGKMCKYSGAETMTSVSFVLFFLSWTTLRLIYYPFWILWSTSYESIKVKTEYWDKKHLMETGPPLILFYYVFNTLLYCLQILHIYWWILIYRVLISQIRAKGKVAKDIRSDSEGEDDEHQD

SEQ ID NO: 80463 - DNA, 1033 bp, Arabidopsis thaliana
  misc_feature (1)..(1033): Ceres Seq. ID no. 12656000
  misc_feature (1)..(1033): Ortholog of  Ceres SEQ ID NO 13581804 as cited in SEQ ID NO 51424
  misc_feature (1)..(1033): Ortholog of  Ceres SEQ ID NO 14307559 as cited in SEQ ID NO 54006
  misc_feature (1)..(1033): Ortholog of  Ceres SEQ ID NO 14307797 as cited in SEQ ID NO 54802
  misc_feature (1)..(1033): Ortholog of  Ceres SEQ ID NO 15168374 as cited in SEQ ID NO 55652
  misc_feature (1)..(1033): Ortholog of  Ceres SEQ ID NO 13663874 as cited in SEQ ID NO 67003
  misc_feature (1)..(1033): Ortholog of  Ceres SEQ ID NO 13624654 as cited in SEQ ID NO 0
acattaccatcattagaaaactttcctaattagatcaagatcgtcgttatctctcttgttttttcttcatataatttagttattttaagagaaatgggaaggggtagggttgaattgaagaggatagagaacaagatcaatagacaagtgacattctcgaaaagaagaactggtcttttgaagaaagctcaggagatctctgttctttgtgatgccgaggtttcccttattgtcttctcccataagggcaaattgttcgagtactcctctgaatcttgcatggagaaggtactagaacgctacgagaggtattcttacgccgagagacagctgattgcacctgactctcacgttaatgcacagacgaactggtcaatggagtatagcaggcttaaggccaagattgagcttttggagagaaaccaaaggcattatctgggagaagagttggaaccaatgagcctcaaggatctccaaaatctggagcagcagcttgagactgctcttaagcacattcgctccagaaaaaatcaactcatgaatgagtccctcaaccacctccaaagaaaggagaaggagatacaggaggaaaacagcatgcttaccaaacagataaaggagagggaaaacatcctaaggacaaaacaaacccaatgtgagcagctgaaccgcagcgtcgacgatgtaccacagccacaaccatttcaacacccccatctttacatgatcgctcatcagacttctcctttcctaaatatgggtggtttgtaccaagaagaagaccaaacggcgatgaggaggaacaatctggatctgactcttgaacccatttacaattaccttggctgttacgccgcttgaatagactacatcgatctatatcaatctctttaaaataatataagatcgatcctctactcatgatctatattaaacaccggttaattaatatatttttggtatgtccttatatcatatcaacatgatcaagcctttttccaattcaatatatcttgtatttcggggagcaatg

SEQ ID NO: 80464 - protein, 255 aa, Arabidopsis thaliana
  peptide (1)..(255): Ceres Seq. ID no. 12656001
MGRGRVELKRIENKINRQVTFSKRRTGLLKKAQEISVLCDAEVSLIVFSHKGKLFEYSSESCMEKVLERYERYSYAERQLIAPDSHVNAQTNWSMEYSRLKAKIELLERNQRHYLGEELEPMSLKDLQNLEQQLETALKHIRSRKNQLMNESLNHLQRKEKEIQEENSMLTKQIKERENILRTKQTQCEQLNRSVDDVPQPQPFQHPHLYMIAHQTSPFLNMGGLYQEEDQTAMRRNNLDLTLEPIYNYLGCYAA

SEQ ID NO: 80465 - protein, 193 aa, Arabidopsis thaliana
  peptide (1)..(193): Ceres Seq. ID no. 12656002
MEKVLERYERYSYAERQLIAPDSHVNAQTNWSMEYSRLKAKIELLERNQRHYLGEELEPMSLKDLQNLEQQLETALKHIRSRKNQLMNESLNHLQRKEKEIQEENSMLTKQIKERENILRTKQTQCEQLNRSVDDVPQPQPFQHPHLYMIAHQTSPFLNMGGLYQEEDQTAMRRNNLDLTLEPIYNYLGCYAA

SEQ ID NO: 80466 - protein, 161 aa, Arabidopsis thaliana
  peptide (1)..(161): Ceres Seq. ID no. 12656003
MEYSRLKAKIELLERNQRHYLGEELEPMSLKDLQNLEQQLETALKHIRSRKNQLMNESLNHLQRKEKEIQEENSMLTKQIKERENILRTKQTQCEQLNRSVDDVPQPQPFQHPHLYMIAHQTSPFLNMGGLYQEEDQTAMRRNNLDLTLEPIYNYLGCYAA

SEQ ID NO: 80467 - DNA, 594 bp, Arabidopsis thaliana
  misc_feature (1)..(594): Ceres Seq. ID no. 12656012
  misc_feature (1)..(594): Ortholog of  Ceres SEQ ID NO 13648400 as cited in SEQ ID NO 20329
  misc_feature (1)..(594): Ortholog of  Ceres SEQ ID NO 13654553 as cited in SEQ ID NO 68417
  misc_feature (1)..(594): Ortholog of  Ceres SEQ ID NO 15175178 as cited in SEQ ID NO 0
atggcggttttgcttcctctgtttcttctctctttcatgtttacctattcaaacgcggcggtttgtgtgtgcaaggacgctaacgagctggatcttcagaaggtgatagacttcgcatgtggaggaggtgctgactgtgcacagattcagacgaccggagcttgttatcaaccaaacaccctcaagaaccactgtgacgttgccgttaacagctactatcaaaagaaagcttccaccggtgccacatgtgacttcaacggcgccgccgtcatctccacttcccctccttcgactacgtcaagctgtttatctagttctagttccaacggaacccccactgccggatatccatccaccggaaattcaaccacagcaagtccaggcaccacaaatccatccacaggcaattcaacaaacagcacactacccactaatgataagccgacttcatctacgataacgtttcctgacagtactactatgggaccatctagcagcacgagtggtgatcccaacggtggagaagagctatccgtcagaaccacgacgatcatcttactgactaccatcgctgccgtggcattgagggtttag

SEQ ID NO: 80468 - protein, 197 aa, Arabidopsis thaliana
  peptide (1)..(197): Ceres Seq. ID no. 12656013
MAVLLPLFLLSFMFTYSNAAVCVCKDANELDLQKVIDFACGGGADCAQIQTTGACYQPNTLKNHCDVAVNSYYQKKASTGATCDFNGAAVISTSPPSTTSSCLSSSSSNGTPTAGYPSTGNSTTASPGTTNPSTGNSTNSTLPTNDKPTSSTITFPDSTTMGPSSSTSGDPNGGEELSVRTTTIILLTTIAAVALRV

SEQ ID NO: 80469 - protein, 185 aa, Arabidopsis thaliana
  peptide (1)..(185): Ceres Seq. ID no. 12656014
MFTYSNAAVCVCKDANELDLQKVIDFACGGGADCAQIQTTGACYQPNTLKNHCDVAVNSYYQKKASTGATCDFNGAAVISTSPPSTTSSCLSSSSSNGTPTAGYPSTGNSTTASPGTTNPSTGNSTNSTLPTNDKPTSSTITFPDSTTMGPSSSTSGDPNGGEELSVRTTTIILLTTIAAVALRV

SEQ ID NO: 80470 - DNA, 873 bp, Arabidopsis thaliana
  misc_feature (1)..(873): Ceres Seq. ID no. 12656047
  misc_feature (1)..(873): Ortholog of  Ceres SEQ ID NO 12585325 as cited in SEQ ID NO 63062
atggaggagggacgtcaaaaagacttgcaattgttggaggagattatcgacaaaggtttgaaacagaagcttgtacatgcaactgcttcacgctctgacttgcggaaaaacctagaaactctggagaagaatggtgtaaatagtctcaaaacaagggtcaaccttggttcagaagtttacatgcaagctgaagtgccagatactcggcacatattcatggatgtaggcctcggcttttatgtggagttcacacggcaagaagctcttgactatatagcacaaagggaggaaagaactcaaaaacaactagaagagtatactggtgttattacgcagatcaaagggcgcatcaaactgcttgtgatggatccaacacagaacacaagtgcagggattggtgggagcaatggtacaatcagatatcaaaccaatgatgggacttcaactgtgaccgttgctgatgattcaaaggagaatctttcccaagtcataaactctattgagaaaactttaggagtccttcatcagttacaccttaccgtcacttctttcacacccgcgtctcaactccatctcctccagcgccttaactctcttgtgatggagctagataacatgactaagttgtctgagaaatgcaacattcaaatccccatggaggttcttaacttgattgatgatgggaagaacccggatgagtttacgaaagatgttcttaatagctgcatagctagaaatcaagttactaagggcaagactgatgcttttaaggatttgagaaaacatattctggaggagcttgaacagaatttccctgatgaagtcgatatgtatagagaaatccgtgctagttctgctgctgtaagttgttaa

SEQ ID NO: 80471 - protein, 290 aa, Arabidopsis thaliana
  peptide (1)..(290): Ceres Seq. ID no. 12656048
MEEGRQKDLQLLEEIIDKGLKQKLVHATASRSDLRKNLETLEKNGVNSLKTRVNLGSEVYMQAEVPDTRHIFMDVGLGFYVEFTRQEALDYIAQREERTQKQLEEYTGVITQIKGRIKLLVMDPTQNTSAGIGGSNGTIRYQTNDGTSTVTVADDSKENLSQVINSIEKTLGVLHQLHLTVTSFTPASQLHLLQRLNSLVMELDNMTKLSEKCNIQIPMEVLNLIDDGKNPDEFTKDVLNSCIARNQVTKGKTDAFKDLRKHILEELEQNFPDEVDMYREIRASSAAVSC

SEQ ID NO: 80472 - protein, 230 aa, Arabidopsis thaliana
  peptide (1)..(230): Ceres Seq. ID no. 12656049
MQAEVPDTRHIFMDVGLGFYVEFTRQEALDYIAQREERTQKQLEEYTGVITQIKGRIKLLVMDPTQNTSAGIGGSNGTIRYQTNDGTSTVTVADDSKENLSQVINSIEKTLGVLHQLHLTVTSFTPASQLHLLQRLNSLVMELDNMTKLSEKCNIQIPMEVLNLIDDGKNPDEFTKDVLNSCIARNQVTKGKTDAFKDLRKHILEELEQNFPDEVDMYREIRASSAAVSC

SEQ ID NO: 80473 - protein, 218 aa, Arabidopsis thaliana
  peptide (1)..(218): Ceres Seq. ID no. 12656050
MDVGLGFYVEFTRQEALDYIAQREERTQKQLEEYTGVITQIKGRIKLLVMDPTQNTSAGIGGSNGTIRYQTNDGTSTVTVADDSKENLSQVINSIEKTLGVLHQLHLTVTSFTPASQLHLLQRLNSLVMELDNMTKLSEKCNIQIPMEVLNLIDDGKNPDEFTKDVLNSCIARNQVTKGKTDAFKDLRKHILEELEQNFPDEVDMYREIRASSAAVSC

SEQ ID NO: 80474 - DNA, 1080 bp, Arabidopsis thaliana
  misc_feature (1)..(1080): Ceres Seq. ID no. 12656092
  misc_feature (1)..(1080): Ortholog of  Ceres SEQ ID NO 13647762 as cited in SEQ ID NO 20426
atgtttataacggaaaaacaagtgtggatggatgagatcgtcgcaagaagagcttcttcttcttgggacttccctttcaacgacattaatattcatcagcatcatcatcgtcactgcaacacaagtcatgagtttgaaatcttgaagagtcctcttggagatgtagcggttcacgaagaagagagtaataataataaccctaatttcagtaacagcgagagtggtaagaaggagacaacagatagtggtcagtcttggtcctcgtcgtcttcaaaaccatcggtcttggggagaggacattggagaccagctgaagatgttaaactcaaagagcttgtctccatttacggcccacaaaactggaacctcatagctgaaaagcttcaaggaagatctgggaagagctgtagactacgatggtttaaccaattggacccgaggataaaccgaagagctttcacagaagaagaagaggagaggctgatgcaagcacataggctttatggtaacaaatgggcaatgattgcgaggcttttccctggtagaactgataattcagtgaagaaccattggcatgttgtcatggctcgtaagtatagagaacactcttctgcttaccgtaggagaaagcttatgagtaataatccacttaaacctcacctcaccaataatcatcatcctaaccctaaccctaattaccactcttttatctccactaatcattacttcgctcagcctttccccgagtttaatttgactcatcacctggttaataatgcccctatcacgagtgaccataaccagcttgtgttgcctttccattgctttcaaggttatgagaacaatgaacctccgatggttgtgagtatgtttggcaaccaaatgatggtcggcgataacgttggtgccacgtcagacgcgttatgcaatattccgcacattgaccctagtaaccaagagaaaccggagccaaatgatgcaatgcattggatcggaatggacgcggtagatgaggaggtgttcgaaaaggctaagcagcaaccacattttttcgattttcttggcttggggacggcgtga

SEQ ID NO: 80475 - protein, 359 aa, Arabidopsis thaliana
  peptide (1)..(359): Ceres Seq. ID no. 12656093
MFITEKQVWMDEIVARRASSSWDFPFNDINIHQHHHRHCNTSHEFEILKSPLGDVAVHEEESNNNNPNFSNSESGKKETTDSGQSWSSSSSKPSVLGRGHWRPAEDVKLKELVSIYGPQNWNLIAEKLQGRSGKSCRLRWFNQLDPRINRRAFTEEEEERLMQAHRLYGNKWAMIARLFPGRTDNSVKNHWHVVMARKYREHSSAYRRRKLMSNNPLKPHLTNNHHPNPNPNYHSFISTNHYFAQPFPEFNLTHHLVNNAPITSDHNQLVLPFHCFQGYENNEPPMVVSMFGNQMMVGDNVGATSDALCNIPHIDPSNQEKPEPNDAMHWIGMDAVDEEVFEKAKQQPHFFDFLGLGTA

SEQ ID NO: 80476 - protein, 350 aa, Arabidopsis thaliana
  peptide (1)..(350): Ceres Seq. ID no. 12656094
MDEIVARRASSSWDFPFNDINIHQHHHRHCNTSHEFEILKSPLGDVAVHEEESNNNNPNFSNSESGKKETTDSGQSWSSSSSKPSVLGRGHWRPAEDVKLKELVSIYGPQNWNLIAEKLQGRSGKSCRLRWFNQLDPRINRRAFTEEEEERLMQAHRLYGNKWAMIARLFPGRTDNSVKNHWHVVMARKYREHSSAYRRRKLMSNNPLKPHLTNNHHPNPNPNYHSFISTNHYFAQPFPEFNLTHHLVNNAPITSDHNQLVLPFHCFQGYENNEPPMVVSMFGNQMMVGDNVGATSDALCNIPHIDPSNQEKPEPNDAMHWIGMDAVDEEVFEKAKQQPHFFDFLGLGTA

SEQ ID NO: 80477 - protein, 198 aa, Arabidopsis thaliana
  peptide (1)..(198): Ceres Seq. ID no. 12656095
MQAHRLYGNKWAMIARLFPGRTDNSVKNHWHVVMARKYREHSSAYRRRKLMSNNPLKPHLTNNHHPNPNPNYHSFISTNHYFAQPFPEFNLTHHLVNNAPITSDHNQLVLPFHCFQGYENNEPPMVVSMFGNQMMVGDNVGATSDALCNIPHIDPSNQEKPEPNDAMHWIGMDAVDEEVFEKAKQQPHFFDFLGLGTA

SEQ ID NO: 80478 - DNA, 1761 bp, Arabidopsis thaliana
  misc_feature (1)..(1761): Ceres Seq. ID no. 12656114
  misc_feature (1)..(1761): Ortholog of  Ceres SEQ ID NO 12613725 as cited in SEQ ID NO 68196
atgacagtagaagaggtaggagatgattatacaaaagatggaacagttgatcttcgaggaaatcgcgtccgaagatcccaaacaggccgttggaaagcttgttccttcgtcgttgtgtacgaggtgtttgaaagaatggcgtattatggaatatcaagcaacctagttatctacatgactaccaaattgcaccaaggcacggtcaagtcgtcgaacaatgtgaccaactgggttgggactagttggctcactccaatcttgggtgcttatgttgctgatgctcatttcggtcgctacatcactttcgtcatctcttccgctatctatttattgggaatggcattactgacactatcagtatcgctaccgggacttaaaccaccgaaatgttcgacggctaatgttgaaaactgtgaaaaagcttcggttatacagttagcggtattctttggagcgttatacacattagcaatcggtacaggcggtacaaaaccgaacatttctacaataggtgctgatcaattcgatgaatttgacccaaaggacaagattcataaacattcattcttcaattggtggatgtttagtatcttctttggtactttctttgctacaactgttcttgtctatgttcaagataatgttggttgggccataggttatgggctttcaactttgggacttgctttctccattttcatattcttgttgggaactcggttataccgacataaactcccaatgggaagcccattcaccaagatggctagagtcatcgtggcttcacttcgcaaagcccgcgagccgatgtcgagtgattcgacgcgcttctatgagcttccacctatggaatatgctagcaaaagggctttcccaatccattctacttcaagtctaagattcttaaatcgagcttcactcaaaaccggatcaacccataaatggaggctctgtactatcacagaagtggaagaaacaaaacagatgctaaaaatgttacctgtcctcttcgtaacattcgtcccaagcatgatgcttgctcaaataatgactctgttcatcaaacaaggaacgaccctcgaccgtcgtctcacaaacaacttcagcatcccacccgcaagtctcctaggcttcacaacattctcaatgctcgtctctatagtcatatacgaccgtgtctttgttaagttcatgagaaaactaaccggaaatccaagaggtatcacattgcttcagcgaatgggaatcggtatgatccttcacatcctaatcatgatcatcgcgtccataaccgaacggtataggctcaaggtcgctgctgaacacgggctaacccaccagaccgctgtaccaattcctttgagcattttcacattgcttccacagtatgtactaatgggtttggcagatgctttcatagaaatagcaaagctggagtttttctacgatcaagcaccagagagtatgaaaagcctcgggacatcatatacgagcacaagtatggcagtcgggtatttcatgagcagcattttgctttcgtcagtgtctcagataacaaagaagcagggaagaggatggattcaaaacaacttgaatgagtctaggctggataactattacatgttcttcgcggtacttaatttgcttaacttcatcctcttcttggttgtaattagattttatgagtacagagctgatgttacgcaatcagcaaacgtagaacagaaagaaccaaatatggtagataactacaatgagtaa

SEQ ID NO: 80479 - protein, 586 aa, Arabidopsis thaliana
  peptide (1)..(586): Ceres Seq. ID no. 12656115
MTVEEVGDDYTKDGTVDLRGNRVRRSQTGRWKACSFVVVYEVFERMAYYGISSNLVIYMTTKLHQGTVKSSNNVTNWVGTSWLTPILGAYVADAHFGRYITFVISSAIYLLGMALLTLSVSLPGLKPPKCSTANVENCEKASVIQLAVFFGALYTLAIGTGGTKPNISTIGADQFDEFDPKDKIHKHSFFNWWMFSIFFGTFFATTVLVYVQDNVGWAIGYGLSTLGLAFSIFIFLLGTRLYRHKLPMGSPFTKMARVIVASLRKAREPMSSDSTRFYELPPMEYASKRAFPIHSTSSLRFLNRASLKTGSTHKWRLCTITEVEETKQMLKMLPVLFVTFVPSMMLAQIMTLFIKQGTTLDRRLTNNFSIPPASLLGFTTFSMLVSIVIYDRVFVKFMRKLTGNPRGITLLQRMGIGMILHILIMIIASITERYRLKVAAEHGLTHQTAVPIPLSIFTLLPQYVLMGLADAFIEIAKLEFFYDQAPESMKSLGTSYTSTSMAVGYFMSSILLSSVSQITKKQGRGWIQNNLNESRLDNYYMFFAVLNLLNFILFLVVIRFYEYRADVTQSANVEQKEPNMVDNYNE

SEQ ID NO: 80480 - protein, 541 aa, Arabidopsis thaliana
  peptide (1)..(541): Ceres Seq. ID no. 12656116
MAYYGISSNLVIYMTTKLHQGTVKSSNNVTNWVGTSWLTPILGAYVADAHFGRYITFVISSAIYLLGMALLTLSVSLPGLKPPKCSTANVENCEKASVIQLAVFFGALYTLAIGTGGTKPNISTIGADQFDEFDPKDKIHKHSFFNWWMFSIFFGTFFATTVLVYVQDNVGWAIGYGLSTLGLAFSIFIFLLGTRLYRHKLPMGSPFTKMARVIVASLRKAREPMSSDSTRFYELPPMEYASKRAFPIHSTSSLRFLNRASLKTGSTHKWRLCTITEVEETKQMLKMLPVLFVTFVPSMMLAQIMTLFIKQGTTLDRRLTNNFSIPPASLLGFTTFSMLVSIVIYDRVFVKFMRKLTGNPRGITLLQRMGIGMILHILIMIIASITERYRLKVAAEHGLTHQTAVPIPLSIFTLLPQYVLMGLADAFIEIAKLEFFYDQAPESMKSLGTSYTSTSMAVGYFMSSILLSSVSQITKKQGRGWIQNNLNESRLDNYYMFFAVLNLLNFILFLVVIRFYEYRADVTQSANVEQKEPNMVDNYNE

SEQ ID NO: 80481 - protein, 528 aa, Arabidopsis thaliana
  peptide (1)..(528): Ceres Seq. ID no. 12656117
MTTKLHQGTVKSSNNVTNWVGTSWLTPILGAYVADAHFGRYITFVISSAIYLLGMALLTLSVSLPGLKPPKCSTANVENCEKASVIQLAVFFGALYTLAIGTGGTKPNISTIGADQFDEFDPKDKIHKHSFFNWWMFSIFFGTFFATTVLVYVQDNVGWAIGYGLSTLGLAFSIFIFLLGTRLYRHKLPMGSPFTKMARVIVASLRKAREPMSSDSTRFYELPPMEYASKRAFPIHSTSSLRFLNRASLKTGSTHKWRLCTITEVEETKQMLKMLPVLFVTFVPSMMLAQIMTLFIKQGTTLDRRLTNNFSIPPASLLGFTTFSMLVSIVIYDRVFVKFMRKLTGNPRGITLLQRMGIGMILHILIMIIASITERYRLKVAAEHGLTHQTAVPIPLSIFTLLPQYVLMGLADAFIEIAKLEFFYDQAPESMKSLGTSYTSTSMAVGYFMSSILLSSVSQITKKQGRGWIQNNLNESRLDNYYMFFAVLNLLNFILFLVVIRFYEYRADVTQSANVEQKEPNMVDNYNE

SEQ ID NO: 80482 - DNA, 1851 bp, Arabidopsis thaliana
  misc_feature (1)..(1851): Ceres Seq. ID no. 12656118
  misc_feature (1)..(1851): Ortholog of  Ceres SEQ ID NO 12613725 as cited in SEQ ID NO 68196
gacattaaaaaaaaaacagaaactaccaaacaaattagagagagaaaagaaagaaagaaagaaggtagagaggaaatgacagtagaagaggtaggagacgattacacaaaagatggaacagttgatcttcaaggcaatcctgttcgaagatccattagaggtcgttggaaagcttgctctttcgttgttgtgtacgaggtgtttgaacggatggcttattacgggatatcaagcaacctgtttatttacatgacaaccaaattgcaccaaggaacggtcaagtcgtcgaacaatgtgaccaattgggttgggactagttggctcactccaatcttgggtgcttacgttggagacgctcttctcggtcgctacatcactttcgtcatctcttgtgctatctatttctcggggatgatggtgttaacattatcagtaactataccgggaattaagccaccagaatgttccacgactaatgtggaaaattgcgaaaaagcttcggttttacaattagcagttttctttggagcgttatacacattagcaatcggtacaggcggtacgaaaccgaacatatcaacaataggagctgatcaattcgatgtattcgacccaaaggagaagactcaaaaactatcattcttcaactggtggatgtttagtatcttctttggtactctcttcgccaacactgttcttgtctatgttcaagataatgttggctggaccttgggttatggacttccaacattaggtttggctatttccattaccattttcttgttgggcactccgttttaccgccataaacttcccactggaagcccattcaccaagatggctcgagtcatcgtggcttcatttcgcaaagccaatgcaccaatgacgcatgacatcacgagcttccatgagctgccttctcttgaatatgagcggaaaggcgcctttccgatccaccctactccaagtttacgattcttagacagagcttcactcaaaacaggaacaaatcataaatggaatctttgtactaccacagaagttgaagaaacaaaacaaatgctgagaatgttaccagtcttgttcataactttcgtcccaagtatgatgcttgcacaaatcaacacattgtttgtgaaacaaggaaccactctagaccgaaaggttaccggatctttcagcatcccaccagcgagtctctccggatttgtcacactctcaatgcttatttccatagtcttgtatgaccgagttttcgtcaagataacccgaaaattcactggtaatccaagaggcattactttgcttcaacgaatgggaattggtcttatctttcatatcctcatcatgatcgtcgcatctgtcactgaaaggtatagactcaaagtcgctgctgatcatggtctcatccaccaaaccggagtaaaactaccattaaccatctttgctttgcttccacaattcgtcctaatgggtatggctgattcgttcttagaagttgcaaagcttgagtttttctacgatcaagctcccgagagcatgaaaagcctcgggacatcatattcgacaacgagtttggcgattgggaatttcatgagcagtttcttgttatctacggtatctgagataacaaagaaacgaggaagaggatggattttgaacaaccttaatgagtctaggttggattactattacctgttctttgcggtacttaatctggttaacttcgttttgttcttggtcgtggttaagttttatgtttatagagctgaggttactgattcggttgatgtgaaagaggtggaaatgaaagagactgaataacaaataatgaataatatagatttctct

SEQ ID NO: 80483 - protein, 607 aa, Arabidopsis thaliana
  peptide (1)..(607): Ceres Seq. ID no. 12656119
DIKKKTETTKQIRERKERKKEGREEMTVEEVGDDYTKDGTVDLQGNPVRRSIRGRWKACSFVVVYEVFERMAYYGISSNLFIYMTTKLHQGTVKSSNNVTNWVGTSWLTPILGAYVGDALLGRYITFVISCAIYFSGMMVLTLSVTIPGIKPPECSTTNVENCEKASVLQLAVFFGALYTLAIGTGGTKPNISTIGADQFDVFDPKEKTQKLSFFNWWMFSIFFGTLFANTVLVYVQDNVGWTLGYGLPTLGLAISITIFLLGTPFYRHKLPTGSPFTKMARVIVASFRKANAPMTHDITSFHELPSLEYERKGAFPIHPTPSLRFLDRASLKTGTNHKWNLCTTTEVEETKQMLRMLPVLFITFVPSMMLAQINTLFVKQGTTLDRKVTGSFSIPPASLSGFVTLSMLISIVLYDRVFVKITRKFTGNPRGITLLQRMGIGLIFHILIMIVASVTERYRLKVAADHGLIHQTGVKLPLTIFALLPQFVLMGMADSFLEVAKLEFFYDQAPESMKSLGTSYSTTSLAIGNFMSSFLLSTVSEITKKRGRGWILNNLNESRLDYYYLFFAVLNLVNFVLFLVVVKFYVYRAEVTDSVDVKEVEMKETE

SEQ ID NO: 80484 - protein, 582 aa, Arabidopsis thaliana
  peptide (1)..(582): Ceres Seq. ID no. 12656120
MTVEEVGDDYTKDGTVDLQGNPVRRSIRGRWKACSFVVVYEVFERMAYYGISSNLFIYMTTKLHQGTVKSSNNVTNWVGTSWLTPILGAYVGDALLGRYITFVISCAIYFSGMMVLTLSVTIPGIKPPECSTTNVENCEKASVLQLAVFFGALYTLAIGTGGTKPNISTIGADQFDVFDPKEKTQKLSFFNWWMFSIFFGTLFANTVLVYVQDNVGWTLGYGLPTLGLAISITIFLLGTPFYRHKLPTGSPFTKMARVIVASFRKANAPMTHDITSFHELPSLEYERKGAFPIHPTPSLRFLDRASLKTGTNHKWNLCTTTEVEETKQMLRMLPVLFITFVPSMMLAQINTLFVKQGTTLDRKVTGSFSIPPASLSGFVTLSMLISIVLYDRVFVKITRKFTGNPRGITLLQRMGIGLIFHILIMIVASVTERYRLKVAADHGLIHQTGVKLPLTIFALLPQFVLMGMADSFLEVAKLEFFYDQAPESMKSLGTSYSTTSLAIGNFMSSFLLSTVSEITKKRGRGWILNNLNESRLDYYYLFFAVLNLVNFVLFLVVVKFYVYRAEVTDSVDVKEVEMKETE

SEQ ID NO: 80485 - protein, 537 aa, Arabidopsis thaliana
  peptide (1)..(537): Ceres Seq. ID no. 12656121
MAYYGISSNLFIYMTTKLHQGTVKSSNNVTNWVGTSWLTPILGAYVGDALLGRYITFVISCAIYFSGMMVLTLSVTIPGIKPPECSTTNVENCEKASVLQLAVFFGALYTLAIGTGGTKPNISTIGADQFDVFDPKEKTQKLSFFNWWMFSIFFGTLFANTVLVYVQDNVGWTLGYGLPTLGLAISITIFLLGTPFYRHKLPTGSPFTKMARVIVASFRKANAPMTHDITSFHELPSLEYERKGAFPIHPTPSLRFLDRASLKTGTNHKWNLCTTTEVEETKQMLRMLPVLFITFVPSMMLAQINTLFVKQGTTLDRKVTGSFSIPPASLSGFVTLSMLISIVLYDRVFVKITRKFTGNPRGITLLQRMGIGLIFHILIMIVASVTERYRLKVAADHGLIHQTGVKLPLTIFALLPQFVLMGMADSFLEVAKLEFFYDQAPESMKSLGTSYSTTSLAIGNFMSSFLLSTVSEITKKRGRGWILNNLNESRLDYYYLFFAVLNLVNFVLFLVVVKFYVYRAEVTDSVDVKEVEMKETE

SEQ ID NO: 80486 - DNA, 1419 bp, Arabidopsis thaliana
  misc_feature (1)..(1419): Ceres Seq. ID no. 12656132
  misc_feature (1)..(1419): Ortholog of  Ceres SEQ ID NO 13657677 as cited in SEQ ID NO 66119
  misc_feature (1)..(1419): Ortholog of  Ceres SEQ ID NO 15226685 as cited in SEQ ID NO 0
atgggtagcaaagtgatgatgttcaagtggtcaaagaacatcacgccttcacaggttatcaaactgatgcgagctgaaaaagatgtggagaagtctatggcagtttttgattccgcaacggcggaatacgcaaatgggtacgtacatgatcagagttcttttggttatatggtcttgaggttggtctctgctaataagttcaaagcagctgaagatctgattgttagaatgaagattgagaattgtgttgttagtgaagatatattgctttcgatatgtcgagggtatggtcgggttcataggccgtttgattctttaagggtttttcacaaaatgaaggattttgattgtgatcctagccagaaggcttatgtcactgttcttgccattctcgtggaagagaatcagttaaatttggcatttaagttttacaagaatatgagagagattggtttgcctcctactgtggcatctctcaatgttttgattaaagctctttgcagaaatgacggaactgtggatgctggtcttaagatttttcttgaaatgcctaagagagggtgtgatccggattcttacacatatggaaccttgattagtggtttgtgtaggttcggaaggatagatgaggcgaagaagttgtttacagagatggttgagaaagactgtgcaccaactgttgttacctatacttctctgattaacggtttgtgtggatcgaaaaatgttgatgaagctatgagatatctagaagagatgaaaagtaaaggcattgagccgaatgttttcacgtacagttctttgatggacggtctttgcaaagatgggcgttctttgcaagccatggaactatttgagatgatgatggctagaggctgcaggccaaacatggtaacgtataccactttgatcactggtctctgtaaggagcagaagattcaagaagccgttgaacttcttgatagaatgaatcttcagggtttgaaacctgatgctggattatatgggaaagtaatcagtgggttctgtgctattagtaagtttcgtgaagctgccaatttccttgacgagatgattcttggaggaattactccaaatcgtttaacctggaacatccatgttaagacaagtaatgaagtagtccgaggtctttgtgcaaactatccaagtcgtgcatttactctatatcttagcatgaggagtagaggaatctcggttgaggttgaaacactagaatctttggtgaagtgtttgtgcaaaaagggtgaattccagaaagctgttcaattagtcgatgaaatagtgactgatgggtgtattccaagtaaaggaacatggaagctacttataggtcacacattggataaaacgattgtaggagaggcttcagatactcttctcagagatttggatatctaa

SEQ ID NO: 80487 - protein, 472 aa, Arabidopsis thaliana
  peptide (1)..(472): Ceres Seq. ID no. 12656133
MGSKVMMFKWSKNITPSQVIKLMRAEKDVEKSMAVFDSATAEYANGYVHDQSSFGYMVLRLVSANKFKAAEDLIVRMKIENCVVSEDILLSICRGYGRVHRPFDSLRVFHKMKDFDCDPSQKAYVTVLAILVEENQLNLAFKFYKNMREIGLPPTVASLNVLIKALCRNDGTVDAGLKIFLEMPKRGCDPDSYTYGTLISGLCRFGRIDEAKKLFTEMVEKDCAPTVVTYTSLINGLCGSKNVDEAMRYLEEMKSKGIEPNVFTYSSLMDGLCKDGRSLQAMELFEMMMARGCRPNMVTYTTLITGLCKEQKIQEAVELLDRMNLQGLKPDAGLYGKVISGFCAISKFREAANFLDEMILGGITPNRLTWNIHVKTSNEVVRGLCANYPSRAFTLYLSMRSRGISVEVETLESLVKCLCKKGEFQKAVQLVDEIVTDGCIPSKGTWKLLIGHTLDKTIVGEASDTLLRDLDI

SEQ ID NO: 80488 - protein, 467 aa, Arabidopsis thaliana
  peptide (1)..(467): Ceres Seq. ID no. 12656134
MMFKWSKNITPSQVIKLMRAEKDVEKSMAVFDSATAEYANGYVHDQSSFGYMVLRLVSANKFKAAEDLIVRMKIENCVVSEDILLSICRGYGRVHRPFDSLRVFHKMKDFDCDPSQKAYVTVLAILVEENQLNLAFKFYKNMREIGLPPTVASLNVLIKALCRNDGTVDAGLKIFLEMPKRGCDPDSYTYGTLISGLCRFGRIDEAKKLFTEMVEKDCAPTVVTYTSLINGLCGSKNVDEAMRYLEEMKSKGIEPNVFTYSSLMDGLCKDGRSLQAMELFEMMMARGCRPNMVTYTTLITGLCKEQKIQEAVELLDRMNLQGLKPDAGLYGKVISGFCAISKFREAANFLDEMILGGITPNRLTWNIHVKTSNEVVRGLCANYPSRAFTLYLSMRSRGISVEVETLESLVKCLCKKGEFQKAVQLVDEIVTDGCIPSKGTWKLLIGHTLDKTIVGEASDTLLRDLDI

SEQ ID NO: 80489 - protein, 466 aa, Arabidopsis thaliana
  peptide (1)..(466): Ceres Seq. ID no. 12656135
MFKWSKNITPSQVIKLMRAEKDVEKSMAVFDSATAEYANGYVHDQSSFGYMVLRLVSANKFKAAEDLIVRMKIENCVVSEDILLSICRGYGRVHRPFDSLRVFHKMKDFDCDPSQKAYVTVLAILVEENQLNLAFKFYKNMREIGLPPTVASLNVLIKALCRNDGTVDAGLKIFLEMPKRGCDPDSYTYGTLISGLCRFGRIDEAKKLFTEMVEKDCAPTVVTYTSLINGLCGSKNVDEAMRYLEEMKSKGIEPNVFTYSSLMDGLCKDGRSLQAMELFEMMMARGCRPNMVTYTTLITGLCKEQKIQEAVELLDRMNLQGLKPDAGLYGKVISGFCAISKFREAANFLDEMILGGITPNRLTWNIHVKTSNEVVRGLCANYPSRAFTLYLSMRSRGISVEVETLESLVKCLCKKGEFQKAVQLVDEIVTDGCIPSKGTWKLLIGHTLDKTIVGEASDTLLRDLDI

SEQ ID NO: 80490 - DNA, 1558 bp, Arabidopsis thaliana
  misc_feature (1)..(1558): Ceres Seq. ID no. 12656148
  misc_feature (1)..(1558): Ortholog of  Ceres SEQ ID NO 14307776 as cited in SEQ ID NO 59397
aagaggaagagagactcaaaacggcaattagcgaaagtgggcgggaggattcttttccggcgactcttttatgtcttctcttcctcttcgctccggtgagaagatggaatcgccttccatctccgacgccgttccacttcacgcaccagaagacgcgaccgcggatttttcccaaccgcaatcgccgttacatgaagttgattcgtttccagttactgaatcctccgatgatgttgttgttaacgtctcggagataccgaatttatctccgtctgatgatgattttgaccacgagcgaaatagcggcgaggatcgcgatcaggatcacggcgagaatccggttgagaccgatggtgttgttgttccaatcgatgagttgaatcagaagatcattagacaggttgaatactactttagtgacgagaatttgcctactgacaaatttcttctgaatgcaatgaagagaaacaaaaaaggctttgttcctatttctaccattgctacgttccacaaaatgaagaagcttactcgagatcatgctttgatagtatcagccttaaaggagtcatcgtttcttgttgttagcgctgatgagaagaaggtgaagcggctgagtcctcttcctgagatcagagatccaaagattttcactgttttggtagaaaatttgccagaggatcattcaaatgagaatattcgagagatatttggtaaagctggaagtattaaaagtgtatccatatgtgatccaaatgctgttgaagaatcagagaagggtgggaagaaggaaaatttcatcagaaccagattacatgcctttgtggagtatgaaacggtggaggcagctgaaaaagcggcagctacattgaataatgagcaagactggagaaatgggttgcgagttaagcttcttgaacaagcagcaggaaagtttgcacagagaagaccagctcggagggaagtcgataaagaaaaggacactacaggcagagttcatgatcaaactggaggagagaaaaacaaaaagacgcgtgaacatcaaaatcaccgtctccatcattctgataatcctgctgatgatgacggtggcaatcatcagaaggataaaaatggaaacaaaggcagagttgtaggacaaggaagacgacagaatcatcaaggcggcaacggcattggacatggaacagcttcatcatcttctcatcctaattatcatcctgttgaggtctcaaagcgtccacctggcccgagaatgcctgatgggacgagagggttcacaatggggcgtggtaaagcgattcctcctcccacatctactcaaaccagtcatgaagtttgatcggttccgcatcttcggttgtatcattgtgtggttttatttcacattaaaaaatgtgaaacttgtatgtaattagaattgagatgttgttttggatttgggtttccttttggcatattcaagtcctccaaatcttcactttggtaattagttttgtgttgtaagttttggtgaatgaaaaaatgatccttttgataaacttataaaataacacttatc

SEQ ID NO: 80491 - protein, 422 aa, Arabidopsis thaliana
  peptide (1)..(422): Ceres Seq. ID no. 12656149
MSSLPLRSGEKMESPSISDAVPLHAPEDATADFSQPQSPLHEVDSFPVTESSDDVVVNVSEIPNLSPSDDDFDHERNSGEDRDQDHGENPVETDGVVVPIDELNQKIIRQVEYYFSDENLPTDKFLLNAMKRNKKGFVPISTIATFHKMKKLTRDHALIVSALKESSFLVVSADEKKVKRLSPLPEIRDPKIFTVLVENLPEDHSNENIREIFGKAGSIKSVSICDPNAVEESEKGGKKENFIRTRLHAFVEYETVEAAEKAAATLNNEQDWRNGLRVKLLEQAAGKFAQRRPARREVDKEKDTTGRVHDQTGGEKNKKTREHQNHRLHHSDNPADDDGGNHQKDKNGNKGRVVGQGRRQNHQGGNGIGHGTASSSSHPNYHPVEVSKRPPGPRMPDGTRGFTMGRGKAIPPPTSTQTSHEV

SEQ ID NO: 80492 - protein, 411 aa, Arabidopsis thaliana
  peptide (1)..(411): Ceres Seq. ID no. 12656150
MESPSISDAVPLHAPEDATADFSQPQSPLHEVDSFPVTESSDDVVVNVSEIPNLSPSDDDFDHERNSGEDRDQDHGENPVETDGVVVPIDELNQKIIRQVEYYFSDENLPTDKFLLNAMKRNKKGFVPISTIATFHKMKKLTRDHALIVSALKESSFLVVSADEKKVKRLSPLPEIRDPKIFTVLVENLPEDHSNENIREIFGKAGSIKSVSICDPNAVEESEKGGKKENFIRTRLHAFVEYETVEAAEKAAATLNNEQDWRNGLRVKLLEQAAGKFAQRRPARREVDKEKDTTGRVHDQTGGEKNKKTREHQNHRLHHSDNPADDDGGNHQKDKNGNKGRVVGQGRRQNHQGGNGIGHGTASSSSHPNYHPVEVSKRPPGPRMPDGTRGFTMGRGKAIPPPTSTQTSHEV

SEQ ID NO: 80493 - protein, 293 aa, Arabidopsis thaliana
  peptide (1)..(293): Ceres Seq. ID no. 12656151
MKRNKKGFVPISTIATFHKMKKLTRDHALIVSALKESSFLVVSADEKKVKRLSPLPEIRDPKIFTVLVENLPEDHSNENIREIFGKAGSIKSVSICDPNAVEESEKGGKKENFIRTRLHAFVEYETVEAAEKAAATLNNEQDWRNGLRVKLLEQAAGKFAQRRPARREVDKEKDTTGRVHDQTGGEKNKKTREHQNHRLHHSDNPADDDGGNHQKDKNGNKGRVVGQGRRQNHQGGNGIGHGTASSSSHPNYHPVEVSKRPPGPRMPDGTRGFTMGRGKAIPPPTSTQTSHEV

SEQ ID NO: 80494 - DNA, 1303 bp, Arabidopsis thaliana
  misc_feature (1)..(1303): Ceres Seq. ID no. 12656167
  misc_feature (1)..(1303): Ortholog of  Ceres SEQ ID NO 15225707 as cited in SEQ ID NO 54212
  misc_feature (1)..(1303): Ortholog of  Ceres SEQ ID NO 14308608 as cited in SEQ ID NO 58855
aaatttagaccgactaaaaaattcattaacgtaaaaaagttcttgtttctttctttcttttcttcttcttcacgctcctctctttgtcattttctttttctttctttttggtttaagttttttctctttgttcttcgtcatgtctcatgaaatcaaagatcttaacaactatcactacacttcatcgtataatcattacaatatcaacaaccaaaatatgattaatctcccttacgtttctggtccatctgcttataatgcaaacatgatctcatcatcacaagtaggttttgatctaccctcgaagaacttgagtcctcaaggagccttcgagttgggtttcgagctttctccatcttcttctgacttttttaatccttccctcgatcaagagaacggtttgtataatgcttataattataatagtagtcaaaagagtcatgaagttgtcggtgatggttgtgcaaccattaagagtgaagttagggtttcagcatctccttcttcaagtgaggccgatcatcatccaggagaagattccggcaagatccggaagaaaagagaagttcgcgatggaggagaagatgatcaacgctctcagaaagtagttaaaacaaagaagaaagaggagaagaaaaaagagccacgagtctcgttcatgactaagaccgaagttgatcatctcgaagacggctatcgttggagaaagtatggccaaaaagcagtcaaaaacagtccttatccgaggagttactatagatgcacgactcagaagtgcaacgtgaagaagagagtggagagatcttaccaagacccaacggtcgtcatcacaacctacgagagtcaacacaaccatccgatcccgaccaatcgtcggacagcaatgttctctggaaccaccgcatctgattataacccatcatcgtctccaatattctccgatctcatcatcaatactccaagaagcttctcaaatgatgatctcttccgtgtgccatacgctagtgtgaacgtgaaccctagttatcatcaacagcaacatggatttcatcaacaggagagtgagttcgagctcttgaaggagatgtttccttcggttttcttcaaacaagagccttgatgatataatataatatagaaacaattttttttctgctaagaaatatagaacaaaacttggatgcataataagtgatgatagtgttatttattttttgcatgtatatattatacatgttttgttaactagctataggatatactgtagtaattaagcataaatatggagtcccttcgacttatt

SEQ ID NO: 80495 - protein, 326 aa, Arabidopsis thaliana
  peptide (1)..(326): Ceres Seq. ID no. 12656168
MSHEIKDLNNYHYTSSYNHYNINNQNMINLPYVSGPSAYNANMISSSQVGFDLPSKNLSPQGAFELGFELSPSSSDFFNPSLDQENGLYNAYNYNSSQKSHEVVGDGCATIKSEVRVSASPSSSEADHHPGEDSGKIRKKREVRDGGEDDQRSQKVVKTKKKEEKKKEPRVSFMTKTEVDHLEDGYRWRKYGQKAVKNSPYPRSYYRCTTQKCNVKKRVERSYQDPTVVITTYESQHNHPIPTNRRTAMFSGTTASDYNPSSSPIFSDLIINTPRSFSNDDLFRVPYASVNVNPSYHQQQHGFHQQESEFELLKEMFPSVFFKQEP

SEQ ID NO: 80496 - protein, 300 aa, Arabidopsis thaliana
  peptide (1)..(300): Ceres Seq. ID no. 12656169
MINLPYVSGPSAYNANMISSSQVGFDLPSKNLSPQGAFELGFELSPSSSDFFNPSLDQENGLYNAYNYNSSQKSHEVVGDGCATIKSEVRVSASPSSSEADHHPGEDSGKIRKKREVRDGGEDDQRSQKVVKTKKKEEKKKEPRVSFMTKTEVDHLEDGYRWRKYGQKAVKNSPYPRSYYRCTTQKCNVKKRVERSYQDPTVVITTYESQHNHPIPTNRRTAMFSGTTASDYNPSSSPIFSDLIINTPRSFSNDDLFRVPYASVNVNPSYHQQQHGFHQQESEFELLKEMFPSVFFKQEP

SEQ ID NO: 80497 - protein, 284 aa, Arabidopsis thaliana
  peptide (1)..(284): Ceres Seq. ID no. 12656170
MISSSQVGFDLPSKNLSPQGAFELGFELSPSSSDFFNPSLDQENGLYNAYNYNSSQKSHEVVGDGCATIKSEVRVSASPSSSEADHHPGEDSGKIRKKREVRDGGEDDQRSQKVVKTKKKEEKKKEPRVSFMTKTEVDHLEDGYRWRKYGQKAVKNSPYPRSYYRCTTQKCNVKKRVERSYQDPTVVITTYESQHNHPIPTNRRTAMFSGTTASDYNPSSSPIFSDLIINTPRSFSNDDLFRVPYASVNVNPSYHQQQHGFHQQESEFELLKEMFPSVFFKQEP

SEQ ID NO: 80498 - DNA, 2094 bp, Arabidopsis thaliana
  misc_feature (1)..(2094): Ceres Seq. ID no. 12656183
  misc_feature (1)..(2094): Ortholog of  Ceres SEQ ID NO 12586556 as cited in SEQ ID NO 64667
  misc_feature (1)..(2094): Ortholog of  Ceres SEQ ID NO 13660894 as cited in SEQ ID NO 67475
atgtggagtcgtgccatttttcaacgattcaggtttcgagctttctctatatctcacgttatccatgggaaatgttacagaagtttctcagttactgtggagtttcagaatcgcgaggttttgatatgtaatcacttgttgagtcgacgaatcgatgaggctcgagaggttttcaatcaggttccatctcctcatgtgagtctttacacaaagatgattacgggatacacgaggagtaatagattggttgatgcgttgaatctgttcgacgaaatgcctgtgagagatgttgtatcatggaattcgatgatcagtggttgtgtggagtgtggtgatatgaatactgcagtgaagctgttcgatgaaatgcctgagagaagcgtggtttcatggacagcgatggtaaatgggtgttttaggtctggtaaggttgatcaagcggagagattgttttatcaaatgcctgtgaaagatactgcagcgtggaattcgatggttcatgggtatttacagtttggtaaagtagacgatgccttgaagttgtttaagcaaatgcctgggaagaatgtgatttcgtggacgacaatgatctgtgggttagaccagaatgagaggagtggagaggctctcgatttgttcaagaacatgttgcgttgttgcataaaatcgacttcaagaccattcacttgcgtaatcaccgcttgcgcgaatgctccagcgtttcatatggggatacaagttcatggcttgatcatcaagttggggtttttatatgaagaatatgtatctgcttcgctcataactttttatgcaaactgcaaaagaataggggattctcggaaggtgtttgacgagaaggttcatgaacaagttgctgtgtggactgctctattgtcaggttatagtctgaacaaaaagcacgaagatgcgttgagtatattctccgggatgttaagaaacagtatcttaccaaatcaatcaacatttgctagcggattaaactcttgctctgctttgggaacattggattggggtaaggagatgcatggagttgctgtgaagcttggtttagaaactgatgcctttgtgggtaattctcttgttgtgatgtacagcgattctggaaacgttaatgatgccgtttcagtgttcataaaaatcttcaagaagagcattgtgtcatggaattccattattgttggctgcgcgcagcatgggcgtggaaagtgggcgtttgtcatatttggtcaaatgatacgcctaaacaaagagccagatgagatcactttcactggcttactctctgcttgtagccattgcgggttcctagagaaaggaagaaagctgttctattacatgtcaagtggaataaatcatatcgatagaaagattcaacactacacttgtatggttgatatcttgggaagatgcggaaaattgaaagaagcagaagaacttatcgagagaatggttgtgaaacctaatgaaatggtttggttggctttacttagtgcttgtaggatgcattctgatgtagacagaggcgagaaagctgctgcagccatttttaatctggactcaaaatcaagcgctgcttatgtcttattgtcaaatatatatgcttctgctggtagatggtcgaatgtatcaaaattgagagttaagatgaagaagaatgggattatgaagaaacccgggagcagttgggttgttattagagggaaaaagcacgaatttttctccggtgatcaaccacattgctcgaggatatatgagaagttggagtttctgagagagaagttgaaggaactgggctatgctcctgattatagatccgctttacatgacgttgaagatgaacagaaagaagagatgttgtggtaccacagtgagaggcttgctattgcttttgggttgattaatacagttgaaggaagtgcagtcacagtgatgaagaatctacgggtttgtgaagattgtcacacagtgattaagttaatctccggagttgtgggacgtgagattgttttaagggatccgattcggtttcatcatttcaagaatgggacgtgttcttgtggggattattggtag

SEQ ID NO: 80499 - protein, 697 aa, Arabidopsis thaliana
  peptide (1)..(697): Ceres Seq. ID no. 12656184
MWSRAIFQRFRFRAFSISHVIHGKCYRSFSVTVEFQNREVLICNHLLSRRIDEAREVFNQVPSPHVSLYTKMITGYTRSNRLVDALNLFDEMPVRDVVSWNSMISGCVECGDMNTAVKLFDEMPERSVVSWTAMVNGCFRSGKVDQAERLFYQMPVKDTAAWNSMVHGYLQFGKVDDALKLFKQMPGKNVISWTTMICGLDQNERSGEALDLFKNMLRCCIKSTSRPFTCVITACANAPAFHMGIQVHGLIIKLGFLYEEYVSASLITFYANCKRIGDSRKVFDEKVHEQVAVWTALLSGYSLNKKHEDALSIFSGMLRNSILPNQSTFASGLNSCSALGTLDWGKEMHGVAVKLGLETDAFVGNSLVVMYSDSGNVNDAVSVFIKIFKKSIVSWNSIIVGCAQHGRGKWAFVIFGQMIRLNKEPDEITFTGLLSACSHCGFLEKGRKLFYYMSSGINHIDRKIQHYTCMVDILGRCGKLKEAEELIERMVVKPNEMVWLALLSACRMHSDVDRGEKAAAAIFNLDSKSSAAYVLLSNIYASAGRWSNVSKLRVKMKKNGIMKKPGSSWVVIRGKKHEFFSGDQPHCSRIYEKLEFLREKLKELGYAPDYRSALHDVEDEQKEEMLWYHSERLAIAFGLINTVEGSAVTVMKNLRVCEDCHTVIKLISGVVGREIVLRDPIRFHHFKNGTCSCGDYW

SEQ ID NO: 80500 - protein, 626 aa, Arabidopsis thaliana
  peptide (1)..(626): Ceres Seq. ID no. 12656185
MITGYTRSNRLVDALNLFDEMPVRDVVSWNSMISGCVECGDMNTAVKLFDEMPERSVVSWTAMVNGCFRSGKVDQAERLFYQMPVKDTAAWNSMVHGYLQFGKVDDALKLFKQMPGKNVISWTTMICGLDQNERSGEALDLFKNMLRCCIKSTSRPFTCVITACANAPAFHMGIQVHGLIIKLGFLYEEYVSASLITFYANCKRIGDSRKVFDEKVHEQVAVWTALLSGYSLNKKHEDALSIFSGMLRNSILPNQSTFASGLNSCSALGTLDWGKEMHGVAVKLGLETDAFVGNSLVVMYSDSGNVNDAVSVFIKIFKKSIVSWNSIIVGCAQHGRGKWAFVIFGQMIRLNKEPDEITFTGLLSACSHCGFLEKGRKLFYYMSSGINHIDRKIQHYTCMVDILGRCGKLKEAEELIERMVVKPNEMVWLALLSACRMHSDVDRGEKAAAAIFNLDSKSSAAYVLLSNIYASAGRWSNVSKLRVKMKKNGIMKKPGSSWVVIRGKKHEFFSGDQPHCSRIYEKLEFLREKLKELGYAPDYRSALHDVEDEQKEEMLWYHSERLAIAFGLINTVEGSAVTVMKNLRVCEDCHTVIKLISGVVGREIVLRDPIRFHHFKNGTCSCGDYW

SEQ ID NO: 80501 - protein, 606 aa, Arabidopsis thaliana
  peptide (1)..(606): Ceres Seq. ID no. 12656186
MPVRDVVSWNSMISGCVECGDMNTAVKLFDEMPERSVVSWTAMVNGCFRSGKVDQAERLFYQMPVKDTAAWNSMVHGYLQFGKVDDALKLFKQMPGKNVISWTTMICGLDQNERSGEALDLFKNMLRCCIKSTSRPFTCVITACANAPAFHMGIQVHGLIIKLGFLYEEYVSASLITFYANCKRIGDSRKVFDEKVHEQVAVWTALLSGYSLNKKHEDALSIFSGMLRNSILPNQSTFASGLNSCSALGTLDWGKEMHGVAVKLGLETDAFVGNSLVVMYSDSGNVNDAVSVFIKIFKKSIVSWNSIIVGCAQHGRGKWAFVIFGQMIRLNKEPDEITFTGLLSACSHCGFLEKGRKLFYYMSSGINHIDRKIQHYTCMVDILGRCGKLKEAEELIERMVVKPNEMVWLALLSACRMHSDVDRGEKAAAAIFNLDSKSSAAYVLLSNIYASAGRWSNVSKLRVKMKKNGIMKKPGSSWVVIRGKKHEFFSGDQPHCSRIYEKLEFLREKLKELGYAPDYRSALHDVEDEQKEEMLWYHSERLAIAFGLINTVEGSAVTVMKNLRVCEDCHTVIKLISGVVGREIVLRDPIRFHHFKNGTCSCGDYW

SEQ ID NO: 80502 - DNA, 3747 bp, Arabidopsis thaliana
  misc_feature (1)..(3747): Ceres Seq. ID no. 12656195
  misc_feature (1)..(3747): Ortholog of  Ceres SEQ ID NO 15176963 as cited in SEQ ID NO 52894
atggcggagaaagcgaagaagaagaaaaatggaggaggaggaaatcagagaatagcgttttacaagcttttcacgtttgcagatcggtacgacatcgttttaatggtcatcgggaccctctccgccatggccaacggcttaactcagccgtttatgtcaatactcatggggcagctcattaacgtttttggtttctctgatcatgatcacgtgtttaaagaagtctccaaggttgctgtgaagtttctttatcttgcagcctacgccggtgttgtgtccttcctgcaggtctcatgctggatggtaactggggagcgtcaatccactagaatccgccgtctatacctaaaaacaattttaagacaagacattggatttttcgatactgagacaaataccggtgaagtcatcggaagaatgtcaggagacaccattcttattcaagattccatgggagaaaaggttgggaaattcacacagctcgtttcgtcattcgttggtggattcacggttgcttttatagttggaatgaaactcacattggctcttcttccgtgcgttcctctgatcgtgggcacaggtggagcaatgacctatatcatgtcaaaaaaggctcaacgtgttcaactggcttacacagaagctggaaacgtagtacaacaagccgttgggtcaattagaacagttgtggctttcactggggagaaacaatcaatgggaaaatatgagaagaagcttgagatagcctacaaatctatggttaaacaagggctatactccggtctaggcattgggataatgatggttgtggtatattgtacttatggttttgcgatttggtacggtgctaggcagataatagagaaaggatatactggaggtcaagtcatgaacgtgattacgtcaatcttgactggaggaatggcgttggggcagacattgccttctcttaactcttttgcggccggaacagctgcagcttacaaaatgtttgagactatcaaaagaaaaccaaagatcgatgcttatgacatgagtggtgaggttttagaagaaattaaaggtgacattgagctaagagacgtgtactttcgatatccggctagacctgacgtgcagatatttgttggattttcgttgactgtaccgaatggcatgaccgtggctttggtgggacagagcggtagcggaaaatcaactgtgatcagtttaattgagaggttctacgatccggaatcaggagaagttttaatagatggaattgacttaaagaaatttcaagtgaaatggatcagaagtaagattggtctcgtaagccaagaacctatactatttgctaccacaattagggagaacattgtttacggcaaaaaagatgcgtccgaccaagaaattagaaccgcacttaagctcgccaacgctagtaacttcatcgacaaacttccgcagggtttggaaacgatggtaggagagcatgggacgcaattatccggtgggcaaaagcagaggattgcgattgcgagggcgattttgaaaaacccaaaaatattgcttcttgatgaagctacaagcgctttggacgcagaatctgaacgcattgttcaagatgctcttgtaaagctaatgttgagcaggaccactgtagtggtggctcaccgacttaccaccattagaaccgctgatatgatcgctgttgtgcagcagggaaaagtcattgagaaaggaactcatgatgagatgattaaagatcccgaaggaacatattcacagctagttcgtctacaagaaggatctaagaaagaagaagcaatagacaaggaaccagaaaagtgtgaaatgagtttggaaatcgaaagttcggatagccaaaatggaatccattccggcactctcacatcaccatctggtttaccgggagtgattagcttggaccagacggaagagttccacgagaatatatcttccaccaaaactcaaacggttaagaaaggcaaggaagtatcattaagaaggcttgctcaccttaacaaaccggagatttcggttttgttgctcggttcattggctgcagtgattcacggtattgtgttccctgttcaaggtttgcttttgtctcgcacaatcaggatattctttgagccttcaaataaactaaagaatgattctcttttctgggctctcatttttgtcgcccttggcttaaccgacctgattgtgattccgttacaaaactacttattcgctatcgctggagcaaaactaatcaaacgtatcagatcgttgtcgtttgatagagtcttgcaccaagatataagttggttcgacgatactaaaaattctagcggtgtgattggagcgaggttgtccacggatgcttctacagtgaagagtatagtaggagatgtgttagggttgatcatgcaaaatatggcgactataattggagcatttattatagcgtttacggctaattggttattagctttaatggcccttttggtggcaccagtaatgttttttcaaggatactaccagatcaagtttataacgggttttggagcaaaagcaagaggaaaatatgaagaggctagccaggttgcgagtgacgcggtgagcagcataagaacagttgcatcgttctgcgcagaggataaagtgatggatttataccaagagaaatgtgacgaaccaaagcaacaaggcttcaaattaggactggtgagtggtttgtgctatggtggctcatacttggctctctatgtcatcgagtccgtatgctttctcggcggttcctggttgattcagaacaggagggcaacgttcggagaattctttcaggttttcttcgcgttaactttgacagccgtaggagtgactcaaactagtactatggcacctgacataaacaaagcaaaagactctgctgcttcgatattcgatatcctcgatagtaaaccgaaaatcgattcgagttccgagaaagggacaatattaccaatcgtccacggcgatatcgagttgcaacatgttagtttccggtatcctatgcgaccggatatacagatttttagtgacttgtgcttaactatctcatctggacagaccgttgcattggttggagaaagcgggagcggtaaatcgacggtgataagcttactagagagattctacgatccggattcaggcaagattcttttagatcaagttgaaattcaatcgttaaaattgagttggttaagggaacaaatgggtttggttagtcaagaaccggttctgttcaatgagacaataggatcaaacatagcatatggtaaaatcggaggagccacagaggaagagattataaccgcggcaaaagcggctaatgtgcataacttcatcagctcattgcctcaaggctacgaaacgtccgttggtgaacgtggagtacaattatccggtggtcaaaaacagaggatcgcgatcgctcgggctattctcaaggatcctaaaattttgttgcttgatgaagcgacaagcgcgttggatgcagagtctgagcgggtggtgcaagatgcgcttgatcaggtgatggtgaacaggaccacggttgtggtggctcacctgctcactaccattaaggacgctgatatgatcgcggttgtgaagaacggtgtgatcgcggagagtgggagacatgaaacgttaatggagatttcaggtggtgcttatgcatcgcttgtagcttttaatatgagtgcaaactga

SEQ ID NO: 80503 - protein, 1248 aa, Arabidopsis thaliana
  peptide (1)..(1248): Ceres Seq. ID no. 12656196
MAEKAKKKKNGGGGNQRIAFYKLFTFADRYDIVLMVIGTLSAMANGLTQPFMSILMGQLINVFGFSDHDHVFKEVSKVAVKFLYLAAYAGVVSFLQVSCWMVTGERQSTRIRRLYLKTILRQDIGFFDTETNTGEVIGRMSGDTILIQDSMGEKVGKFTQLVSSFVGGFTVAFIVGMKLTLALLPCVPLIVGTGGAMTYIMSKKAQRVQLAYTEAGNVVQQAVGSIRTVVAFTGEKQSMGKYEKKLEIAYKSMVKQGLYSGLGIGIMMVVVYCTYGFAIWYGARQIIEKGYTGGQVMNVITSILTGGMALGQTLPSLNSFAAGTAAAYKMFETIKRKPKIDAYDMSGEVLEEIKGDIELRDVYFRYPARPDVQIFVGFSLTVPNGMTVALVGQSGSGKSTVISLIERFYDPESGEVLIDGIDLKKFQVKWIRSKIGLVSQEPILFATTIRENIVYGKKDASDQEIRTALKLANASNFIDKLPQGLETMVGEHGTQLSGGQKQRIAIARAILKNPKILLLDEATSALDAESERIVQDALVKLMLSRTTVVVAHRLTTIRTADMIAVVQQGKVIEKGTHDEMIKDPEGTYSQLVRLQEGSKKEEAIDKEPEKCEMSLEIESSDSQNGIHSGTLTSPSGLPGVISLDQTEEFHENISSTKTQTVKKGKEVSLRRLAHLNKPEISVLLLGSLAAVIHGIVFPVQGLLLSRTIRIFFEPSNKLKNDSLFWALIFVALGLTDLIVIPLQNYLFAIAGAKLIKRIRSLSFDRVLHQDISWFDDTKNSSGVIGARLSTDASTVKSIVGDVLGLIMQNMATIIGAFIIAFTANWLLALMALLVAPVMFFQGYYQIKFITGFGAKARGKYEEASQVASDAVSSIRTVASFCAEDKVMDLYQEKCDEPKQQGFKLGLVSGLCYGGSYLALYVIESVCFLGGSWLIQNRRATFGEFFQVFFALTLTAVGVTQTSTMAPDINKAKDSAASIFDILDSKPKIDSSSEKGTILPIVHGDIELQHVSFRYPMRPDIQIFSDLCLTISSGQTVALVGESGSGKSTVISLLERFYDPDSGKILLDQVEIQSLKLSWLREQMGLVSQEPVLFNETIGSNIAYGKIGGATEEEIITAAKAANVHNFISSLPQGYETSVGERGVQLSGGQKQRIAIARAILKDPKILLLDEATSALDAESERVVQDALDQVMVNRTTVVVAHLLTTIKDADMIAVVKNGVIAESGRHETLMEISGGAYASLVAFNMSAN

SEQ ID NO: 80504 - protein, 1214 aa, Arabidopsis thaliana
  peptide (1)..(1214): Ceres Seq. ID no. 12656197
MVIGTLSAMANGLTQPFMSILMGQLINVFGFSDHDHVFKEVSKVAVKFLYLAAYAGVVSFLQVSCWMVTGERQSTRIRRLYLKTILRQDIGFFDTETNTGEVIGRMSGDTILIQDSMGEKVGKFTQLVSSFVGGFTVAFIVGMKLTLALLPCVPLIVGTGGAMTYIMSKKAQRVQLAYTEAGNVVQQAVGSIRTVVAFTGEKQSMGKYEKKLEIAYKSMVKQGLYSGLGIGIMMVVVYCTYGFAIWYGARQIIEKGYTGGQVMNVITSILTGGMALGQTLPSLNSFAAGTAAAYKMFETIKRKPKIDAYDMSGEVLEEIKGDIELRDVYFRYPARPDVQIFVGFSLTVPNGMTVALVGQSGSGKSTVISLIERFYDPESGEVLIDGIDLKKFQVKWIRSKIGLVSQEPILFATTIRENIVYGKKDASDQEIRTALKLANASNFIDKLPQGLETMVGEHGTQLSGGQKQRIAIARAILKNPKILLLDEATSALDAESERIVQDALVKLMLSRTTVVVAHRLTTIRTADMIAVVQQGKVIEKGTHDEMIKDPEGTYSQLVRLQEGSKKEEAIDKEPEKCEMSLEIESSDSQNGIHSGTLTSPSGLPGVISLDQTEEFHENISSTKTQTVKKGKEVSLRRLAHLNKPEISVLLLGSLAAVIHGIVFPVQGLLLSRTIRIFFEPSNKLKNDSLFWALIFVALGLTDLIVIPLQNYLFAIAGAKLIKRIRSLSFDRVLHQDISWFDDTKNSSGVIGARLSTDASTVKSIVGDVLGLIMQNMATIIGAFIIAFTANWLLALMALLVAPVMFFQGYYQIKFITGFGAKARGKYEEASQVASDAVSSIRTVASFCAEDKVMDLYQEKCDEPKQQGFKLGLVSGLCYGGSYLALYVIESVCFLGGSWLIQNRRATFGEFFQVFFALTLTAVGVTQTSTMAPDINKAKDSAASIFDILDSKPKIDSSSEKGTILPIVHGDIELQHVSFRYPMRPDIQIFSDLCLTISSGQTVALVGESGSGKSTVISLLERFYDPDSGKILLDQVEIQSLKLSWLREQMGLVSQEPVLFNETIGSNIAYGKIGGATEEEIITAAKAANVHNFISSLPQGYETSVGERGVQLSGGQKQRIAIARAILKDPKILLLDEATSALDAESERVVQDALDQVMVNRTTVVVAHLLTTIKDADMIAVVKNGVIAESGRHETLMEISGGAYASLVAFNMSAN

SEQ ID NO: 80505 - protein, 1206 aa, Arabidopsis thaliana
  peptide (1)..(1206): Ceres Seq. ID no. 12656198
MANGLTQPFMSILMGQLINVFGFSDHDHVFKEVSKVAVKFLYLAAYAGVVSFLQVSCWMVTGERQSTRIRRLYLKTILRQDIGFFDTETNTGEVIGRMSGDTILIQDSMGEKVGKFTQLVSSFVGGFTVAFIVGMKLTLALLPCVPLIVGTGGAMTYIMSKKAQRVQLAYTEAGNVVQQAVGSIRTVVAFTGEKQSMGKYEKKLEIAYKSMVKQGLYSGLGIGIMMVVVYCTYGFAIWYGARQIIEKGYTGGQVMNVITSILTGGMALGQTLPSLNSFAAGTAAAYKMFETIKRKPKIDAYDMSGEVLEEIKGDIELRDVYFRYPARPDVQIFVGFSLTVPNGMTVALVGQSGSGKSTVISLIERFYDPESGEVLIDGIDLKKFQVKWIRSKIGLVSQEPILFATTIRENIVYGKKDASDQEIRTALKLANASNFIDKLPQGLETMVGEHGTQLSGGQKQRIAIARAILKNPKILLLDEATSALDAESERIVQDALVKLMLSRTTVVVAHRLTTIRTADMIAVVQQGKVIEKGTHDEMIKDPEGTYSQLVRLQEGSKKEEAIDKEPEKCEMSLEIESSDSQNGIHSGTLTSPSGLPGVISLDQTEEFHENISSTKTQTVKKGKEVSLRRLAHLNKPEISVLLLGSLAAVIHGIVFPVQGLLLSRTIRIFFEPSNKLKNDSLFWALIFVALGLTDLIVIPLQNYLFAIAGAKLIKRIRSLSFDRVLHQDISWFDDTKNSSGVIGARLSTDASTVKSIVGDVLGLIMQNMATIIGAFIIAFTANWLLALMALLVAPVMFFQGYYQIKFITGFGAKARGKYEEASQVASDAVSSIRTVASFCAEDKVMDLYQEKCDEPKQQGFKLGLVSGLCYGGSYLALYVIESVCFLGGSWLIQNRRATFGEFFQVFFALTLTAVGVTQTSTMAPDINKAKDSAASIFDILDSKPKIDSSSEKGTILPIVHGDIELQHVSFRYPMRPDIQIFSDLCLTISSGQTVALVGESGSGKSTVISLLERFYDPDSGKILLDQVEIQSLKLSWLREQMGLVSQEPVLFNETIGSNIAYGKIGGATEEEIITAAKAANVHNFISSLPQGYETSVGERGVQLSGGQKQRIAIARAILKDPKILLLDEATSALDAESERVVQDALDQVMVNRTTVVVAHLLTTIKDADMIAVVKNGVIAESGRHETLMEISGGAYASLVAFNMSAN

SEQ ID NO: 80506 - DNA, 1521 bp, Arabidopsis thaliana
  misc_feature (1)..(1521): Ceres Seq. ID no. 12656199
  misc_feature (1)..(1521): Ortholog of  Ceres SEQ ID NO 15169439 as cited in SEQ ID NO 55062
atgtttgcttacaggtttttatttgttcttgtaagaatggttgcgatacccaatattaagataaagtttggtcctcaaggttctgtcagaacattccaaacgttgtctgatagttcgaagaaaattgagcatgtagtgactgaagatttatctcaatcctcggagaaatcaaagaagcgtggtgggcctaaagagctagatgaagttcaacctaagaagaagcagaggctggattgtgattggtctagtcaatgtttggcattgttacgttttttgatggagcaccgtggtggatggctctttaaggagcctgttgatcctgttaaaatggagattcctgattacttcaatgtcatacaaaagccaatggatttaggcactgtcaaatcgaaacttttgaagaatgtctacagtaatgctgatgagtttgcagcggatgttcggttaacttttgccaatgcgatgcattataatcctctgtggaatgaggttcacacgattgcaaaggagattaatgagatttttgaggttagatgggaatcactcatgaagaaaaaggttttgaggttatcctggaatgaagttagagaaggttataagagacagccagttgaacgtgattgttctagacggagcagcactggaacatcagcttcctctggggtgggattgacgaaaccagctaaagagaactccgaaaagggttctctttcgtccaagccagtgaaagtgcagagcaaaaagaatactcctgctgtgacgcctaaagcattagcaacctgtaaatgtggtaggataatttgcatatgcctcaagtcctgtagctcatttggaagtgacgtttgttcgttaacggattgtcaattaaagaacatttcaggtgcacaagcgagcgagttagatcctcaatctaatgggtctgacacttcaaagaaggagagaaatggtagtctcaagtctcagcttgataaaccttcaaacagtgatctgttgggtaatgagttgaaaacggcttttcctgctctgccgccggtacctcctgagaaagctcttcgtgctgcaatactcaaagctcaatatgcaggaaccatcataaaagctaaacacagaatagtccttggccagaataacaaagctgatctgattagaatacagatagaaaaggaacagatggaaagagcacaacgtgaagagaaagctagaattgaagccgagatgagagctgctaaggttgctgaacgaatgagggcacaagacgagttgaaacagaaacgtgagagtcaacggcttgaaatagcaaagatgaaaaaaggcttcgattttgaacggaacaaccactcgaaattgaagaaaaaattcgttaaagtctgtggctgctttagtctgacaaaagctcggttgttacttgaagagttgggtctggttttgaaaaatgattattgtccggaactggaagtgatcgggtcagaaaaatttgatgcaatgagaatggacgatcttgaggaaggagagatcctttag

SEQ ID NO: 80507 - protein, 506 aa, Arabidopsis thaliana
  peptide (1)..(506): Ceres Seq. ID no. 12656200
MFAYRFLFVLVRMVAIPNIKIKFGPQGSVRTFQTLSDSSKKIEHVVTEDLSQSSEKSKKRGGPKELDEVQPKKKQRLDCDWSSQCLALLRFLMEHRGGWLFKEPVDPVKMEIPDYFNVIQKPMDLGTVKSKLLKNVYSNADEFAADVRLTFANAMHYNPLWNEVHTIAKEINEIFEVRWESLMKKKVLRLSWNEVREGYKRQPVERDCSRRSSTGTSASSGVGLTKPAKENSEKGSLSSKPVKVQSKKNTPAVTPKALATCKCGRIICICLKSCSSFGSDVCSLTDCQLKNISGAQASELDPQSNGSDTSKKERNGSLKSQLDKPSNSDLLGNELKTAFPALPPVPPEKALRAAILKAQYAGTIIKAKHRIVLGQNNKADLIRIQIEKEQMERAQREEKARIEAEMRAAKVAERMRAQDELKQKRESQRLEIAKMKKGFDFERNNHSKLKKKFVKVCGCFSLTKARLLLEELGLVLKNDYCPELEVIGSEKFDAMRMDDLEEGEIL

SEQ ID NO: 80508 - protein, 494 aa, Arabidopsis thaliana; identical to SEQ ID NO: 79182
  peptide (1)..(494): Ceres Seq. ID no. 12656201

SEQ ID NO: 80509 - protein, 414 aa, Arabidopsis thaliana; identical to SEQ ID NO: 79183
  peptide (1)..(414): Ceres Seq. ID no. 12656202

SEQ ID NO: 80510 - DNA, 879 bp, Arabidopsis thaliana
  misc_feature (1)..(879): Ceres Seq. ID no. 12656206
  misc_feature (1)..(879): Ortholog of  Ceres SEQ ID NO 13582619 as cited in SEQ ID NO 56520
  misc_feature (1)..(879): Ortholog of  Ceres SEQ ID NO 12611392 as cited in SEQ ID NO 56826
  misc_feature (1)..(879): Ortholog of  Ceres SEQ ID NO 13660872 as cited in SEQ ID NO 60830
  misc_feature (1)..(879): Ortholog of  Ceres SEQ ID NO 12616221 as cited in SEQ ID NO 63291
atgggaagttcatgtttacctccagggttccggtttcatcctacggatgaagaactcatcgaatattacttgaaaagaaaagtcgaaggtctcgagattgagcttgaagtcattcccgtcatcgatctttatagtttcgatccttgggagttaccagacaagtcgtttctcccaaaccgggacatggaatggtacttcttctgctcaagggacaaaaaatatcctaatggttttcgtacaaatcgaggaacaaaggctggttattggaaagcaaccggaaaagatcgaaaaattacttctcgttcatcttctataattggttatagaaaaactctagttttctacaaaggccgtgccccgttaggcgatagaagcaattggatcatgcatgaatatcgactatgcgatgatgatacatcacaaggatcacaaaatttaaagggagcttttgtgttatgtcgtgttgctatgaagaatgagatcaaaactaatacgaaaatccgaaaaattccaagcgagcaaacaatcggatcaggagaaagctcgggtttatcaagccgagtaacgtctcctagtcgcgatgaaacaatgccgtttcactcatttgccaatcctgtatctactgaaactgattcttccaacatttggatttcacctgaattcatcctcgattcttcaaaggactatcctcaaatccaagatgtcgcatctcagtgcttccaacaagactttgattttccgatcatcggtaaccaaaacatggagtttccagcgagtacaagcttagatcagaacatggatgagtttatgcaaaacggttattggacaaattatggatacgatcaaaccggtttattcggttactcagatttctcctag

SEQ ID NO: 80511 - protein, 292 aa, Arabidopsis thaliana
  peptide (1)..(292): Ceres Seq. ID no. 12656207
MGSSCLPPGFRFHPTDEELIEYYLKRKVEGLEIELEVIPVIDLYSFDPWELPDKSFLPNRDMEWYFFCSRDKKYPNGFRTNRGTKAGYWKATGKDRKITSRSSSIIGYRKTLVFYKGRAPLGDRSNWIMHEYRLCDDDTSQGSQNLKGAFVLCRVAMKNEIKTNTKIRKIPSEQTIGSGESSGLSSRVTSPSRDETMPFHSFANPVSTETDSSNIWISPEFILDSSKDYPQIQDVASQCFQQDFDFPIIGNQNMEFPASTSLDQNMDEFMQNGYWTNYGYDQTGLFGYSDFS

SEQ ID NO: 80512 - protein, 231 aa, Arabidopsis thaliana
  peptide (1)..(231): Ceres Seq. ID no. 12656208
MEWYFFCSRDKKYPNGFRTNRGTKAGYWKATGKDRKITSRSSSIIGYRKTLVFYKGRAPLGDRSNWIMHEYRLCDDDTSQGSQNLKGAFVLCRVAMKNEIKTNTKIRKIPSEQTIGSGESSGLSSRVTSPSRDETMPFHSFANPVSTETDSSNIWISPEFILDSSKDYPQIQDVASQCFQQDFDFPIIGNQNMEFPASTSLDQNMDEFMQNGYWTNYGYDQTGLFGYSDFS

SEQ ID NO: 80513 - protein, 164 aa, Arabidopsis thaliana
  peptide (1)..(164): Ceres Seq. ID no. 12656209
MHEYRLCDDDTSQGSQNLKGAFVLCRVAMKNEIKTNTKIRKIPSEQTIGSGESSGLSSRVTSPSRDETMPFHSFANPVSTETDSSNIWISPEFILDSSKDYPQIQDVASQCFQQDFDFPIIGNQNMEFPASTSLDQNMDEFMQNGYWTNYGYDQTGLFGYSDFS

SEQ ID NO: 80514 - DNA, 812 bp, Arabidopsis thaliana
  misc_feature (1)..(812): Ceres Seq. ID no. 12656224
  misc_feature (1)..(812): Ortholog of  Ceres SEQ ID NO 13599448 as cited in SEQ ID NO 521
  misc_feature (1)..(812): Ortholog of  Ceres SEQ ID NO 14311918 as cited in SEQ ID NO 51684
  misc_feature (1)..(812): Ortholog of  Ceres SEQ ID NO 13596408 as cited in SEQ ID NO 62028
aaacaatatcaatggcgaattcagagtcctcctcctcaccagtaaacgaagaagagaacagccagagaatctcaacactccatcaccaaaccatgccttccgatttaactcaagacgaattcacccaactctcccaatcaatcgccgagttccacacgtaccaactcggtaacggccgttgctcatctctcctagctcagcgaatccacgcgccgccggaaacagtatggtccgtggtgagacgtttcgataggccacagatttacaaacacttcatcaaaagctgtaacgtgagtgaagatttcgagatgcgagtgggatgcacgcgcgacgtgaacgtgataagtggattaccggcgaatacgtctcgagagagattagatctgttggacgatgatcggagagtgactgggtttagtataaccggtggtgaacataggctgaggaattataaatcggttacgacggttcatagatttgagaaagaagaagaagaagaaaggatctggaccgttgttttggaatcttatgttgttgatgtaccggaaggtaattcggaggaagatacgagattgtttgctgatacggttattagattgaatcttcagaaacttgcttcgatcactgaagctatgaaccggaacaacaacaacaacaactcttctcaggttaggtaatgatgaaatttgggggaaagaaaaatgtttctaaattgggggagttttaatttttattttgatttgtaaaacgttttttttcttctcttgaattgtaatttccttgtttgattttatggttatgttttatttttt

SEQ ID NO: 80515 - protein, 224 aa, Arabidopsis thaliana
  peptide (1)..(224): Ceres Seq. ID no. 12656225
TISMANSESSSSPVNEEENSQRISTLHHQTMPSDLTQDEFTQLSQSIAEFHTYQLGNGRCSSLLAQRIHAPPETVWSVVRRFDRPQIYKHFIKSCNVSEDFEMRVGCTRDVNVISGLPANTSRERLDLLDDDRRVTGFSITGGEHRLRNYKSVTTVHRFEKEEEEERIWTVVLESYVVDVPEGNSEEDTRLFADTVIRLNLQKLASITEAMNRNNNNNNSSQVR

SEQ ID NO: 80516 - protein, 221 aa, Arabidopsis thaliana
  peptide (1)..(221): Ceres Seq. ID no. 12656226
MANSESSSSPVNEEENSQRISTLHHQTMPSDLTQDEFTQLSQSIAEFHTYQLGNGRCSSLLAQRIHAPPETVWSVVRRFDRPQIYKHFIKSCNVSEDFEMRVGCTRDVNVISGLPANTSRERLDLLDDDRRVTGFSITGGEHRLRNYKSVTTVHRFEKEEEEERIWTVVLESYVVDVPEGNSEEDTRLFADTVIRLNLQKLASITEAMNRNNNNNNSSQVR

SEQ ID NO: 80517 - protein, 194 aa, Arabidopsis thaliana
  peptide (1)..(194): Ceres Seq. ID no. 12656227
MPSDLTQDEFTQLSQSIAEFHTYQLGNGRCSSLLAQRIHAPPETVWSVVRRFDRPQIYKHFIKSCNVSEDFEMRVGCTRDVNVISGLPANTSRERLDLLDDDRRVTGFSITGGEHRLRNYKSVTTVHRFEKEEEEERIWTVVLESYVVDVPEGNSEEDTRLFADTVIRLNLQKLASITEAMNRNNNNNNSSQVR

SEQ ID NO: 80518 - DNA, 882 bp, Arabidopsis thaliana
  misc_feature (1)..(882): Ceres Seq. ID no. 12656236
  misc_feature (1)..(882): Ortholog of  Ceres SEQ ID NO 13654728 as cited in SEQ ID NO 62302
  misc_feature (1)..(882): Ortholog of  Ceres SEQ ID NO 13597134 as cited in SEQ ID NO 64501
  misc_feature (1)..(882): Ortholog of  Ceres SEQ ID NO 15174333 as cited in SEQ ID NO 0
  misc_feature (1)..(882): Ortholog of  Ceres SEQ ID NO 15179047 as cited in SEQ ID NO 0
atggtaactgtcaaagttagcaacgtttctcttgaagcaacagaaagagatctcaaggagttcttctctttttccggcgatattgcttacctcgagactcaaagcgagaatgatggttctaaattagcatatgtcacattcaaggatttacaaggagctgaaaccgcagttctcctcaccggatcgacgattgttgattcatcggtcacagttacaatgtcaccagattaccaactacctcctgatgctttagcttccattgaatcattgaaagagagcaataaatcatcatctcctacgcgagaagatgtatcggtatttagaaaagctgaagatgttgtaagtggtatgatttcaaaagggtttgttttaggtaaagacgctatagctaaagcgaagagtcttgatgagaagcatcagttgacatcaacagcttcagctagagttacatctttcgacaaaagaatcggattcacggagaaaatcaacaccgggactacagttgtgagcgaaaaagttaaagaagttgatcagaagtttcaagtcacagagaaaacaaaatcagcaatagctgctgctgagcagacagtgagcaatgctggttctgctataatgaaaaaccggtatgttttaaccggtgccacgtgggttacgggtgcgtttaacagagtgagtaaagctgctgaagaagttggacaaaaggcgaaagagaaagttggtttggctgaggaagaagaagaagagaagaagaaagtggttgatgaagttgctatagttcatctgactgaatcaccaaaggctttagaccaatcagaacaagattcaaaactccctgaatcaaaatcacagccacacaaggagcttaacgcaagtgttgtttga

SEQ ID NO: 80519 - protein, 293 aa, Arabidopsis thaliana; identical to SEQ ID NO: 36717
  peptide (1)..(293): Ceres Seq. ID no. 12656237

SEQ ID NO: 80520 - protein, 221 aa, Arabidopsis thaliana; identical to SEQ ID NO: 36718
  peptide (1)..(221): Ceres Seq. ID no. 12656238

SEQ ID NO: 80521 - protein, 177 aa, Arabidopsis thaliana
  peptide (1)..(177): Ceres Seq. ID no. 12656239
MISKGFVLGKDAIAKAKSLDEKHQLTSTASARVTSFDKRIGFTEKINTGTTVVSEKVKEVDQKFQVTEKTKSAIAAAEQTVSNAGSAIMKNRYVLTGATWVTGAFNRVSKAAEEVGQKAKEKVGLAEEEEEEKKKVVDEVAIVHLTESPKALDQSEQDSKLPESKSQPHKELNASVV

SEQ ID NO: 80522 - DNA, 1731 bp, Arabidopsis thaliana
  misc_feature (1)..(1731): Ceres Seq. ID no. 12656315
  misc_feature (1)..(1731): Ortholog of  Ceres SEQ ID NO 13660894 as cited in SEQ ID NO 67475
atgctaagaactgtgtcaaatgcttttaccacaaggagccatgttggttccactgcgtcttcgaactcatggagcaccatcgttcctgctctggctcgtttcggttccatcggcgtattacgcgctgccgttgaattgatcaatgacggcgaaaagccagatgcttctccacttgttcacttgctccgtgtctctggcaattatggctacgtttctttgtgtcgacagcttcacggttacgtcacaaaacatgggtttgtctcaaatacgcgtctttctaattcgctgatgaggttttacaagacaagtgactcattagaagatgctcacaaagtgtttgatgaaatgcctgacccagatgtcatatcgtggaactcattggtttctggttatgttcaatcgggaaggttccaggaaggaatttgtttgtttcttgagcttcatagatctgatgtcttccctaacgaattctctttcacagccgctttagctgcttgtgcacgattgcatctctcgcctctcggagcttgcatccactccaagcttgtgaaactaggcttagagaaaggcaatgttgttgtgggtaattgtctaattgacatgtacgggaaatgtggttttatggatgatgctgttttggtattccaacacatggaagaaaaggacacagtttcttggaatgcaattgttgcttcctgctcaaggaacggtaagctcgagctgggactttggtttttccaccaaatgccaaatccagacactgtaacatacaacgagctcatcgatgctttcgtcaagtccggggatttcaataatgcctttcaggttctatcggatatgccgaatcctaattcatcttcatggaacacaatattgaccggttatgtcaacagtgagaaatcaggggaagctactgagtttttcaccaaaatgcattcgtcaggtgtcagattcgatgagtacagtctgtcaatagttctggccgccgttgctgctctcgctgtggttccatgggggagtctcatccatgcttgtgctcataagcttggcctagactctcgagttgttgtcgcgagtgctctgatagatatgtattccaaatgcggaatgttgaagcacgctgagctgatgttttggacaatgcctagaaagaatctgattgtgtggaacgagatgatctctggatatgcccgtaatggcgattcaatcgaggcgatcaagctctttaaccaactgaaacaagaaaggttcctgaaacctgatcgattcacgttcttgaatctcttagctgtgtgttctcattgtgaagttccaatggaagtcatgcttggatactttgagatgatgatcaacgagtatagaatcaaaccaagcgtagagcattgctgttctcttatcagagctatggggcagagaggagaggtttggcaggcaaaacaggttattcaagaattcggttttgggtatgatggtgtggcttggagggcgttacttggtgcttgcagtgctcgcaaggatctgaaagctgcgaaaaccgttgccgctaagatgattgaattaggggatgctgataaagatgagtatttatacatagtgatgtcgaatctctatgcttaccatgagagatggagagaagttggtcaaattaggaagataatgagagaaagtggggtactgaaagaagtcgggtctagctggattgattcaagaacaaaatgtagtagctattaa

SEQ ID NO: 80523 - protein, 576 aa, Arabidopsis thaliana
  peptide (1)..(576): Ceres Seq. ID no. 12656316
MLRTVSNAFTTRSHVGSTASSNSWSTIVPALARFGSIGVLRAAVELINDGEKPDASPLVHLLRVSGNYGYVSLCRQLHGYVTKHGFVSNTRLSNSLMRFYKTSDSLEDAHKVFDEMPDPDVISWNSLVSGYVQSGRFQEGICLFLELHRSDVFPNEFSFTAALAACARLHLSPLGACIHSKLVKLGLEKGNVVVGNCLIDMYGKCGFMDDAVLVFQHMEEKDTVSWNAIVASCSRNGKLELGLWFFHQMPNPDTVTYNELIDAFVKSGDFNNAFQVLSDMPNPNSSSWNTILTGYVNSEKSGEATEFFTKMHSSGVRFDEYSLSIVLAAVAALAVVPWGSLIHACAHKLGLDSRVVVASALIDMYSKCGMLKHAELMFWTMPRKNLIVWNEMISGYARNGDSIEAIKLFNQLKQERFLKPDRFTFLNLLAVCSHCEVPMEVMLGYFEMMINEYRIKPSVEHCCSLIRAMGQRGEVWQAKQVIQEFGFGYDGVAWRALLGACSARKDLKAAKTVAAKMIELGDADKDEYLYIVMSNLYAYHERWREVGQIRKIMRESGVLKEVGSSWIDSRTKCSSY

SEQ ID NO: 80524 - protein, 480 aa, Arabidopsis thaliana
  peptide (1)..(480): Ceres Seq. ID no. 12656317
MRFYKTSDSLEDAHKVFDEMPDPDVISWNSLVSGYVQSGRFQEGICLFLELHRSDVFPNEFSFTAALAACARLHLSPLGACIHSKLVKLGLEKGNVVVGNCLIDMYGKCGFMDDAVLVFQHMEEKDTVSWNAIVASCSRNGKLELGLWFFHQMPNPDTVTYNELIDAFVKSGDFNNAFQVLSDMPNPNSSSWNTILTGYVNSEKSGEATEFFTKMHSSGVRFDEYSLSIVLAAVAALAVVPWGSLIHACAHKLGLDSRVVVASALIDMYSKCGMLKHAELMFWTMPRKNLIVWNEMISGYARNGDSIEAIKLFNQLKQERFLKPDRFTFLNLLAVCSHCEVPMEVMLGYFEMMINEYRIKPSVEHCCSLIRAMGQRGEVWQAKQVIQEFGFGYDGVAWRALLGACSARKDLKAAKTVAAKMIELGDADKDEYLYIVMSNLYAYHERWREVGQIRKIMRESGVLKEVGSSWIDSRTKCSSY

SEQ ID NO: 80525 - protein, 461 aa, Arabidopsis thaliana
  peptide (1)..(461): Ceres Seq. ID no. 12656318
MPDPDVISWNSLVSGYVQSGRFQEGICLFLELHRSDVFPNEFSFTAALAACARLHLSPLGACIHSKLVKLGLEKGNVVVGNCLIDMYGKCGFMDDAVLVFQHMEEKDTVSWNAIVASCSRNGKLELGLWFFHQMPNPDTVTYNELIDAFVKSGDFNNAFQVLSDMPNPNSSSWNTILTGYVNSEKSGEATEFFTKMHSSGVRFDEYSLSIVLAAVAALAVVPWGSLIHACAHKLGLDSRVVVASALIDMYSKCGMLKHAELMFWTMPRKNLIVWNEMISGYARNGDSIEAIKLFNQLKQERFLKPDRFTFLNLLAVCSHCEVPMEVMLGYFEMMINEYRIKPSVEHCCSLIRAMGQRGEVWQAKQVIQEFGFGYDGVAWRALLGACSARKDLKAAKTVAAKMIELGDADKDEYLYIVMSNLYAYHERWREVGQIRKIMRESGVLKEVGSSWIDSRTKCSSY

SEQ ID NO: 80526 - DNA, 1188 bp, Arabidopsis thaliana
  misc_feature (1)..(1188): Ceres Seq. ID no. 12656319
  misc_feature (1)..(1188): Ortholog of  Ceres SEQ ID NO 14316017 as cited in SEQ ID NO 67028
  misc_feature (1)..(1188): Ortholog of  Ceres SEQ ID NO 15177500 as cited in SEQ ID NO 0
atggccatatcctcaaatcttctcctttgtctctctcttttcattttcatcatcaccaaatccgccttggctcagaaatgttccaactacaaattctccaccaaccgtctctttgagtcttgcaacgacctacctgttcttgattccttcctccactacacttacgattcttcttcaggcaatctccaaatcgcgtatcgccacacaaagctcacccccgggaaatgggtggcatgggccgtgaatcccacatctactggcatggtcggagctcaagccattgtggcttatccacaatcagacggcaccgttagggcttatacgtcacccatcagtagctaccaaacgagtctcctagaagctgagctgagtttcaacgtctctcagttgtctgccacttaccaaaacaacgagatggtcatctacgcaattctgaatcttccacttgcgaatggtggaatcattaacactgtgtggcaagatgggtcactgtcagggaacaatcctctgcctcatccaacttctggcaacaatgttcgttctgtttctactcttaaccttgtctctggtgcatctggatccacctctaccggagcaggaggagcttccaagctacgcaaacgcaacatacatggaatattgaacggtgtgagctggggtataatgatgccaataggagcaatcattgctcgctacttgaaagtctcaaaatcagcagatcctgcttggttctaccttcatgttttctgccagtcttctgcttacatcattggtgttgccggttgggcgaccggtctcaaactgggcaacgaatcagccgggattcagtttacctttcaccgtgctgttgggatcgctctcttctgcctcgcaacaattcaggtgtttgcaatgtttttgagacccaaaccagagcacaagtacagagtctactggaacatttatcaccacactgtaggctattcagtgatcattcttgcggtggtaaacgtttttaaaggactagacatcctgagccctgagaagcagtggagaaacgcttacaccgccataatcgtagtactaggtatagtcgcggttgtgctcgaagggtttacttggtatgtagtcataaagagagggaaagcagaggcatctgcgaaaacaagtcaacgagtaggcaacgatggtcggtctctatacgtgtag

SEQ ID NO: 80527 - protein, 395 aa, Arabidopsis thaliana
  peptide (1)..(395): Ceres Seq. ID no. 12656320
MAISSNLLLCLSLFIFIITKSALAQKCSNYKFSTNRLFESCNDLPVLDSFLHYTYDSSSGNLQIAYRHTKLTPGKWVAWAVNPTSTGMVGAQAIVAYPQSDGTVRAYTSPISSYQTSLLEAELSFNVSQLSATYQNNEMVIYAILNLPLANGGIINTVWQDGSLSGNNPLPHPTSGNNVRSVSTLNLVSGASGSTSTGAGGASKLRKRNIHGILNGVSWGIMMPIGAIIARYLKVSKSADPAWFYLHVFCQSSAYIIGVAGWATGLKLGNESAGIQFTFHRAVGIALFCLATIQVFAMFLRPKPEHKYRVYWNIYHHTVGYSVIILAVVNVFKGLDILSPEKQWRNAYTAIIVVLGIVAVVLEGFTWYVVIKRGKAEASAKTSQRVGNDGRSLYV

SEQ ID NO: 80528 - protein, 308 aa, Arabidopsis thaliana
  peptide (1)..(308): Ceres Seq. ID no. 12656321
MVGAQAIVAYPQSDGTVRAYTSPISSYQTSLLEAELSFNVSQLSATYQNNEMVIYAILNLPLANGGIINTVWQDGSLSGNNPLPHPTSGNNVRSVSTLNLVSGASGSTSTGAGGASKLRKRNIHGILNGVSWGIMMPIGAIIARYLKVSKSADPAWFYLHVFCQSSAYIIGVAGWATGLKLGNESAGIQFTFHRAVGIALFCLATIQVFAMFLRPKPEHKYRVYWNIYHHTVGYSVIILAVVNVFKGLDILSPEKQWRNAYTAIIVVLGIVAVVLEGFTWYVVIKRGKAEASAKTSQRVGNDGRSLYV

SEQ ID NO: 80529 - protein, 257 aa, Arabidopsis thaliana
  peptide (1)..(257): Ceres Seq. ID no. 12656322
MVIYAILNLPLANGGIINTVWQDGSLSGNNPLPHPTSGNNVRSVSTLNLVSGASGSTSTGAGGASKLRKRNIHGILNGVSWGIMMPIGAIIARYLKVSKSADPAWFYLHVFCQSSAYIIGVAGWATGLKLGNESAGIQFTFHRAVGIALFCLATIQVFAMFLRPKPEHKYRVYWNIYHHTVGYSVIILAVVNVFKGLDILSPEKQWRNAYTAIIVVLGIVAVVLEGFTWYVVIKRGKAEASAKTSQRVGNDGRSLYV

SEQ ID NO: 80530 - DNA, 995 bp, Arabidopsis thaliana
  misc_feature (1)..(995): Ceres Seq. ID no. 12656330
  misc_feature (1)..(995): Ortholog of  Ceres SEQ ID NO 15171943 as cited in SEQ ID NO 54306
  misc_feature (1)..(995): Ortholog of  Ceres SEQ ID NO 13655812 as cited in SEQ ID NO 64743
  misc_feature (1)..(995): Ortholog of  Ceres SEQ ID NO 15178828 as cited in SEQ ID NO 0
tttcactcatcatacgttgtagaaagggaaccgcaaagtgaaaaaacagttgctccaccacgaggaacagatccatgtctgcttctagttcctccacaaatcccatgtcccgtgaggacgcaacaacactgcttccgtctgttcaagacaagtacggtggcgtgatgaccgagatgactcatcccatggatccttctctcttctccacacttctccgatcctctctatctacctggactcttcagggcaaaaagggagtgtggatcaagttgccaaagcagcttattggtcttgctgaaactgctgttaaggagggattctggtttcaccacgcggagaaagactacttgatgcttgtctattggattcccaaagaagacgatacgcttcctgccaatgcatctcaccgtgttggcataggtgcctttgtcattaaccacaacaaagaggtgctggtggttcaagagaagacagggagatttcaaggtcaaggtatctggaagttccccaccggagttgtgaatgagggtgaagacattcatgatggctcagtcagagaggtgaaagaagagaccggagtggatacagaattcgaccaaatattggccttcagacaaacacacaaagcgttctttggaaagtcagatttgttcttcgtgtgcatgttaaagcccctttctttggagatcaacgcacaggagtcagagattgaggcagctcagtggatgccttgggaggaatacataaatcaaccatttgtacaaaattatgagctattgaggtatatgacagacatttgctctgctaaaaccaacggagactacgaaggcttcactcctctccgcgtctctgcacctgatcaacaaggcaacttgtactacaacacccgcgacttacattcgcgcaattgaccttctttctcaacaaacagagctttcctcacagattctaacgaagctggtttctttgctgcctctctatgtaagcattttgac

SEQ ID NO: 80531 - protein, 278 aa, Arabidopsis thaliana
  peptide (1)..(278): Ceres Seq. ID no. 12656331
MSASSSSTNPMSREDATTLLPSVQDKYGGVMTEMTHPMDPSLFSTLLRSSLSTWTLQGKKGVWIKLPKQLIGLAETAVKEGFWFHHAEKDYLMLVYWIPKEDDTLPANASHRVGIGAFVINHNKEVLVVQEKTGRFQGQGIWKFPTGVVNEGEDIHDGSVREVKEETGVDTEFDQILAFRQTHKAFFGKSDLFFVCMLKPLSLEINAQESEIEAAQWMPWEEYINQPFVQNYELLRYMTDICSAKTNGDYEGFTPLRVSAPDQQGNLYYNTRDLHSRN

SEQ ID NO: 80532 - protein, 268 aa, Arabidopsis thaliana
  peptide (1)..(268): Ceres Seq. ID no. 12656332
MSREDATTLLPSVQDKYGGVMTEMTHPMDPSLFSTLLRSSLSTWTLQGKKGVWIKLPKQLIGLAETAVKEGFWFHHAEKDYLMLVYWIPKEDDTLPANASHRVGIGAFVINHNKEVLVVQEKTGRFQGQGIWKFPTGVVNEGEDIHDGSVREVKEETGVDTEFDQILAFRQTHKAFFGKSDLFFVCMLKPLSLEINAQESEIEAAQWMPWEEYINQPFVQNYELLRYMTDICSAKTNGDYEGFTPLRVSAPDQQGNLYYNTRDLHSRN

SEQ ID NO: 80533 - protein, 248 aa, Arabidopsis thaliana
  peptide (1)..(248): Ceres Seq. ID no. 12656333
MTEMTHPMDPSLFSTLLRSSLSTWTLQGKKGVWIKLPKQLIGLAETAVKEGFWFHHAEKDYLMLVYWIPKEDDTLPANASHRVGIGAFVINHNKEVLVVQEKTGRFQGQGIWKFPTGVVNEGEDIHDGSVREVKEETGVDTEFDQILAFRQTHKAFFGKSDLFFVCMLKPLSLEINAQESEIEAAQWMPWEEYINQPFVQNYELLRYMTDICSAKTNGDYEGFTPLRVSAPDQQGNLYYNTRDLHSRN

SEQ ID NO: 80534 - DNA, 1764 bp, Arabidopsis thaliana
  misc_feature (1)..(1764): Ceres Seq. ID no. 12656346
  misc_feature (1)..(1764): Ortholog of  Ceres SEQ ID NO 14313373 as cited in SEQ ID NO 67312
atacagtaaagaatataataagttgtcgaaggcttgagcgttgttccttcttcttcaggtttttgttctattgttaagatgggagacaaaaacgatgacgacaagaacattgagatatggaagattaagaagctgatcaaatcacttgaagctgctaggggtaatggaaccagcatgatctcactcatcatgcctccgcgtgatcaggtctctcgtgttaccaagatgttgggtgatgagtatggaaccgcgtcaaacatcaagagcagagtcaatcgtcaatctgttttgggggccataacttctgctcagcaaaggttgaaactttacaacagggtccctcctaatggtcttgtactctatactggaaccattgttaatgaggatggtaaggagaagaaggttactattgactttgagcctttcagacccatcaatgcttctctctacctttgtgacaacaagtttcacacggaagctttgaatgaattgttggagtctgatgacaagtttggtttcattgtaatggatggaaacgggactctctttggaactcttagtggtaacacccgtgaggtacttcacaagttctctgttgatcttccgaagaaacacggaagaggaggacagtctgctcttcgttttgcccgtctccgtatggagaagcgtcacaattatgttaggaagactgctgagctcgccacacagtactacatcaatcctgctacaagtcagcctaatgtgtctggactgattcttgctggttcagcagatttcaagactgagttgagtcagtctgatatgtttgatccccgactggctgcgaagatactgaatgtggtggatgtatcatatggaggagaaaatggttttaatcaagctattgagctgtcagctgaaatccttgcgaatgtgaagtttatccaagagaagcgtctgattgggaagtactttgaggagataagccaggacacggggaagtatgtgtttggtgtggaagatacgttgaacgctttggagtctggtgctattgagacactgattgtatgggaaaatctcgatatcaacagatatgtgatgaagaacagtgcgactggtgaaactgtgatcaaacacctgaacaaggaacaagaagccaacactgagaacttcaaagtagccgacagtgacttggctttggacgtggaggagaagctgtcgttactggagtggcttgccaatgagtacaggcgttttggttgtgcgttagagtttgtgaccaacaagtcacaggaaggttctcagttttgcagagggtttggaggaatcggaggaatacttcgttaccagcttgacatgactgcctttgattccgaggatggagaagctcttgatgatgattcggaatgacaatcaatcaaatcctcaccatcgctggttggggaagatggcgctccgccatgcctgaaccagcttgcgcgggctgtcggggtcgcgctgaagaatttgaaaataaattgaagaagcatcttttgtgaaggtgatgaatgaaggaacatgtggagagtgaagaagccttggctttggtagcgttgttggtgcctagacatttatggagttttattttgagttggtgtttctttaataatttactttggtcagttttatttcagaattggaatactcttgtctgagagaatttgggtttttattacatggatgtctttaaaaccttaattaaatcctaaattctataagttcaaagaattaatcctaaaattcggc

SEQ ID NO: 80535 - protein, 436 aa, Arabidopsis thaliana
  peptide (1)..(436): Ceres Seq. ID no. 12656347
MGDKNDDDKNIEIWKIKKLIKSLEAARGNGTSMISLIMPPRDQVSRVTKMLGDEYGTASNIKSRVNRQSVLGAITSAQQRLKLYNRVPPNGLVLYTGTIVNEDGKEKKVTIDFEPFRPINASLYLCDNKFHTEALNELLESDDKFGFIVMDGNGTLFGTLSGNTREVLHKFSVDLPKKHGRGGQSALRFARLRMEKRHNYVRKTAELATQYYINPATSQPNVSGLILAGSADFKTELSQSDMFDPRLAAKILNVVDVSYGGENGFNQAIELSAEILANVKFIQEKRLIGKYFEEISQDTGKYVFGVEDTLNALESGAIETLIVWENLDINRYVMKNSATGETVIKHLNKEQEANTENFKVADSDLALDVEEKLSLLEWLANEYRRFGCALEFVTNKSQEGSQFCRGFGGIGGILRYQLDMTAFDSEDGEALDDDSE

SEQ ID NO: 80536 - protein, 404 aa, Arabidopsis thaliana
  peptide (1)..(404): Ceres Seq. ID no. 12656348
MISLIMPPRDQVSRVTKMLGDEYGTASNIKSRVNRQSVLGAITSAQQRLKLYNRVPPNGLVLYTGTIVNEDGKEKKVTIDFEPFRPINASLYLCDNKFHTEALNELLESDDKFGFIVMDGNGTLFGTLSGNTREVLHKFSVDLPKKHGRGGQSALRFARLRMEKRHNYVRKTAELATQYYINPATSQPNVSGLILAGSADFKTELSQSDMFDPRLAAKILNVVDVSYGGENGFNQAIELSAEILANVKFIQEKRLIGKYFEEISQDTGKYVFGVEDTLNALESGAIETLIVWENLDINRYVMKNSATGETVIKHLNKEQEANTENFKVADSDLALDVEEKLSLLEWLANEYRRFGCALEFVTNKSQEGSQFCRGFGGIGGILRYQLDMTAFDSEDGEALDDDSE

SEQ ID NO: 80537 - protein, 399 aa, Arabidopsis thaliana
  peptide (1)..(399): Ceres Seq. ID no. 12656349
MPPRDQVSRVTKMLGDEYGTASNIKSRVNRQSVLGAITSAQQRLKLYNRVPPNGLVLYTGTIVNEDGKEKKVTIDFEPFRPINASLYLCDNKFHTEALNELLESDDKFGFIVMDGNGTLFGTLSGNTREVLHKFSVDLPKKHGRGGQSALRFARLRMEKRHNYVRKTAELATQYYINPATSQPNVSGLILAGSADFKTELSQSDMFDPRLAAKILNVVDVSYGGENGFNQAIELSAEILANVKFIQEKRLIGKYFEEISQDTGKYVFGVEDTLNALESGAIETLIVWENLDINRYVMKNSATGETVIKHLNKEQEANTENFKVADSDLALDVEEKLSLLEWLANEYRRFGCALEFVTNKSQEGSQFCRGFGGIGGILRYQLDMTAFDSEDGEALDDDSE

SEQ ID NO: 80538 - DNA, 3020 bp, Arabidopsis thaliana
  misc_feature (1)..(3020): Ceres Seq. ID no. 12656350
  misc_feature (1)..(3020): Ortholog of  Ceres SEQ ID NO 14309727 as cited in SEQ ID NO 1030
  misc_feature (1)..(3020): Ortholog of  Ceres SEQ ID NO 13581686 as cited in SEQ ID NO 57695
  misc_feature (1)..(3020): Ortholog of  Ceres SEQ ID NO 15224315 as cited in SEQ ID NO 66131
atacacaaaaatcaaacaccttttgagagcggttattttttctctatcaactaatacagtaaccttacgggtgtttatttgtatagatctctgtggttttcttggccaaatctagtgagatctttttggtttctcgaattcgatgaaaatgagacgaggcaattcaagtaacgaccatgaacttgggattctacgaggagctaactcggacaccaactcggacacggagagcatcgctagcgaccgtggtgcctttagcggtccgcttggccggcctaaacgtgcgtccaagaaaaacgcaagattcgccgacgatcttcccaagagaagcaatagtgttgctggcggccgtggtgatgacgatgagtacgtggagatcacgctagacatcagggacgactcggtggccgtccatagtgtccaacaagcagctggaggtggaggccacctggaggacccggagctagcccttcttacgaagaagactctcgagagcagcctcaacaacaccacctccttatctttcttccgaagcacctcctcacgcatcaagaacgcctcccgcgagctccgccgcgtgttctctagacgtccctccccggccgtgcggcggtttgaccgcacgagctccgcggccatccacgcactcaaaggtctcaagttcattgccaccaagacggccgcatggccggccgtcgaccaacgtttcgataaactctccgctgattccaacggcctcttactctctgccaagttttgggaatgcttaggaatgaataaggaatctaaagacttcgctgaccagctctttagagcattagctcgccggaataacgtctccggcgatgcaatcacaaaggaacagcttaggatattctgggaacagatctcagacgaaagctttgatgccaaactccaagtcttttttgacatggtggacaaagatgaagatgggcgagtaacagaagaagaggtggctgagattattagtcttagtgcttctgcaaacaagctctcaaatattcaaaagcaagccaaagaatatgcggcactgataatggaagagttggacccagacaatgctgggtttattatgatcgaaaacttggaaatgttgctattacaagcaccaaaccagtcggtgcggatgggagacagcaggatacttagtcagatgttaagtcagaagcttagaccggcaaaagagagcaaccctttagtgagatggtcggagaaaatcaaatatttcatacttgacaattggcagagactatggataatgatgttatggcttggcatctgtggtggcctctttacttataaattcattcagtacaagaacaaagctgcctatggtgtcatgggttattgcgtttgtgtcgccaaaggaggcgccgagactctcaaattcaacatggctctcatattgttgcctgtttgtcgaaacaccatcacttggcttaggaacaagactaagcttggtactgtcgttccttttgatgatagtcttaacttccacaaggttattgcaagcgggatagtcgtcggtgttttactccatgcgggtgcccatttaacgtgtgattttccacgtttaattgccgcggatgaggacacctatgagccgatggaaaaatactttggggatcaaccgactagctactggtggtttgtgaaaggagtggaaggatggactggcattgtgatggttgtgctaatggctatagcctttacactcgcgacgccttggttccgacgtaacaagcttaacttacctaacttcctcaagaagcttaccggtttcaacgccttttggtacacccaccatttgttcatcattgtttatgctcttctcattgtccatggtatcaagctctacctcacaaagatttggtatcagaaaacgacatggatgtatcttgctgtacccatccttctatatgcatcggagaggctgctccgtgctttcagatcaagcatcaaaccggttaagatgatcaaggtggctgtttaccccgggaacgtgttgtctctacacatgacgaagccacaaggattcaaatacaaaagtggacagttcatgttggtgaactgccgagccgtatctccattcgaatggcatcctttctcaatcacatcagctcccggagacgattacctgagcgtacatatccgcactctcggtgactggacacgtaagctcaggaccgttttctccgaggtttgcaaacctcctaccgccggtaaaagcggtcttctccgagcagacggaggagatggaaacctcccgttcccgaaggtccttatcgacggtccatacggtgctcccgcacaagactacaagaaatacgacgtggtactcctcgtaggtctcggcattggagccacgcctatgatcagtatccttaaggacatcatcaacaacatgaaaggtcctgaccgcgacagcgacattgagaacaataacagtaacaacaatagtaaagggtttaagacaaggaaagcttatttctactgggtgactagggaacaaggatcattcgagtggttcaagggaataatggacgagatttcggagttagacgaggaaggaatcatcgagcttcacaattattgcacgagtgtgtacgaggaaggtgatgcaagagtggctctcattgccatgcttcagtcgttgcaacacgctaagaacggtgtggatgttgtgtcgggtacacgtgtcaagtcccacttcgctaaacctaactggagacaagtctacaagaagatcgctgttcaacatcccggcaaaagaataggagtcttctactgtggaatgccaggaatgataaaggaattaaaaaatctagctttggatttttctcgaaagacaactaccaagtttgacttccacaaagagaacttctagattaattatatacgttgtagaaaaataaaacaagaaacaactatacaaataaatatttattttaaattcttttcatttttatgtaaaattatctgagttatctttttttgtt

SEQ ID NO: 80539 - protein, 921 aa, Arabidopsis thaliana
  peptide (1)..(921): Ceres Seq. ID no. 12656351
MKMRRGNSSNDHELGILRGANSDTNSDTESIASDRGAFSGPLGRPKRASKKNARFADDLPKRSNSVAGGRGDDDEYVEITLDIRDDSVAVHSVQQAAGGGGHLEDPELALLTKKTLESSLNNTTSLSFFRSTSSRIKNASRELRRVFSRRPSPAVRRFDRTSSAAIHALKGLKFIATKTAAWPAVDQRFDKLSADSNGLLLSAKFWECLGMNKESKDFADQLFRALARRNNVSGDAITKEQLRIFWEQISDESFDAKLQVFFDMVDKDEDGRVTEEEVAEIISLSASANKLSNIQKQAKEYAALIMEELDPDNAGFIMIENLEMLLLQAPNQSVRMGDSRILSQMLSQKLRPAKESNPLVRWSEKIKYFILDNWQRLWIMMLWLGICGGLFTYKFIQYKNKAAYGVMGYCVCVAKGGAETLKFNMALILLPVCRNTITWLRNKTKLGTVVPFDDSLNFHKVIASGIVVGVLLHAGAHLTCDFPRLIAADEDTYEPMEKYFGDQPTSYWWFVKGVEGWTGIVMVVLMAIAFTLATPWFRRNKLNLPNFLKKLTGFNAFWYTHHLFIIVYALLIVHGIKLYLTKIWYQKTTWMYLAVPILLYASERLLRAFRSSIKPVKMIKVAVYPGNVLSLHMTKPQGFKYKSGQFMLVNCRAVSPFEWHPFSITSAPGDDYLSVHIRTLGDWTRKLRTVFSEVCKPPTAGKSGLLRADGGDGNLPFPKVLIDGPYGAPAQDYKKYDVVLLVGLGIGATPMISILKDIINNMKGPDRDSDIENNNSNNNSKGFKTRKAYFYWVTREQGSFEWFKGIMDEISELDEEGIIELHNYCTSVYEEGDARVALIAMLQSLQHAKNGVDVVSGTRVKSHFAKPNWRQVYKKIAVQHPGKRIGVFYCGMPGMIKELKNLALDFSRKTTTKFDFHKENF

SEQ ID NO: 80540 - protein, 919 aa, Arabidopsis thaliana
  peptide (1)..(919): Ceres Seq. ID no. 12656352
MRRGNSSNDHELGILRGANSDTNSDTESIASDRGAFSGPLGRPKRASKKNARFADDLPKRSNSVAGGRGDDDEYVEITLDIRDDSVAVHSVQQAAGGGGHLEDPELALLTKKTLESSLNNTTSLSFFRSTSSRIKNASRELRRVFSRRPSPAVRRFDRTSSAAIHALKGLKFIATKTAAWPAVDQRFDKLSADSNGLLLSAKFWECLGMNKESKDFADQLFRALARRNNVSGDAITKEQLRIFWEQISDESFDAKLQVFFDMVDKDEDGRVTEEEVAEIISLSASANKLSNIQKQAKEYAALIMEELDPDNAGFIMIENLEMLLLQAPNQSVRMGDSRILSQMLSQKLRPAKESNPLVRWSEKIKYFILDNWQRLWIMMLWLGICGGLFTYKFIQYKNKAAYGVMGYCVCVAKGGAETLKFNMALILLPVCRNTITWLRNKTKLGTVVPFDDSLNFHKVIASGIVVGVLLHAGAHLTCDFPRLIAADEDTYEPMEKYFGDQPTSYWWFVKGVEGWTGIVMVVLMAIAFTLATPWFRRNKLNLPNFLKKLTGFNAFWYTHHLFIIVYALLIVHGIKLYLTKIWYQKTTWMYLAVPILLYASERLLRAFRSSIKPVKMIKVAVYPGNVLSLHMTKPQGFKYKSGQFMLVNCRAVSPFEWHPFSITSAPGDDYLSVHIRTLGDWTRKLRTVFSEVCKPPTAGKSGLLRADGGDGNLPFPKVLIDGPYGAPAQDYKKYDVVLLVGLGIGATPMISILKDIINNMKGPDRDSDIENNNSNNNSKGFKTRKAYFYWVTREQGSFEWFKGIMDEISELDEEGIIELHNYCTSVYEEGDARVALIAMLQSLQHAKNGVDVVSGTRVKSHFAKPNWRQVYKKIAVQHPGKRIGVFYCGMPGMIKELKNLALDFSRKTTTKFDFHKENF

SEQ ID NO: 80541 - protein, 711 aa, Arabidopsis thaliana
  peptide (1)..(711): Ceres Seq. ID no. 12656353
MNKESKDFADQLFRALARRNNVSGDAITKEQLRIFWEQISDESFDAKLQVFFDMVDKDEDGRVTEEEVAEIISLSASANKLSNIQKQAKEYAALIMEELDPDNAGFIMIENLEMLLLQAPNQSVRMGDSRILSQMLSQKLRPAKESNPLVRWSEKIKYFILDNWQRLWIMMLWLGICGGLFTYKFIQYKNKAAYGVMGYCVCVAKGGAETLKFNMALILLPVCRNTITWLRNKTKLGTVVPFDDSLNFHKVIASGIVVGVLLHAGAHLTCDFPRLIAADEDTYEPMEKYFGDQPTSYWWFVKGVEGWTGIVMVVLMAIAFTLATPWFRRNKLNLPNFLKKLTGFNAFWYTHHLFIIVYALLIVHGIKLYLTKIWYQKTTWMYLAVPILLYASERLLRAFRSSIKPVKMIKVAVYPGNVLSLHMTKPQGFKYKSGQFMLVNCRAVSPFEWHPFSITSAPGDDYLSVHIRTLGDWTRKLRTVFSEVCKPPTAGKSGLLRADGGDGNLPFPKVLIDGPYGAPAQDYKKYDVVLLVGLGIGATPMISILKDIINNMKGPDRDSDIENNNSNNNSKGFKTRKAYFYWVTREQGSFEWFKGIMDEISELDEEGIIELHNYCTSVYEEGDARVALIAMLQSLQHAKNGVDVVSGTRVKSHFAKPNWRQVYKKIAVQHPGKRIGVFYCGMPGMIKELKNLALDFSRKTTTKFDFHKENF

SEQ ID NO: 80542 - DNA, 814 bp, Arabidopsis thaliana
  misc_feature (1)..(814): Ceres Seq. ID no. 12656362
  misc_feature (1)..(814): Ortholog of  Ceres SEQ ID NO 14308640 as cited in SEQ ID NO 60489
  misc_feature (1)..(814): Ortholog of  Ceres SEQ ID NO 12619999 as cited in SEQ ID NO 66123
  misc_feature (1)..(814): Ortholog of  Ceres SEQ ID NO 13656436 as cited in SEQ ID NO 69154
tacaactaagtcatttctatcgcctctaaaatctataagcttgtgattttggtgtgaacgatgtcaaaatttcagagcaatttcaatcagaagatagattatgtgttcaaggtagtcttgatcggcgactctgctgttggtaaatctcagcttctcgctaggttttcaagaaacgagttcagtatcgaatctaaagcaacgatcggtgtcgagtttcagacaagaacacttgaaatcgatcgtaaaactatcaaagctcagatatgggacactgctggtcaagaacggtatcgagcggtgacgagtgcatactacagaggagcagtaggggcaatgttagtttacgatataacaaaacgacagtcgtttgatcatgtagcgagatggttagaagaattgagaggacatgctgacaaaaacattgtgattatgctaataggaaacaaaactgatctcgggacacttcgagctgtaccaaccgaggatgctaaagaatttgctcaaagagaaaatctgtttttcatggagacatcagccttggattcaaacaatgttgagccttcgttcctcacggttttgacggaaatatatcgaattgtgagtaaaaagaatcttgttgctaatgaggaaggagaatctggaggagactcttctcttttgcaaggaactaagattgttgttgctggagaagagactgaatctaaaggaaaaggttgttgtggaacatcatagactttttttcatgatcttttctctttttttttttgttactaccatttcttgtgatcatatttctctttctctttgactgcat

SEQ ID NO: 80543 - protein, 223 aa, Arabidopsis thaliana
  peptide (1)..(223): Ceres Seq. ID no. 12656363
MSKFQSNFNQKIDYVFKVVLIGDSAVGKSQLLARFSRNEFSIESKATIGVEFQTRTLEIDRKTIKAQIWDTAGQERYRAVTSAYYRGAVGAMLVYDITKRQSFDHVARWLEELRGHADKNIVIMLIGNKTDLGTLRAVPTEDAKEFAQRENLFFMETSALDSNNVEPSFLTVLTEIYRIVSKKNLVANEEGESGGDSSLLQGTKIVVAGEETESKGKGCCGTS

SEQ ID NO: 80544 - protein, 132 aa, Arabidopsis thaliana
  peptide (1)..(132): Ceres Seq. ID no. 12656364
MLVYDITKRQSFDHVARWLEELRGHADKNIVIMLIGNKTDLGTLRAVPTEDAKEFAQRENLFFMETSALDSNNVEPSFLTVLTEIYRIVSKKNLVANEEGESGGDSSLLQGTKIVVAGEETESKGKGCCGTS

SEQ ID NO: 80545 - DNA, 1536 bp, Arabidopsis thaliana
  misc_feature (1)..(1536): Ceres Seq. ID no. 12656365
  misc_feature (1)..(1536): Ortholog of  Ceres SEQ ID NO 13502874 as cited in SEQ ID NO 66298
  misc_feature (1)..(1536): Ortholog of  Ceres SEQ ID NO 12614124 as cited in SEQ ID NO 68392
atggcatcaatgatcactgttgactttgaaaactgcttcatcttcctcctcttatgtcttttctcacgcctctcttacgatcttttcttcaggaaaacaaaagactcacgagctggctgtgctcttcctccgagccctccttcattaccaatcattggtcatcttcaccttatactctttgtcccaatccaccagtctttcaagaacatctcatctaaatatggacctctcctccacctccgcttctttaacttccccatagtcctcgtctcctcggcctcaacggcctacgagatcttcaaggcccaagacgtgaatgtctcctctcgccctccccctcctatcgaggagtctctcattttaggatcttccagcttcatcaacactccctatggagattactcgaagttcatgaagaagttcatggtccaaaagctgcttggaccacaagcactccaacggtcccgaaatatccgtgcagatgagctggaacggttctacaaaaccctgcttgataaggcgatgaagaagcagactgttgagattcgtaatgaagcaatgaagctcactaacaacaccatttgcaagatgattatggggaggagttgttcagaggagaacggtgaggctgagacagtcagaggcttggtgaccgagtcgattttcttgacaaagaaacatttcttgggagccatgtttcacaaaccacttaagaagctcgggatctcattattcgcaaaggaattgatgaatgtttccaacaggtttgatgagctactggagaagattcttgttgaacatgaagagaaattgcaggagcatcatcaaactagtgacatgttggatatgttgttggaagcttatggagacgaaaacgcagagtataagatcactagagaccaaatcaagtctttgttcgtggatctgttcagtgcaggcactgaagcctcggcgaacactatacagtggaccatggcggagatcattaagaatcctaagatttgtgagagactgagagaagaaattgattctgttgtagggaaaacaaggttggttcaagagactgatctaccaaatctcccttacttgcaagcaatagttaaagaagggctaagattgcatcctccgggaccagtggtaaggacgttcaaagagacatgtgaaatcaaaggattctacataccggagaagacaagactttttgttaatgtttatgcgataatgagagatcctgatttctgggaagaccctgaggagtttaagccagagaggtttttagcttcttcaagattaggggaagaggatgagaaaagagaggacatgctaaaatacattcctttcggtagcggaaggagagcttgtcctggatcacatctagcttataccgttgtaggaagtgtaattggaatgatggtgcaacactttgactggataatcaaaggagaaaaaatcaacatgaaggagggtggaacaatgaccttgaccatggctcaccctcttaagtgcactcctgttcctcgaaacctaaacacttaa

SEQ ID NO: 80546 - protein, 511 aa, Arabidopsis thaliana [sequence omitted]

SEQ ID NO: 80547 - protein, 508 aa, Arabidopsis thaliana
  peptide (1)..(508): Ceres Seq. ID no. 12656367
MITVDFENCFIFLLLCLFSRLSYDLFFRKTKDSRAGCALPPSPPSLPIIGHLHLILFVPIHQSFKNISSKYGPLLHLRFFNFPIVLVSSASTAYEIFKAQDVNVSSRPPPPIEESLILGSSSFINTPYGDYSKFMKKFMVQKLLGPQALQRSRNIRADELERFYKTLLDKAMKKQTVEIRNEAMKLTNNTICKMIMGRSCSEENGEAETVRGLVTESIFLTKKHFLGAMFHKPLKKLGISLFAKELMNVSNRFDELLEKILVEHEEKLQEHHQTSDMLDMLLEAYGDENAEYKITRDQIKSLFVDLFSAGTEASANTIQWTMAEIIKNPKICERLREEIDSVVGKTRLVQETDLPNLPYLQAIVKEGLRLHPPGPVVRTFKETCEIKGFYIPEKTRLFVNVYAIMRDPDFWEDPEEFKPERFLASSRLGEEDEKREDMLKYIPFGSGRRACPGSHLAYTVVGSVIGMMVQHFDWIIKGEKINMKEGGTMTLTMAHPLKCTPVPRNLNT

SEQ ID NO: 80548 - protein, 374 aa, Arabidopsis thaliana
  peptide (1)..(374): Ceres Seq. ID no. 12656368
MKKFMVQKLLGPQALQRSRNIRADELERFYKTLLDKAMKKQTVEIRNEAMKLTNNTICKMIMGRSCSEENGEAETVRGLVTESIFLTKKHFLGAMFHKPLKKLGISLFAKELMNVSNRFDELLEKILVEHEEKLQEHHQTSDMLDMLLEAYGDENAEYKITRDQIKSLFVDLFSAGTEASANTIQWTMAEIIKNPKICERLREEIDSVVGKTRLVQETDLPNLPYLQAIVKEGLRLHPPGPVVRTFKETCEIKGFYIPEKTRLFVNVYAIMRDPDFWEDPEEFKPERFLASSRLGEEDEKREDMLKYIPFGSGRRACPGSHLAYTVVGSVIGMMVQHFDWIIKGEKINMKEGGTMTLTMAHPLKCTPVPRNLNT

SEQ ID NO: 80549 - DNA, 1792 bp, Arabidopsis thaliana
  misc_feature (1)..(1792): Ceres Seq. ID no. 12656384
  misc_feature (1)..(1792): Ortholog of  Ceres SEQ ID NO 15169072 as cited in SEQ ID NO 53955
  misc_feature (1)..(1792): Ortholog of  Ceres SEQ ID NO 15224912 as cited in SEQ ID NO 63475
  misc_feature (1)..(1792): Ortholog of  Ceres SEQ ID NO 13657460 as cited in SEQ ID NO 66115
  misc_feature (1)..(1792): Ortholog of  Ceres SEQ ID NO 13659394 as cited in SEQ ID NO 67049
ctccgacaactttctctcttcccttctctcttcctctggttcacatggaacttcaataacattcactactttaaggtttctcatctccgaaaaagtcagttattgtgcagatcattgaagtgactagaaatgtacaagcagcctagacaagagcttgaggcttattattttgagcctaactctgttgagaagcttaggtacttaccggttaacaactctcgtaaacggttttgtacgctcgagccatttcctgactctcctccttataatgctctatctactgctacatatgatgatacatgtggctcttgtgtaacggatgagttgaatgacttcaaacacaagattagggaaatcgaaacggtgatgatggggccggactcgttggacttacttgtcgattgcacggactcatttgattccacggcgagtcaagagattaatggttggagatcaactctagaggctatctcgaggcgggatttaagagctgatcttgtttcatgtgccaaagctatgtcggaaaatgatcttatgatggctcattcaatgatggagaagttgcggcagatggtttcggtttctggtgagcctattcaacggttgggagcttacttattggaaggtctagtggcgcagctagcttcgtcgggcagttctatatacaaagcacttaataggtgtcctgaaccggctagcacagagcttctctcttacatgcacattctctatgaggtttgtccttacttcaagtttggatacatgtcagcaaatggtgctattgctgaggcaatgaaggaagaaaacagagttcacattattgatttccaaatcggtcaagggagtcaatgggtcactcttatccaggcttttgcagctaggcctggtgggcctccgcggattcggataacgggtatcgatgatatgacttcagcgtatgctcgtggaggtggcctaagcattgttggaaatagactcgctaagcttgctaagcagttcaacgttccattcgagtttaactcggtatcggtgtcagtttccgaggttaaacctaaaaacctcggggttcgacctggggaagctctagccgtaaactttgcctttgtgcttcatcatatgccagacgaaagcgtgagcaccgagaatcaccgcgaccggttattgagaatggtgaagagcttatctcccaaggtggtgactcttgtggaacaagagtcaaacacaaacacagccgctttcttcccgaggttcatggagacaatgaactactatgccgcgatgtttgagtcaattgatgtgactctaccaagagatcacaaacagaggattaatgtggagcaacattgtctagcaagagatgtcgtgaacatcatcgcatgtgaaggagctgatcgggtggagcgacacgagctcctaggaaaatggaggtcacggtttgggatggcgggtttcactccttacccgttgagtcccttggtgaattcaaccattaaaagtctgcttaggaactactcagacaagtacaggctagaagaaagagatggagctttgtatcttggttggatgcatcgagatttggttgcctcgtgtgcttggaaatgagacagtgacatttctctagtgtgatggcaattaatgtgtttctacttgtatgcaatttagtcgctcatttgaatcttcaaaacatttgaagaatcttatgtttactactagagaccaagagtgtgcacaattgctcaaatgtcaaagtcaactctttcctcaatcaaaatttaagtatgtagttcacacg

SEQ ID NO: 80550 - protein, 490 aa, Arabidopsis thaliana
  peptide (1)..(490): Ceres Seq. ID no. 12656385
MYKQPRQELEAYYFEPNSVEKLRYLPVNNSRKRFCTLEPFPDSPPYNALSTATYDDTCGSCVTDELNDFKHKIREIETVMMGPDSLDLLVDCTDSFDSTASQEINGWRSTLEAISRRDLRADLVSCAKAMSENDLMMAHSMMEKLRQMVSVSGEPIQRLGAYLLEGLVAQLASSGSSIYKALNRCPEPASTELLSYMHILYEVCPYFKFGYMSANGAIAEAMKEENRVHIIDFQIGQGSQWVTLIQAFAARPGGPPRIRITGIDDMTSAYARGGGLSIVGNRLAKLAKQFNVPFEFNSVSVSVSEVKPKNLGVRPGEALAVNFAFVLHHMPDESVSTENHRDRLLRMVKSLSPKVVTLVEQESNTNTAAFFPRFMETMNYYAAMFESIDVTLPRDHKQRINVEQHCLARDVVNIIACEGADRVERHELLGKWRSRFGMAGFTPYPLSPLVNSTIKSLLRNYSDKYRLEERDGALYLGWMHRDLVASCAWK

SEQ ID NO: 80551 - protein, 411 aa, Arabidopsis thaliana
  peptide (1)..(411): Ceres Seq. ID no. 12656386
MMGPDSLDLLVDCTDSFDSTASQEINGWRSTLEAISRRDLRADLVSCAKAMSENDLMMAHSMMEKLRQMVSVSGEPIQRLGAYLLEGLVAQLASSGSSIYKALNRCPEPASTELLSYMHILYEVCPYFKFGYMSANGAIAEAMKEENRVHIIDFQIGQGSQWVTLIQAFAARPGGPPRIRITGIDDMTSAYARGGGLSIVGNRLAKLAKQFNVPFEFNSVSVSVSEVKPKNLGVRPGEALAVNFAFVLHHMPDESVSTENHRDRLLRMVKSLSPKVVTLVEQESNTNTAAFFPRFMETMNYYAAMFESIDVTLPRDHKQRINVEQHCLARDVVNIIACEGADRVERHELLGKWRSRFGMAGFTPYPLSPLVNSTIKSLLRNYSDKYRLEERDGALYLGWMHRDLVASCAWK

SEQ ID NO: 80552 - protein, 410 aa, Arabidopsis thaliana
  peptide (1)..(410): Ceres Seq. ID no. 12656387
MGPDSLDLLVDCTDSFDSTASQEINGWRSTLEAISRRDLRADLVSCAKAMSENDLMMAHSMMEKLRQMVSVSGEPIQRLGAYLLEGLVAQLASSGSSIYKALNRCPEPASTELLSYMHILYEVCPYFKFGYMSANGAIAEAMKEENRVHIIDFQIGQGSQWVTLIQAFAARPGGPPRIRITGIDDMTSAYARGGGLSIVGNRLAKLAKQFNVPFEFNSVSVSVSEVKPKNLGVRPGEALAVNFAFVLHHMPDESVSTENHRDRLLRMVKSLSPKVVTLVEQESNTNTAAFFPRFMETMNYYAAMFESIDVTLPRDHKQRINVEQHCLARDVVNIIACEGADRVERHELLGKWRSRFGMAGFTPYPLSPLVNSTIKSLLRNYSDKYRLEERDGALYLGWMHRDLVASCAWK

SEQ ID NO: 80553 - DNA, 1668 bp, Arabidopsis thaliana
  misc_feature (1)..(1668): Ceres Seq. ID no. 12656388
  misc_feature (1)..(1668): Ortholog of  Ceres SEQ ID NO 14313074 as cited in SEQ ID NO 59199
atccatctgtttctccttttacccttcttcacacgcagctaaagaagaaatttgtggaatcatcgcttattcgtttcaaaagtcattcatttttggtgtctctgcttcagaagatacttgacgatctctcctactgaaaggagcttgctttcttcagtgtgacggttgagattggttgaaagatgggttatatgtgtgatttctgtggtgaacaaagatcaatggtgtattgtcgatctgatgcagcgtgtttgtgtctttcgtgtgaccgtaatgttcattctgctaatgctctatcgaaacgtcattcgcggactttggtatgtgagaggtgtaatgcacagccagcttctgtccggtgtagtgatgagagggtttctctatgtcaaaactgtgattggtcaggccatgacggcaagaattctactactacttcacatcataaaaggcaaaccatcaattgttattctggttgtccctcgagtgccgaattatcctcgatatggtctttctgtatggatttgaatatctcttctgctgaagaatccgcttgtgagcaaggaatgggtttgatgactatagatgaagatggcacaggagaaaaatctggtgtccaaaaaattaatgtagaacagcctgaaaccagttcggctgcacaaggtatggatcactctagtgttccagaaaattcatcaatggctaaggagcttggagtatgtgaggatgacttcaatggaaatctcatttcagatgaagtagacttggctcttgagaactatgaagaactctttggttcagccttcaactcatcaagatatctcttcgagcacggtggaattggaagtcttttcgagaaagatgaagctcatgagggctcaatgcagcagccagcattaagcaataatgcatctgcagattcgttcatgacttgtagaaccgagccaataatttgctattcatcaaagccagcacattcgaatatctccttctctggcatcactggagaaagtaatgctggagatttccaagattgtggggcgtcatcgatgaagcagctttcaagggagccacaaccatggtgccatccaacagcacaggacattattgcttcctcacatgcaacaacacgtaataacgctgttatgcgttacaaggaaaagaagaaggctcgcaagtttgacaagcgagtaaggtatgtctctaggaaagaaagggctgatgtgagacggcgtgtgaaaggacggtttgtcaagtccggtgaagcttatgattacgacccgatgagcccaacaagaagctactgaggataaaacctcaaaacaatgaaagatcacaaagtggagatataagacagagatgcaactaattggcagcgatggatctggaagccattattggttgaaaaggaacacgagttctccgcctcaaaagcgtcatacttgcttagaaaggcgcatgcttctgcagttctgcctcattttttgcataaagtttgttatcttcttctgtcatttggcatcatgacttgactgtgaaactagaaactcttctacagattcaggttcatgatccttaaattttgtcctattataatttgtgtagccaaggcaaaacaacgaatgtatattttttttacgtcatataaataataaccatgtagaagtttgg

SEQ ID NO: 80554 - protein, 373 aa, Arabidopsis thaliana
  peptide (1)..(373): Ceres Seq. ID no. 12656389
MGYMCDFCGEQRSMVYCRSDAACLCLSCDRNVHSANALSKRHSRTLVCERCNAQPASVRCSDERVSLCQNCDWSGHDGKNSTTTSHHKRQTINCYSGCPSSAELSSIWSFCMDLNISSAEESACEQGMGLMTIDEDGTGEKSGVQKINVEQPETSSAAQGMDHSSVPENSSMAKELGVCEDDFNGNLISDEVDLALENYEELFGSAFNSSRYLFEHGGIGSLFEKDEAHEGSMQQPALSNNASADSFMTCRTEPIICYSSKPAHSNISFSGITGESNAGDFQDCGASSMKQLSREPQPWCHPTAQDIIASSHATTRNNAVMRYKEKKKARKFDKRVRYVSRKERADVRRRVKGRFVKSGEAYDYDPMSPTRSY

SEQ ID NO: 80555 - protein, 370 aa, Arabidopsis thaliana
  peptide (1)..(370): Ceres Seq. ID no. 12656390
MCDFCGEQRSMVYCRSDAACLCLSCDRNVHSANALSKRHSRTLVCERCNAQPASVRCSDERVSLCQNCDWSGHDGKNSTTTSHHKRQTINCYSGCPSSAELSSIWSFCMDLNISSAEESACEQGMGLMTIDEDGTGEKSGVQKINVEQPETSSAAQGMDHSSVPENSSMAKELGVCEDDFNGNLISDEVDLALENYEELFGSAFNSSRYLFEHGGIGSLFEKDEAHEGSMQQPALSNNASADSFMTCRTEPIICYSSKPAHSNISFSGITGESNAGDFQDCGASSMKQLSREPQPWCHPTAQDIIASSHATTRNNAVMRYKEKKKARKFDKRVRYVSRKERADVRRRVKGRFVKSGEAYDYDPMSPTRSY

SEQ ID NO: 80556 - protein, 360 aa, Arabidopsis thaliana
  peptide (1)..(360): Ceres Seq. ID no. 12656391
MVYCRSDAACLCLSCDRNVHSANALSKRHSRTLVCERCNAQPASVRCSDERVSLCQNCDWSGHDGKNSTTTSHHKRQTINCYSGCPSSAELSSIWSFCMDLNISSAEESACEQGMGLMTIDEDGTGEKSGVQKINVEQPETSSAAQGMDHSSVPENSSMAKELGVCEDDFNGNLISDEVDLALENYEELFGSAFNSSRYLFEHGGIGSLFEKDEAHEGSMQQPALSNNASADSFMTCRTEPIICYSSKPAHSNISFSGITGESNAGDFQDCGASSMKQLSREPQPWCHPTAQDIIASSHATTRNNAVMRYKEKKKARKFDKRVRYVSRKERADVRRRVKGRFVKSGEAYDYDPMSPTRSY

SEQ ID NO: 80557 - DNA, 1653 bp, Arabidopsis thaliana
  misc_feature (1)..(1653): Ceres Seq. ID no. 12656411
  misc_feature (1)..(1653): Ortholog of  Ceres SEQ ID NO 12586556 as cited in SEQ ID NO 64667
  misc_feature (1)..(1653): Ortholog of  Ceres SEQ ID NO 13660894 as cited in SEQ ID NO 67475
atgatccagagattatctcatccttctttgctctcactcgaaaccctcttcaagctctgcaaatccgagattcatcttaatcaaatccatgcccgaatcatccgcaaaggtcttgaacaagaccagaatctcatctcaatcttcatctcttcgtcttcttcgtcttcttcgtctctctcttactcttcctctgtttttgaacgtgttccttctcctggaacttatctctggaatcatttgattaaagggtactcgaataagtttctcttctttgagactgtttcgattctaatgcggatgatgagaacaggtttagctagacctgatgagtatacttttcctttggttatgaaagtttgttctaacaatggacaggttcgtgttggttcatcggttcatgggttagttttgagaattgggtttgataaagatgttgttgtgggtacaagttttgttgatttttatggtaaatgtaaggatttgtttagtgcacgtaaggtgtttggggaaatgcctgagagaaatgctgtttcttggacagctttggttgttgcctatgtgaaatctggggagttagaggaagcgaagagcatgtttgatcttatgcctgagcgtaatttgggatcttggaatgctttggttgatgggttggttaaatctggtgatttggttaatgctaagaagttgtttgatgaaatgcctaagagagatataatttcgtatacctctatgattgatgggtatgctaaaggtggtgatatggtttctgcaagggatttgtttgaggaagcgaggggtgttgatgttagagcatggtcagctttgatattgggttatgcacagaacggtcagccgaatgaggcttttaaggtttttagcgaaatgtgtgcgaagaatgtcaaacctgatgagtttataatggtgggtttgatgtcagcttgttctcagatgggttgttttgagttatgtgaaaaggttgattcttatctgcaccaaaggatgaataagttttctagtcattatgttgtacctgctttgatagacatgaatgccaagtgtggccacatggacagagcagctaagttgtttgaagagatgcctcagcgagatcttgtttcatattgttcgatgatggaaggaatggcgatccacgggtgtggaagtgaagctattcgactgtttgagaaaatggtagacgaaggtattgttcctgatgaagttgccttcacagtaatattgaaagtttgtggccaatccaggcttgttgaggagggattgaggtatttcgagttaatgcgaaagaaatattctattttggcatctcctgatcattattcatgcattgtgaatcttcttagccggacagggaagcttaaagaggcctatgagcttatcaaatccatgccctttgaagctcatgctagtgcttggggttcacttttgggtggttgtagtctacatgggaatactgagatagcagaggtagttgcaaggcacctctttgagcttgaaccacaaagtgccggtagttacgtgcttctgtcaaatatttatgcagctttagaccggtggacggatgttgctcatcttagggacaaaatgaacgaaaatggtattacaaagatttgtggccgaagttggataagtcgataa

SEQ ID NO: 80558 - protein, 550 aa, Arabidopsis thaliana
  peptide (1)..(550): Ceres Seq. ID no. 12656412
MIQRLSHPSLLSLETLFKLCKSEIHLNQIHARIIRKGLEQDQNLISIFISSSSSSSSSLSYSSSVFERVPSPGTYLWNHLIKGYSNKFLFFETVSILMRMMRTGLARPDEYTFPLVMKVCSNNGQVRVGSSVHGLVLRIGFDKDVVVGTSFVDFYGKCKDLFSARKVFGEMPERNAVSWTALVVAYVKSGELEEAKSMFDLMPERNLGSWNALVDGLVKSGDLVNAKKLFDEMPKRDIISYTSMIDGYAKGGDMVSARDLFEEARGVDVRAWSALILGYAQNGQPNEAFKVFSEMCAKNVKPDEFIMVGLMSACSQMGCFELCEKVDSYLHQRMNKFSSHYVVPALIDMNAKCGHMDRAAKLFEEMPQRDLVSYCSMMEGMAIHGCGSEAIRLFEKMVDEGIVPDEVAFTVILKVCGQSRLVEEGLRYFELMRKKYSILASPDHYSCIVNLLSRTGKLKEAYELIKSMPFEAHASAWGSLLGGCSLHGNTEIAEVVARHLFELEPQSAGSYVLLSNIYAALDRWTDVAHLRDKMNENGITKICGRSWISR

SEQ ID NO: 80559 - protein, 453 aa, Arabidopsis thaliana
  peptide (1)..(453): Ceres Seq. ID no. 12656413
MRMMRTGLARPDEYTFPLVMKVCSNNGQVRVGSSVHGLVLRIGFDKDVVVGTSFVDFYGKCKDLFSARKVFGEMPERNAVSWTALVVAYVKSGELEEAKSMFDLMPERNLGSWNALVDGLVKSGDLVNAKKLFDEMPKRDIISYTSMIDGYAKGGDMVSARDLFEEARGVDVRAWSALILGYAQNGQPNEAFKVFSEMCAKNVKPDEFIMVGLMSACSQMGCFELCEKVDSYLHQRMNKFSSHYVVPALIDMNAKCGHMDRAAKLFEEMPQRDLVSYCSMMEGMAIHGCGSEAIRLFEKMVDEGIVPDEVAFTVILKVCGQSRLVEEGLRYFELMRKKYSILASPDHYSCIVNLLSRTGKLKEAYELIKSMPFEAHASAWGSLLGGCSLHGNTEIAEVVARHLFELEPQSAGSYVLLSNIYAALDRWTDVAHLRDKMNENGITKICGRSWISR

SEQ ID NO: 80560 - protein, 451 aa, Arabidopsis thaliana
  peptide (1)..(451): Ceres Seq. ID no. 12656414
MMRTGLARPDEYTFPLVMKVCSNNGQVRVGSSVHGLVLRIGFDKDVVVGTSFVDFYGKCKDLFSARKVFGEMPERNAVSWTALVVAYVKSGELEEAKSMFDLMPERNLGSWNALVDGLVKSGDLVNAKKLFDEMPKRDIISYTSMIDGYAKGGDMVSARDLFEEARGVDVRAWSALILGYAQNGQPNEAFKVFSEMCAKNVKPDEFIMVGLMSACSQMGCFELCEKVDSYLHQRMNKFSSHYVVPALIDMNAKCGHMDRAAKLFEEMPQRDLVSYCSMMEGMAIHGCGSEAIRLFEKMVDEGIVPDEVAFTVILKVCGQSRLVEEGLRYFELMRKKYSILASPDHYSCIVNLLSRTGKLKEAYELIKSMPFEAHASAWGSLLGGCSLHGNTEIAEVVARHLFELEPQSAGSYVLLSNIYAALDRWTDVAHLRDKMNENGITKICGRSWISR

SEQ ID NO: 80561 - DNA, 1482 bp, Arabidopsis thaliana
  misc_feature (1)..(1482): Ceres Seq. ID no. 12656421
  misc_feature (1)..(1482): Ortholog of  Ceres SEQ ID NO 13503610 as cited in SEQ ID NO 62416
  misc_feature (1)..(1482): Ortholog of  Ceres SEQ ID NO 13657610 as cited in SEQ ID NO 66165
  misc_feature (1)..(1482): Ortholog of  Ceres SEQ ID NO 13598312 as cited in SEQ ID NO 68448
  misc_feature (1)..(1482): Ortholog of  Ceres SEQ ID NO 13596100 as cited in SEQ ID NO 68573
atggattaccccatgaagaaggtaaaaatctttttcaactacctcatggcgcatcgcttcaagctctgcttcttaccattaatggttgctatagccgtggaggcgtctcgtctttccacacaagatctccaaaacttttacctctacttacaaaacaaccacacatctctaaccatgttcttcctttacctcgctctcgggtcgactctttacctcatgacccggcccaaacccgtttatctcgttgactttagctgctacctcccaccgtcgcatctcaaagccagcacccagaggatcatgcaacacgtaaggcttgtacgagaagcaggcgcgtggaagcaagagtccgattacttgatggacttctgcgagaagattctagaacgttccggtctaggccaagagacgtacgtacccgaaggtcttcaaactttgccactacaacagaatttggctgtatcacgtatagagacggaggaagttattattggtgcggtcgataatctgtttcgcaacacgggaataagccctagtgatataggtatattggtggtgaattcaagcacttttaatccaacaccttcgctatcaagtatcttagtgaataagtttaaacttagggataatataaagagcttgaatcttggtgggatggggtgtagcgctggagtcatcgctatcgatgcggctaagagcttgttacaagttcatagaaacacttatgctcttgtggtgagcacggagaacatcactcaaaacttgtacatgggtaacaacaaatcaatgttggttacaaactgtttgttccgtataggtggggccgcgattttgctttctaaccggtctatagatcgtaaacgcgcaaaatacgagcttgttcacaccgtgcgggtccataccggagcagatgaccgatcctatgaatgtgcaactcaagaagaggatgaagatggcatagttggggtttccttgtcaaagaatctaccaatggtagctgcaagaaccctaaagatcaatatcgcaactttgggtccgcttgttcttcccataagcgagaagtttcacttctttgtgaggttcgttaaaaagaagtttctcaaccccaagctaaagcattacattccggatttcaagctcgcattcgagcatttctgtatccatgcgggtggtagagcgctaattgatgagatggagaagaatcttcatctaactccactagacgttgaggcttcaagaatgacattacacaggtttggtaatacctcttcgagctccatttggtacgagttggcttacacagaagccaaaggaaggatgacgaaaggagataggatttggcagattgcgttggggtcaggttttaagtgtaatagttcagtttgggtggctcttcgtaacgtcaagccttctactaataatccttgggaacagtgtctacacaaatatccagttgagatcgatatagatttaaaagagtga

SEQ ID NO: 80562 - protein, 493 aa, Arabidopsis thaliana
  peptide (1)..(493): Ceres Seq. ID no. 12656422
MDYPMKKVKIFFNYLMAHRFKLCFLPLMVAIAVEASRLSTQDLQNFYLYLQNNHTSLTMFFLYLALGSTLYLMTRPKPVYLVDFSCYLPPSHLKASTQRIMQHVRLVREAGAWKQESDYLMDFCEKILERSGLGQETYVPEGLQTLPLQQNLAVSRIETEEVIIGAVDNLFRNTGISPSDIGILVVNSSTFNPTPSLSSILVNKFKLRDNIKSLNLGGMGCSAGVIAIDAAKSLLQVHRNTYALVVSTENITQNLYMGNNKSMLVTNCLFRIGGAAILLSNRSIDRKRAKYELVHTVRVHTGADDRSYECATQEEDEDGIVGVSLSKNLPMVAARTLKINIATLGPLVLPISEKFHFFVRFVKKKFLNPKLKHYIPDFKLAFEHFCIHAGGRALIDEMEKNLHLTPLDVEASRMTLHRFGNTSSSSIWYELAYTEAKGRMTKGDRIWQIALGSGFKCNSSVWVALRNVKPSTNNPWEQCLHKYPVEIDIDLKE

SEQ ID NO: 80563 - protein, 489 aa, Arabidopsis thaliana
  peptide (1)..(489): Ceres Seq. ID no. 12656423
MKKVKIFFNYLMAHRFKLCFLPLMVAIAVEASRLSTQDLQNFYLYLQNNHTSLTMFFLYLALGSTLYLMTRPKPVYLVDFSCYLPPSHLKASTQRIMQHVRLVREAGAWKQESDYLMDFCEKILERSGLGQETYVPEGLQTLPLQQNLAVSRIETEEVIIGAVDNLFRNTGISPSDIGILVVNSSTFNPTPSLSSILVNKFKLRDNIKSLNLGGMGCSAGVIAIDAAKSLLQVHRNTYALVVSTENITQNLYMGNNKSMLVTNCLFRIGGAAILLSNRSIDRKRAKYELVHTVRVHTGADDRSYECATQEEDEDGIVGVSLSKNLPMVAARTLKINIATLGPLVLPISEKFHFFVRFVKKKFLNPKLKHYIPDFKLAFEHFCIHAGGRALIDEMEKNLHLTPLDVEASRMTLHRFGNTSSSSIWYELAYTEAKGRMTKGDRIWQIALGSGFKCNSSVWVALRNVKPSTNNPWEQCLHKYPVEIDIDLKE

SEQ ID NO: 80564 - protein, 478 aa, Arabidopsis thaliana
  peptide (1)..(478): Ceres Seq. ID no. 12656424
MAHRFKLCFLPLMVAIAVEASRLSTQDLQNFYLYLQNNHTSLTMFFLYLALGSTLYLMTRPKPVYLVDFSCYLPPSHLKASTQRIMQHVRLVREAGAWKQESDYLMDFCEKILERSGLGQETYVPEGLQTLPLQQNLAVSRIETEEVIIGAVDNLFRNTGISPSDIGILVVNSSTFNPTPSLSSILVNKFKLRDNIKSLNLGGMGCSAGVIAIDAAKSLLQVHRNTYALVVSTENITQNLYMGNNKSMLVTNCLFRIGGAAILLSNRSIDRKRAKYELVHTVRVHTGADDRSYECATQEEDEDGIVGVSLSKNLPMVAARTLKINIATLGPLVLPISEKFHFFVRFVKKKFLNPKLKHYIPDFKLAFEHFCIHAGGRALIDEMEKNLHLTPLDVEASRMTLHRFGNTSSSSIWYELAYTEAKGRMTKGDRIWQIALGSGFKCNSSVWVALRNVKPSTNNPWEQCLHKYPVEIDIDLKE

SEQ ID NO: 80565 - DNA, 901 bp, Arabidopsis thaliana
  misc_feature (1)..(901): Ceres Seq. ID no. 12656425
  misc_feature (1)..(901): Ortholog of  Ceres SEQ ID NO 15169972 as cited in SEQ ID NO 51692
atggagacggtggtcgataaagatgttctgaagtcttccggggctgagcttcttcccgacggacgtcgaggtttacgcatccatgactgggagatcgaaaccctccgcggcacgattctcacttctctcgctgtcgaagagtgggaaaaaaagcttaagacatctcacttacctgaaatggtttttggcgagaatgcattagtccttaaacacttaggtagcaacactaagattcattttaatgcgtttgacgcactagctggttggaagcaggaagggcttccacctgttgaagttcctgctgcagcacaatggaaattcaggagcaagccgtctcagcaggtgatactagattatgattacacgtttacaacgccatactgtggaagtgaagtagttgagaaagacaaagaaacggttgaggcaaaagctaatccaaagggggaagctactcttcagtgggagaactgtgaagatcagattgatttggctgctctctcacttaaagaacctattctcttctatgatgaggtagttttgtatgaagatgaactggctgacaatggagtgtcacttctgactgtgaaagtgagagtcatgccaagctcatggttcctcctcttgcgattttggctgagagttgatggtgtgcttatgagattgagagagacgagaatgcattataggtttggcgaagatgaggcaccaactgttcttcgtgaaaactgttggagagaagcaacatttcagtctctatctgcgaaagggtatccagttgacttagcagtctggagcgacccgagctccatcagtcagaggcttccagtgattaagcatacgacacagaaactgaagatccctagtaaagtttaagctgtttataaagttgcaaattatatct

SEQ ID NO: 80566 - protein, 290 aa, Arabidopsis thaliana
  peptide (1)..(290): Ceres Seq. ID no. 12656426
METVVDKDVLKSSGAELLPDGRRGLRIHDWEIETLRGTILTSLAVEEWEKKLKTSHLPEMVFGENALVLKHLGSNTKIHFNAFDALAGWKQEGLPPVEVPAAAQWKFRSKPSQQVILDYDYTFTTPYCGSEVVEKDKETVEAKANPKGEATLQWENCEDQIDLAALSLKEPILFYDEVVLYEDELADNGVSLLTVKVRVMPSSWFLLLRFWLRVDGVLMRLRETRMHYRFGEDEAPTVLRENCWREATFQSLSAKGYPVDLAVWSDPSSISQRLPVIKHTTQKLKIPSKV

SEQ ID NO: 80567 - protein, 231 aa, Arabidopsis thaliana
  peptide (1)..(231): Ceres Seq. ID no. 12656427
MVFGENALVLKHLGSNTKIHFNAFDALAGWKQEGLPPVEVPAAAQWKFRSKPSQQVILDYDYTFTTPYCGSEVVEKDKETVEAKANPKGEATLQWENCEDQIDLAALSLKEPILFYDEVVLYEDELADNGVSLLTVKVRVMPSSWFLLLRFWLRVDGVLMRLRETRMHYRFGEDEAPTVLRENCWREATFQSLSAKGYPVDLAVWSDPSSISQRLPVIKHTTQKLKIPSKV

SEQ ID NO: 80568 - DNA, 432 bp, Arabidopsis thaliana
  misc_feature (1)..(432): Ceres Seq. ID no. 12656443
  misc_feature (1)..(432): Ortholog of  Ceres SEQ ID NO 14307883 as cited in SEQ ID NO 67277
atgaaggtttttaatcttgaccgtggaaacactctctctgtttccctcttctccggtgtcaccaactccaaggagctcttgaattcaatgcttgacggaagtctgaagctggaggtctcatttctcaatgcatcacttattccagacatttttcctctattggctgctgctcagaaagcacttatctccaaatcacgcgattccttatcaaccagaactcttcattctgagcttgtctacaattactcaggatctaagcacattacagaatcattgaaacgatgtgggatttctgagaacactacttacattctagctgcccggttcaatgcttctcccgttgagcattacaagataactagccaagagctcggaatttcctctctgggagatgccattgtttgtcgaatagctgcacgcgatgctttgtag

SEQ ID NO: 80569 - protein, 143 aa, Arabidopsis thaliana
  peptide (1)..(143): Ceres Seq. ID no. 12656444
MKVFNLDRGNTLSVSLFSGVTNSKELLNSMLDGSLKLEVSFLNASLIPDIFPLLAAAQKALISKSRDSLSTRTLHSELVYNYSGSKHITESLKRCGISENTTYILAARFNASPVEHYKITSQELGISSLGDAIVCRIAARDAL

SEQ ID NO: 80570 - protein, 114 aa, Arabidopsis thaliana
  peptide (1)..(114): Ceres Seq. ID no. 12656445
MLDGSLKLEVSFLNASLIPDIFPLLAAAQKALISKSRDSLSTRTLHSELVYNYSGSKHITESLKRCGISENTTYILAARFNASPVEHYKITSQELGISSLGDAIVCRIAARDAL

SEQ ID NO: 80571 - DNA, 1476 bp, Arabidopsis thaliana
  misc_feature (1)..(1476): Ceres Seq. ID no. 12656446
  misc_feature (1)..(1476): Ortholog of  Ceres SEQ ID NO 15226870 as cited in SEQ ID NO 58831
  misc_feature (1)..(1476): Ortholog of  Ceres SEQ ID NO 15224334 as cited in SEQ ID NO 0
atggaatgttcaaacatgaaacagcatcagtaccacggttcatacgcagagccaaggatctcattctcaagcggtttcgcagcgactaagcacgaaatgatcaagtacaaggaggcaccagtgtcgtcagatgattttgagttcggagtcgagaacttctctatgaccacagcagatgaaatattcttcgatggcatgatcttgcctctaaaggaagaagttaacacgacgaagagaatgtcaactctgagggaagaactcagtgaagaagatggtgattcgccgagaagcaaatcaaaaggatcgagtggttggtggagagagagattagggctagcattcgtgaggtccaagaaagatcacaagaaaatgtgtctgaaaaaaattcaatgtctttatgttctgttcttttctgatctctctgaatctctctctatcgcgacagccatggccgaagacccttctttcctccccaaggatggttttgtcttgaagcttcctaaaaagtcatcacttgtattgagaatggtcgttctcctctttgtaatggtctgtgctgtgtacatttgctccatttgtcttaagcaaataggagttagtccaaactatggtttcttgaacgttgaagtgtttgagaggccttgtcctgagcctaacatcgaaccgtgggacattccttttgtgcattaccctaaaccaaagacatataacagggatgaatgttcttgccacccggttaggtactttgcgattctatcgatgcagagatctggtagtggctggtttgagactttgttaaacaatcatactaacataagctccaacggggagatattttctgtgaaagataggagggctaatgtttccaccattttcgagactcttgacaaagtctataatctagactggttgagtagtgcctctaagaacgagtgcacttccgctgttggcttcaagtggatgcttaatcagggtctaatgaaacatcatgaagaaatagtagaatacttcaaaacccgaggcgtctctgcgattttcctattcagaaaaaacctattgcgccgcatgatatcagtactcgcaaactcttatgacagagatgctaagctactaaacgggactcacaagtctcacacccattcggccaaagaagctgagatattagcaggttacaaaccaatgatcaacacaacacttttaataaatgagctgagacagattcaagaaatgactttgaaagctttgacttacttcaataccactcgacatatccttgtctactacgaagatgttgtcaagaacctcacgagactagacgatgtacaggagtttctaaaggtaccaaaacgtaagttaaagagtaggcaagtgaagattcatggaggttcattgtcaaaacatgtacagaattgggaagaggtcatgaccacacttaaaggaaccaatttcgaaaatttcttacaccaagaattttaa

SEQ ID NO: 80572 - protein, 491 aa, Arabidopsis thaliana
  peptide (1)..(491): Ceres Seq. ID no. 12656447
MECSNMKQHQYHGSYAEPRISFSSGFAATKHEMIKYKEAPVSSDDFEFGVENFSMTTADEIFFDGMILPLKEEVNTTKRMSTLREELSEEDGDSPRSKSKGSSGWWRERLGLAFVRSKKDHKKMCLKKIQCLYVLFFSDLSESLSIATAMAEDPSFLPKDGFVLKLPKKSSLVLRMVVLLFVMVCAVYICSICLKQIGVSPNYGFLNVEVFERPCPEPNIEPWDIPFVHYPKPKTYNRDECSCHPVRYFAILSMQRSGSGWFETLLNNHTNISSNGEIFSVKDRRANVSTIFETLDKVYNLDWLSSASKNECTSAVGFKWMLNQGLMKHHEEIVEYFKTRGVSAIFLFRKNLLRRMISVLANSYDRDAKLLNGTHKSHTHSAKEAEILAGYKPMINTTLLINELRQIQEMTLKALTYFNTTRHILVYYEDVVKNLTRLDDVQEFLKVPKRKLKSRQVKIHGGSLSKHVQNWEEVMTTLKGTNFENFLHQEF

SEQ ID NO: 80573 - protein, 486 aa, Arabidopsis thaliana
  peptide (1)..(486): Ceres Seq. ID no. 12656448
MKQHQYHGSYAEPRISFSSGFAATKHEMIKYKEAPVSSDDFEFGVENFSMTTADEIFFDGMILPLKEEVNTTKRMSTLREELSEEDGDSPRSKSKGSSGWWRERLGLAFVRSKKDHKKMCLKKIQCLYVLFFSDLSESLSIATAMAEDPSFLPKDGFVLKLPKKSSLVLRMVVLLFVMVCAVYICSICLKQIGVSPNYGFLNVEVFERPCPEPNIEPWDIPFVHYPKPKTYNRDECSCHPVRYFAILSMQRSGSGWFETLLNNHTNISSNGEIFSVKDRRANVSTIFETLDKVYNLDWLSSASKNECTSAVGFKWMLNQGLMKHHEEIVEYFKTRGVSAIFLFRKNLLRRMISVLANSYDRDAKLLNGTHKSHTHSAKEAEILAGYKPMINTTLLINELRQIQEMTLKALTYFNTTRHILVYYEDVVKNLTRLDDVQEFLKVPKRKLKSRQVKIHGGSLSKHVQNWEEVMTTLKGTNFENFLHQEF

SEQ ID NO: 80574 - protein, 459 aa, Arabidopsis thaliana
  peptide (1)..(459): Ceres Seq. ID no. 12656449
MIKYKEAPVSSDDFEFGVENFSMTTADEIFFDGMILPLKEEVNTTKRMSTLREELSEEDGDSPRSKSKGSSGWWRERLGLAFVRSKKDHKKMCLKKIQCLYVLFFSDLSESLSIATAMAEDPSFLPKDGFVLKLPKKSSLVLRMVVLLFVMVCAVYICSICLKQIGVSPNYGFLNVEVFERPCPEPNIEPWDIPFVHYPKPKTYNRDECSCHPVRYFAILSMQRSGSGWFETLLNNHTNISSNGEIFSVKDRRANVSTIFETLDKVYNLDWLSSASKNECTSAVGFKWMLNQGLMKHHEEIVEYFKTRGVSAIFLFRKNLLRRMISVLANSYDRDAKLLNGTHKSHTHSAKEAEILAGYKPMINTTLLINELRQIQEMTLKALTYFNTTRHILVYYEDVVKNLTRLDDVQEFLKVPKRKLKSRQVKIHGGSLSKHVQNWEEVMTTLKGTNFENFLHQEF

SEQ ID NO: 80575 - DNA, 1464 bp, Arabidopsis thaliana
  misc_feature (1)..(1464): Ceres Seq. ID no. 12656454
  misc_feature (1)..(1464): Ortholog of  Ceres SEQ ID NO 13503610 as cited in SEQ ID NO 62416
  misc_feature (1)..(1464): Ortholog of  Ceres SEQ ID NO 13657610 as cited in SEQ ID NO 66165
  misc_feature (1)..(1464): Ortholog of  Ceres SEQ ID NO 13598312 as cited in SEQ ID NO 68448
  misc_feature (1)..(1464): Ortholog of  Ceres SEQ ID NO 13596100 as cited in SEQ ID NO 68573
atggatgctaatggaggacctgtacagatccggacccaaaactacgtcaagcttggttatcactatctgatcactcacttttttaaactcatgttcctccctctaatggctgttttgttcatgaatgtctcattgttaagcctaaaccatcttcagctctattacaattccaccggattcatcttcgtcattactctcgccattgtcggatccattgtcttcttcatgtctcgacctagatccatctaccttctagattactcttgctacctcccgccttcgagtcaaaaagttagctaccagaaattcatgaacaactctagtttgattcaagatttcagcgaaacttctcttgagttccagaggaagatcttgattcgctctggtctcggtgaagagacttatttaccggattctattcactctatccctccgcgtcctactatggctgcagcgcgtgaagaagcggagcaggtaatcttcggtgcactcgacaatcttttcgagaatacaaaaatcaatcctagggagattggtgttcttgttgtgaattgtagtttgtttaaccctacgccttctttatccgccatgattgttaacaagtataagcttagaggaaacattaagagctttaaccttggaggaatgggatgtagtgctggtgttatcgcggtagatctagctagtgatatgttacaaatccataggaacacttttgctcttgtggttagtactgagaacatcactcagaattggtattttggtaacaagaaagcaatgttgatccctaattgcttgtttagagttggtggttccgcggttctgctttcgaacaagcctttggatcgaaaacgatccaagtataagcttgttcatacggtcaggactcataaaggatctgatgagaacgcattcaattgtgtgtatcaagaacaagatgagtgtttgaaaaccggagtttctttgtctaaagatcttatggctatagctggagaagctttaaagacgaatatcacttctttgggtcctctggttcttcctataagcgagcagattctgttctttgcgacttttgttgctaagagattgttcaatgacaagaagaagaagccttacataccggatttcaagcttgctttagatcatttctgtattcacgcgggaggtagagccgtgattgatgagctagagaagagtttaaagctttctccaaaacatgttgaggcgtctagaatgactttgcatagatttggaaacacttcctctagctctatatggtatgaattggcttacacggaagctaaaggaagaatgaggaaaggaaacagagtttggcagattgcttttggtagcgggtttaagtgtaacagcgcggtttgggtggctcttcgcaatgtcgagccctcggttaacaatccttgggaacattgcatccatagatatccggttaagatcgatctttga

SEQ ID NO: 80576 - protein, 487 aa, Arabidopsis thaliana
  peptide (1)..(487): Ceres Seq. ID no. 12656455
MDANGGPVQIRTQNYVKLGYHYLITHFFKLMFLPLMAVLFMNVSLLSLNHLQLYYNSTGFIFVITLAIVGSIVFFMSRPRSIYLLDYSCYLPPSSQKVSYQKFMNNSSLIQDFSETSLEFQRKILIRSGLGEETYLPDSIHSIPPRPTMAAAREEAEQVIFGALDNLFENTKINPREIGVLVVNCSLFNPTPSLSAMIVNKYKLRGNIKSFNLGGMGCSAGVIAVDLASDMLQIHRNTFALVVSTENITQNWYFGNKKAMLIPNCLFRVGGSAVLLSNKPLDRKRSKYKLVHTVRTHKGSDENAFNCVYQEQDECLKTGVSLSKDLMAIAGEALKTNITSLGPLVLPISEQILFFATFVAKRLFNDKKKKPYIPDFKLALDHFCIHAGGRAVIDELEKSLKLSPKHVEASRMTLHRFGNTSSSSIWYELAYTEAKGRMRKGNRVWQIAFGSGFKCNSAVWVALRNVEPSVNNPWEHCIHRYPVKIDL

SEQ ID NO: 80577 - protein, 457 aa, Arabidopsis thaliana
  peptide (1)..(457): Ceres Seq. ID no. 12656456
MFLPLMAVLFMNVSLLSLNHLQLYYNSTGFIFVITLAIVGSIVFFMSRPRSIYLLDYSCYLPPSSQKVSYQKFMNNSSLIQDFSETSLEFQRKILIRSGLGEETYLPDSIHSIPPRPTMAAAREEAEQVIFGALDNLFENTKINPREIGVLVVNCSLFNPTPSLSAMIVNKYKLRGNIKSFNLGGMGCSAGVIAVDLASDMLQIHRNTFALVVSTENITQNWYFGNKKAMLIPNCLFRVGGSAVLLSNKPLDRKRSKYKLVHTVRTHKGSDENAFNCVYQEQDECLKTGVSLSKDLMAIAGEALKTNITSLGPLVLPISEQILFFATFVAKRLFNDKKKKPYIPDFKLALDHFCIHAGGRAVIDELEKSLKLSPKHVEASRMTLHRFGNTSSSSIWYELAYTEAKGRMRKGNRVWQIAFGSGFKCNSAVWVALRNVEPSVNNPWEHCIHRYPVKIDL

SEQ ID NO: 80578 - protein, 452 aa, Arabidopsis thaliana
  peptide (1)..(452): Ceres Seq. ID no. 12656457
MAVLFMNVSLLSLNHLQLYYNSTGFIFVITLAIVGSIVFFMSRPRSIYLLDYSCYLPPSSQKVSYQKFMNNSSLIQDFSETSLEFQRKILIRSGLGEETYLPDSIHSIPPRPTMAAAREEAEQVIFGALDNLFENTKINPREIGVLVVNCSLFNPTPSLSAMIVNKYKLRGNIKSFNLGGMGCSAGVIAVDLASDMLQIHRNTFALVVSTENITQNWYFGNKKAMLIPNCLFRVGGSAVLLSNKPLDRKRSKYKLVHTVRTHKGSDENAFNCVYQEQDECLKTGVSLSKDLMAIAGEALKTNITSLGPLVLPISEQILFFATFVAKRLFNDKKKKPYIPDFKLALDHFCIHAGGRAVIDELEKSLKLSPKHVEASRMTLHRFGNTSSSSIWYELAYTEAKGRMRKGNRVWQIAFGSGFKCNSAVWVALRNVEPSVNNPWEHCIHRYPVKIDL

SEQ ID NO: 80579 - DNA, 1521 bp, Arabidopsis thaliana
  misc_feature (1)..(1521): Ceres Seq. ID no. 12656458
  misc_feature (1)..(1521): Ortholog of  Ceres SEQ ID NO 13503610 as cited in SEQ ID NO 62416
  misc_feature (1)..(1521): Ortholog of  Ceres SEQ ID NO 13657610 as cited in SEQ ID NO 66165
  misc_feature (1)..(1521): Ortholog of  Ceres SEQ ID NO 13598312 as cited in SEQ ID NO 68448
  misc_feature (1)..(1521): Ortholog of  Ceres SEQ ID NO 13596100 as cited in SEQ ID NO 68573
atgacgtccgttaacgttaagctcctttaccgttacgtcttaaccaactttttcaacctctgtttgttcccgttaacggcgttcctcgccggaaaagcctctcggcttaccataaacgatctccacaacttcctttcctatctccaacacaaccttataacagtaactttactctttgctttcactgttttcggtttggttctctacatcgtaacccgacccaatccggtttatctcgttgactactcgtgttaccttccaccaccgcatctcaaagttagtgtctctaaagtcatggatattttctaccaaataagaaaagctgatacttcttcacggaacgtggcatgtgatgatccgtcctcgctcgatttcctgaggaagattcaagagcgttcaggtctaggtgatgagacgtacagtcctgagggactcattcacgtaccaccgcggaagacttttgcagcgtcacgtgaagagacagagaaggttatcatcggtgcgctcgaaaatctattcgagaacaccaaagttaaccctagagagattggtatacttgtggtgaactcaagcatgtttaatccaactccttcgctatccgctatggtcgttaatactttcaagctccgaagcaacatcaaaagctttaatctaggaggaatgggttgtagtgctggtgttattgccattgatttggctaaagacttgttgcatgttcataaaaacacttatgctcttgtggtgagcactgagaacatcacacaaggcatttatgctggagaaaatagatcaatgatggttagcaattgcttgtttcgtgttggtggggccgcgattttgctctctaacaagtcgggagaccggagacggtccaagtacaagctagttcacacggtccgaacgcatactggagctgatgacaagtcttttcgatgtgtgcaacaagaagacgatgagagcggcaaaatcggagtttgtctgtcaaaggacataaccaatgttgcggggacaacacttacgaaaaatatagcaacattgggtccgttgattcttcctttaagcgaaaagtttctttttttcgctaccttcgtcgccaagaaacttctaaaggataaaatcaagcattactatgttccggatttcaagcttgctgttgaccatttctgtattcatgccggaggcagagccgtgatcgatgagctagagaagaacttaggactatcgccgatcgatgtggaggcatctagatcaacgttacatagatttgggaatacttcatctagctcaatttggtatgaattagcatacatagaggcaaagggaagaatgaagaaagggaataaagcttggcagattgctttaggatcagggtttaagtgtaatagtgcggtttgggtggctctacgcaatgtcaaggcatcggcaaatagtccttggcaacattgcatcgatagatatccggttaaaattgattctgatttgtcaaagtcaaagactcatgtccaaaacggtcggtcctaa

SEQ ID NO: 80580 - protein, 506 aa, Arabidopsis thaliana
  peptide (1)..(506): Ceres Seq. ID no. 12656459
MTSVNVKLLYRYVLTNFFNLCLFPLTAFLAGKASRLTINDLHNFLSYLQHNLITVTLLFAFTVFGLVLYIVTRPNPVYLVDYSCYLPPPHLKVSVSKVMDIFYQIRKADTSSRNVACDDPSSLDFLRKIQERSGLGDETYSPEGLIHVPPRKTFAASREETEKVIIGALENLFENTKVNPREIGILVVNSSMFNPTPSLSAMVVNTFKLRSNIKSFNLGGMGCSAGVIAIDLAKDLLHVHKNTYALVVSTENITQGIYAGENRSMMVSNCLFRVGGAAILLSNKSGDRRRSKYKLVHTVRTHTGADDKSFRCVQQEDDESGKIGVCLSKDITNVAGTTLTKNIATLGPLILPLSEKFLFFATFVAKKLLKDKIKHYYVPDFKLAVDHFCIHAGGRAVIDELEKNLGLSPIDVEASRSTLHRFGNTSSSSIWYELAYIEAKGRMKKGNKAWQIALGSGFKCNSAVWVALRNVKASANSPWQHCIDRYPVKIDSDLSKSKTHVQNGRS

SEQ ID NO: 80581 - protein, 408 aa, Arabidopsis thaliana
  peptide (1)..(408): Ceres Seq. ID no. 12656460
MDIFYQIRKADTSSRNVACDDPSSLDFLRKIQERSGLGDETYSPEGLIHVPPRKTFAASREETEKVIIGALENLFENTKVNPREIGILVVNSSMFNPTPSLSAMVVNTFKLRSNIKSFNLGGMGCSAGVIAIDLAKDLLHVHKNTYALVVSTENITQGIYAGENRSMMVSNCLFRVGGAAILLSNKSGDRRRSKYKLVHTVRTHTGADDKSFRCVQQEDDESGKIGVCLSKDITNVAGTTLTKNIATLGPLILPLSEKFLFFATFVAKKLLKDKIKHYYVPDFKLAVDHFCIHAGGRAVIDELEKNLGLSPIDVEASRSTLHRFGNTSSSSIWYELAYIEAKGRMKKGNKAWQIALGSGFKCNSAVWVALRNVKASANSPWQHCIDRYPVKIDSDLSKSKTHVQNGRS

SEQ ID NO: 80582 - protein, 315 aa, Arabidopsis thaliana
  peptide (1)..(315): Ceres Seq. ID no. 12656461
MFNPTPSLSAMVVNTFKLRSNIKSFNLGGMGCSAGVIAIDLAKDLLHVHKNTYALVVSTENITQGIYAGENRSMMVSNCLFRVGGAAILLSNKSGDRRRSKYKLVHTVRTHTGADDKSFRCVQQEDDESGKIGVCLSKDITNVAGTTLTKNIATLGPLILPLSEKFLFFATFVAKKLLKDKIKHYYVPDFKLAVDHFCIHAGGRAVIDELEKNLGLSPIDVEASRSTLHRFGNTSSSSIWYELAYIEAKGRMKKGNKAWQIALGSGFKCNSAVWVALRNVKASANSPWQHCIDRYPVKIDSDLSKSKTHVQNGRS

SEQ ID NO: 80583 - DNA, 1009 bp, Arabidopsis thaliana
  misc_feature (1)..(1009): Ceres Seq. ID no. 12656471
  misc_feature (1)..(1009): Ortholog of  Ceres SEQ ID NO 14313170 as cited in SEQ ID NO 20674
atcggaatatctctcttcctctgtttcttcgccattctctcagcttttctccttcttcttcgtctttgtcagagtgaatggagctgtggacagaagctagagccttaaaggcaagtctaagaggagaatctactatatctctcaaacatcaccaagtgattgtgtcggaagatttaagccgaacttcttccttgccggaagatttctccgttgagtgtttcctcgatttctcagaaggtcaaaaagaagaagaagaagaagttgtctctgtttcttcttcacaagagcaagaagaacaagaacatgattgtgtctttagttcacaaccttgcatctttgatcaacttccttctttgccggatgaagatgtggaagagcttgaatgggtatctcgtgttgtggatgattgttcatcaccagaagtttcacttctcttaacacaaacacataaaaccaaaccaagcttctcaagaattccggttaaaccaagaaccaaacggtctcggaacagtttaaccggtagtcgtgtttggccactcgtttcaaccaatcatcaacatgcagcaacagagcagttgaggaagaagaaacaagaaactgtccttgtgtttcaacgaagatgcagccattgtggcacaaacaacacaccacagtggagaaccggtccggtcggtccaaaaaccttatgtaatgcatgtggagtccggtttaagtctggtaggctctgcccggaatacagaccggcggatagtccgacgttctcgaatgagattcactcaaatcttcataggaaggttctggaattaagaaagagtaaagagttgggtgaagaaacaggtgaagctagtactaaatcagacccagtcaaatttggcagcaagtggtagataagacttaggtaaaacctactttttgtaacattatctgtagtgttgtaatttaacaacttgcttcttaacattttgaaactgtttcaggaactagtcttaagtaaacaatggttttctat

SEQ ID NO: 80584 - protein, 269 aa, Arabidopsis thaliana
  peptide (1)..(269): Ceres Seq. ID no. 12656472
MELWTEARALKASLRGESTISLKHHQVIVSEDLSRTSSLPEDFSVECFLDFSEGQKEEEEEVVSVSSSQEQEEQEHDCVFSSQPCIFDQLPSLPDEDVEELEWVSRVVDDCSSPEVSLLLTQTHKTKPSFSRIPVKPRTKRSRNSLTGSRVWPLVSTNHQHAATEQLRKKKQETVLVFQRRCSHCGTNNTPQWRTGPVGPKTLCNACGVRFKSGRLCPEYRPADSPTFSNEIHSNLHRKVLELRKSKELGEETGEASTKSDPVKFGSKW

SEQ ID NO: 80585 - DNA, 1599 bp, Arabidopsis thaliana
  misc_feature (1)..(1599): Ceres Seq. ID no. 12656486
  misc_feature (1)..(1599): Ortholog of  Ceres SEQ ID NO 14302875 as cited in SEQ ID NO 66242
  misc_feature (1)..(1599): Ortholog of  Ceres SEQ ID NO 13660287 as cited in SEQ ID NO 67316
atgtgtaacccatcaacaacaacaacaaccaccggttcagagaaccaagaatctcgaaccggactcttcctcgatctcttctcgatcaatagctttgaacccacaaagagaaatctccggcattgtgagaacagaggatctcctcttatggcagaagctgtaacagaggcgaaatctctcttcacgttagcttttccgatcgccgtgacggctcttgtcctctacctacgctcagccgtatcaatgtttttcttgggtcaacttggtgacctcgaattagccgccggttcactcgccattgcctttgctaacataaccggttactctgttttatccggtttagctcttggtatggaaccactctgttctcaagccttcggtgctcaccgcttcaaactcctttccctaaccctccatcgaaccgtggtttttctcttggtttgttgcgtaccgatctcggttctctggtttaacgtcggcaaaatatcggtttaccttcaccaagaccccgacatcgcgaaattagctcagacatatctcatcttctccctacctgatcttctcaccaacactcttcttcatccaatcagaatctaccttcgtgctcaaggcatcattcaccccgtaaccctagcttctctctccggcgctgtttttcacctcccggctaatcttttcttagtctcttacctccgtcttggtttaaccggcgtagcagtcgcttcctccatcacaaacatcttcgtcgttgctttcctcgtttgctacgtctgggcgagtggtcttcacgcgcctacatggactgacccgacccgtgattgtttccgcgggtgggctccgttgctgcgtctcgcgggaccaagctgtgtctccgtgtgtttggaatggtggtggtacgagatcatgatcgttttgtgtggtttgctcgtgaatccaagatcgacggtggctgctatgggcgttttgatccagacgacgtcgtttctttatgttttcccgtcttctcttagctttgctgtctcaactagagtcggaaacgaacttggagccaaccgtcccaagacagcaaagctaacggctacggtggctatcgttttcgcggcggttacagggattatagcggcggcgtttgcttactcagtcagaaacgcttggggaaggattttcaccggagacaaagagatactccagctaacagcggcggcgttaccgatattaggtctatgcgagatcggaaactgtcctcagacggtgggatgcggcgtcgtgagaggaacagcacgaccgtcaacggcggcgaacgtgaaccttggagcgttttatctggtgggcatgccggtggcagtgggtctcgggttttgggccggaattgggtttaatgggctttgggtaggactacttgcggcgcagattagctgcgcaggtcttatgatgtacgtggtggggaccacagattgggaatcggaggctaagaaggcgcagacgctaacgtgcgctgagactgtagagaatgatattattaaggcggtggtggcgagtactatagacggtgagtgcgatgaggctgagccgttgattcgcatcacggtgctttattaa

SEQ ID NO: 80586 - protein, 532 aa, Arabidopsis thaliana
  peptide (1)..(532): Ceres Seq. ID no. 12656487
MCNPSTTTTTTGSENQESRTGLFLDLFSINSFEPTKRNLRHCENRGSPLMAEAVTEAKSLFTLAFPIAVTALVLYLRSAVSMFFLGQLGDLELAAGSLAIAFANITGYSVLSGLALGMEPLCSQAFGAHRFKLLSLTLHRTVVFLLVCCVPISVLWFNVGKISVYLHQDPDIAKLAQTYLIFSLPDLLTNTLLHPIRIYLRAQGIIHPVTLASLSGAVFHLPANLFLVSYLRLGLTGVAVASSITNIFVVAFLVCYVWASGLHAPTWTDPTRDCFRGWAPLLRLAGPSCVSVCLEWWWYEIMIVLCGLLVNPRSTVAAMGVLIQTTSFLYVFPSSLSFAVSTRVGNELGANRPKTAKLTATVAIVFAAVTGIIAAAFAYSVRNAWGRIFTGDKEILQLTAAALPILGLCEIGNCPQTVGCGVVRGTARPSTAANVNLGAFYLVGMPVAVGLGFWAGIGFNGLWVGLLAAQISCAGLMMYVVGTTDWESEAKKAQTLTCAETVENDIIKAVVASTIDGECDEAEPLIRITVLY

SEQ ID NO: 80587 - protein, 483 aa, Arabidopsis thaliana
  peptide (1)..(483): Ceres Seq. ID no. 12656488
MAEAVTEAKSLFTLAFPIAVTALVLYLRSAVSMFFLGQLGDLELAAGSLAIAFANITGYSVLSGLALGMEPLCSQAFGAHRFKLLSLTLHRTVVFLLVCCVPISVLWFNVGKISVYLHQDPDIAKLAQTYLIFSLPDLLTNTLLHPIRIYLRAQGIIHPVTLASLSGAVFHLPANLFLVSYLRLGLTGVAVASSITNIFVVAFLVCYVWASGLHAPTWTDPTRDCFRGWAPLLRLAGPSCVSVCLEWWWYEIMIVLCGLLVNPRSTVAAMGVLIQTTSFLYVFPSSLSFAVSTRVGNELGANRPKTAKLTATVAIVFAAVTGIIAAAFAYSVRNAWGRIFTGDKEILQLTAAALPILGLCEIGNCPQTVGCGVVRGTARPSTAANVNLGAFYLVGMPVAVGLGFWAGIGFNGLWVGLLAAQISCAGLMMYVVGTTDWESEAKKAQTLTCAETVENDIIKAVVASTIDGECDEAEPLIRITVLY

SEQ ID NO: 80588 - protein, 451 aa, Arabidopsis thaliana
  peptide (1)..(451): Ceres Seq. ID no. 12656489
MFFLGQLGDLELAAGSLAIAFANITGYSVLSGLALGMEPLCSQAFGAHRFKLLSLTLHRTVVFLLVCCVPISVLWFNVGKISVYLHQDPDIAKLAQTYLIFSLPDLLTNTLLHPIRIYLRAQGIIHPVTLASLSGAVFHLPANLFLVSYLRLGLTGVAVASSITNIFVVAFLVCYVWASGLHAPTWTDPTRDCFRGWAPLLRLAGPSCVSVCLEWWWYEIMIVLCGLLVNPRSTVAAMGVLIQTTSFLYVFPSSLSFAVSTRVGNELGANRPKTAKLTATVAIVFAAVTGIIAAAFAYSVRNAWGRIFTGDKEILQLTAAALPILGLCEIGNCPQTVGCGVVRGTARPSTAANVNLGAFYLVGMPVAVGLGFWAGIGFNGLWVGLLAAQISCAGLMMYVVGTTDWESEAKKAQTLTCAETVENDIIKAVVASTIDGECDEAEPLIRITVLY

SEQ ID NO: 80589 - DNA, 1917 bp, Arabidopsis thaliana
  misc_feature (1)..(1917): Ceres Seq. ID no. 12656498
  misc_feature (1)..(1917): Ortholog of  Ceres SEQ ID NO 13596816 as cited in SEQ ID NO 62287
acaacgttcacctccagtgacttctctctatctctaaatctctcttgcgtcacttaaaaagtcggtgcttcctacttaagtgttcttgagagtgagacgtttcatttctgggttcaagggtgtagaataaacacttgagtgaagtttaaagcttgagaaagacagaggaaagaaaaatgggtcaaagactgaatctagtcttctggatttttgtctccattcttgcctttttgaattttggtatggctagcaagattgggatatgttatggaagaaatgctgataatcttccaagtcctaacagagtctctgagctaatccaacatctcaacatcaaatttgttcgaatctatgacgccaacattgatgttcttaaagcttttgcaaacactggaatcgagcttatgattggtgtccctaacgctgatctacttgcatttgctcagtttcaatccaatgtagatacttggcttagcaacaacatccttccttattatccatctaccaaaatcacttcgatttcagttggtcttgaagtaactgaagcaccagacaatgccactggtctagtcttacctgcgatgcgaaacattcacacagctcttaagaagtctggtttggataaaaagatcaagatctcgagctcacattcccttgctatcttgtcacgctccttcccgccttcgtcagcttctttcagcaagaagcattcagcgttcttgaaaccaatgcttgagttcttggttgagaatgagtctccctttatgatagacctgtatccgtattatgcttacagagattccactgaaaaagttccgttggagtatgctctattcgagtcatcttcgcaggttgttgatcctgccacgggtttgctttactccaacatgtttgatgctcagcttgacgctatctatttcgctttgactgctatgagctttaagaccgttaaggttatggtcactgagtccgggtggccgagtaaaggctcgcctaaagagacagctgcaactcctgagaacgctctggcttacaataccaacctcatccgccatgtcattggtgatccaggtactcctgcaaagcctggagaagagatagatgtgtacttattctcgttgttcaatgagaaccggaagcctgggatagaatccgagagaaactggggaatgttctacgcgaacggaactaatgtttacgctttagacttcactggggaaaacactacgcctgtttctccaacaaattcaaccacaggtaccagtccaagtccaagttcaagtccaattatcaacggtaactcgacagtaaccatcggaggaggaggaggaggaggaaccaagaaatggtgtattgcttcttcacaagcttcggtaacggaactgcagactgcattggactgggcttgtggtcctggaaatgttgattgttcagctgttcaaccagaccaaccttgctttgaaccagatactgttctctcacacgcatcttatgcattcaacacttattaccaacagagcggagcaagcagcatagattgcagctttaatggagccagcgttgaagttgacaaggatccaagttatggtaactgtttgtacatgattgctccggctaccgacggattcaacagaacaatggcgggtaatatcactggaaacataactgccattgattcccccttggcttcgccttcgtcaaccaatgaagcattcagacaaatggtggttgcagtctctgttttgttgccgtgttttgtagtttgttcgagtatttggtgacaagtgtgtacatgaatgcactgtcgccttcttttgtatgaagttttgagtagtgagcgaacttaaactagaatttagcccaactgttgaacttggtaatttctttcaccacgtaaccgaaatgtcaagcttggtg

SEQ ID NO: 80590 - protein, 534 aa, Arabidopsis thaliana
  peptide (1)..(534): Ceres Seq. ID no. 12656499
MGQRLNLVFWIFVSILAFLNFGMASKIGICYGRNADNLPSPNRVSELIQHLNIKFVRIYDANIDVLKAFANTGIELMIGVPNADLLAFAQFQSNVDTWLSNNILPYYPSTKITSISVGLEVTEAPDNATGLVLPAMRNIHTALKKSGLDKKIKISSSHSLAILSRSFPPSSASFSKKHSAFLKPMLEFLVENESPFMIDLYPYYAYRDSTEKVPLEYALFESSSQVVDPATGLLYSNMFDAQLDAIYFALTAMSFKTVKVMVTESGWPSKGSPKETAATPENALAYNTNLIRHVIGDPGTPAKPGEEIDVYLFSLFNENRKPGIESERNWGMFYANGTNVYALDFTGENTTPVSPTNSTTGTSPSPSSSPIINGNSTVTIGGGGGGGTKKWCIASSQASVTELQTALDWACGPGNVDCSAVQPDQPCFEPDTVLSHASYAFNTYYQQSGASSIDCSFNGASVEVDKDPSYGNCLYMIAPATDGFNRTMAGNITGNITAIDSPLASPSSTNEAFRQMVVAVSVLLPCFVVCSSIW

SEQ ID NO: 80591 - protein, 512 aa, Arabidopsis thaliana
  peptide (1)..(512): Ceres Seq. ID no. 12656500
MASKIGICYGRNADNLPSPNRVSELIQHLNIKFVRIYDANIDVLKAFANTGIELMIGVPNADLLAFAQFQSNVDTWLSNNILPYYPSTKITSISVGLEVTEAPDNATGLVLPAMRNIHTALKKSGLDKKIKISSSHSLAILSRSFPPSSASFSKKHSAFLKPMLEFLVENESPFMIDLYPYYAYRDSTEKVPLEYALFESSSQVVDPATGLLYSNMFDAQLDAIYFALTAMSFKTVKVMVTESGWPSKGSPKETAATPENALAYNTNLIRHVIGDPGTPAKPGEEIDVYLFSLFNENRKPGIESERNWGMFYANGTNVYALDFTGENTTPVSPTNSTTGTSPSPSSSPIINGNSTVTIGGGGGGGTKKWCIASSQASVTELQTALDWACGPGNVDCSAVQPDQPCFEPDTVLSHASYAFNTYYQQSGASSIDCSFNGASVEVDKDPSYGNCLYMIAPATDGFNRTMAGNITGNITAIDSPLASPSSTNEAFRQMVVAVSVLLPCFVVCSSIW

SEQ ID NO: 80592 - protein, 458 aa, Arabidopsis thaliana
  peptide (1)..(458): Ceres Seq. ID no. 12656501
MIGVPNADLLAFAQFQSNVDTWLSNNILPYYPSTKITSISVGLEVTEAPDNATGLVLPAMRNIHTALKKSGLDKKIKISSSHSLAILSRSFPPSSASFSKKHSAFLKPMLEFLVENESPFMIDLYPYYAYRDSTEKVPLEYALFESSSQVVDPATGLLYSNMFDAQLDAIYFALTAMSFKTVKVMVTESGWPSKGSPKETAATPENALAYNTNLIRHVIGDPGTPAKPGEEIDVYLFSLFNENRKPGIESERNWGMFYANGTNVYALDFTGENTTPVSPTNSTTGTSPSPSSSPIINGNSTVTIGGGGGGGTKKWCIASSQASVTELQTALDWACGPGNVDCSAVQPDQPCFEPDTVLSHASYAFNTYYQQSGASSIDCSFNGASVEVDKDPSYGNCLYMIAPATDGFNRTMAGNITGNITAIDSPLASPSSTNEAFRQMVVAVSVLLPCFVVCSSIW

SEQ ID NO: 80593 - DNA, 3216 bp, Arabidopsis thaliana
  misc_feature (1)..(3216): Ceres Seq. ID no. 12656516
  misc_feature (1)..(3216): Ortholog of  Ceres SEQ ID NO 14304871 as cited in SEQ ID NO 54194
  misc_feature (1)..(3216): Ortholog of  Ceres SEQ ID NO 13597751 as cited in SEQ ID NO 60721
atggcggcttcacgcctgaaaatcctgaagaacaaaaaggatacacagattaagcaactgaggagagaattagctcatttgcttgaatccggccaaacccaaacagctaaaattcgggtggagcatgtggtaagagaagaaaagacagtagctgcttatgagctcgttggtatatattgtgaacttcttgttgctcgtttgggtgtcattgactctcaaaagacatgtcctaatgatcttaaggaagctgtcgcaagtgtcttatacgcttctcaaaggttaacagatgttggggagctctcagatattgttaagcatttctctgcaaagtatggtaaagattttgtttcagctgctattggtttgcaaccggattctggtgtgagtcgtttgttagtagagaaattgtctgttaaagctcctgatggtccaacaaagatcaaaattttgacggagattgctacgcagcataatgtaacttgggaagcagagtctttggttgaatcagatccaaaggaaaccatgtcggcgagtggagcaagttcatctgtgtctcagccagcaactggaataaagtcggagtcttcaagaatccagaacaatcaacctccagtatttcaagctgcagctactgtcaatgtgtcgcagaattcatatgcaactgatgggagatcttcaagccgcatgacatctactgatttcaacgttgggaagacacctgatcactatcatcaagacccaaaaccttctggagatagagttgacggtagagaacacagggatcacaatccaggtcatggggatacatctccattcgaaacgaaatttgttgatgcaacgagtgctgcacgtgctgctgctgaatctgcggaaagagcgagttttgctgcacgtagagctgctgagctttcaagtaaagaaagaatgatgatgatgcagaattcaacagagtcgcggaactcatcctcgtatgagaatcttagaagcaatcccccacatagtcgtactagtagctcaaatatgcaaggcggaggttttggtaaagaagagttattaaaaagcaataacaggcaagtagatcaatctactactactactagagcagagtcatctaagaagactgttgatgagctatcagaaaatacttcatggaggagaggtcattctcgggagaactcattggagatgaggccgaatgattcctttgctaaaataggtagagagaaacagcagccaggtatggatgatataaaccttagcagttcagcagatgttctaaataagaaacaatcaagccgagcttcatcgcattcaccgtcaagcaatttttccgatgataatgatgtcactgccttggaccatatcgattcaccaagtatctttgaggaaaacaaatttcagagcactgttggagatagagagagctacaatgacagtcctgttgttgttgttgctccggcttttgatgactatagctcgttttttgacaaacctcaattcgacacagaagatgcttatcatgatgaaccagaacaaggattaggattttcattgcttggcagtagcagcaaaacatcggatcatatgcctacagagataagttcatggagcctcgaaggacacaaggatctgggaaaactcagctcagcctcaacctcacaggttcttgaaaaggagaagccaagttctcctccaacatttgatgatggtcctacaagtcctccagcttctctgcatgagcctgagccgtctgcaaagtttgatgattatgaccgagattctgaaagtgaagaagacaatctaggaagactttccggacgtgcagaaggaaagtcgaagctgacagctcagaagtctcacatgtctgaaggtcctgatgatttaggacgttactttttcccatcagacacagaagaccaaggagatgattccaaaacacaggaagaatctgacgcagagactcctacaggtcttaagtttggacctctagccagtggacttgagaatgaaacgactctcccatcttatggatcgagtccgccaagagacaagacgtcgtctaaatctataaaagagtatcttccaacagaggttgatccgtcaaggtcttcttctctgcagacagcttcttctagcagtattaggaatgaactttacactcagaaagcaagtaactcagacaaaagaccaagctctatacctccagattcatcttctagtgatgatgaatcagatatggaacttccaaagagagtttctttcagatatcaagagaaaagaactgagtcaagaacccggcccacacatctacattcgggtgtcagccataaggacttggaggaagaaatcccgactcgagcttctaccagaagtcaagataggaggacccacaagaccacccctgcctctgcttctgcttcatattttcacacaatgtccagtgacgatgaagatgagaaagaagtccatagagatactgcacacattcaaaccaggccttatatttccatctcaagaagaacaaagggccaagagagaagaccatccctcgttactgcaaaaattgacaaagtttcttttgatgaagaatctccaccaaagctaagtcctgaggccaagccactgactaagcaacaaggatcagcttcctctttaagctatcttcccaaaactgagaaagtttctcacgatcaagaatctcatccaaagctaggtcttggggccaaaccactgattaagcaacaaggatcagcttcttctttaagctttcttccaaaaaccaacaaagcttctcccgatcaagattctcctccaaagctagttccaaaggaaaaaccagcagctaagcaacgaggatcagcttcttctttaagctttcttccaaaaactgacaaagcttctcccgatcaagattctcctccaaagctacttccaaaggaaaagccagcagctaagcaacaaggatcagcaacttcttcaagctctcttccaaaaactgaaaaaatctctcactatagagaatctccttcaaagctaactccagaggctaagtcaatggctaagcaagaaggattagcttcttcttcaagctcgcttcccaaaactgtgacatcacctgacccagaaactccggcaaaggagaaagctagccatgtacatcccaaactcccagattacgatgacatatttgccaagctcggggctcttcgtcgctga

SEQ ID NO: 80594 - protein, 1071 aa, Arabidopsis thaliana
  peptide (1)..(1071): Ceres Seq. ID no. 12656517
MAASRLKILKNKKDTQIKQLRRELAHLLESGQTQTAKIRVEHVVREEKTVAAYELVGIYCELLVARLGVIDSQKTCPNDLKEAVASVLYASQRLTDVGELSDIVKHFSAKYGKDFVSAAIGLQPDSGVSRLLVEKLSVKAPDGPTKIKILTEIATQHNVTWEAESLVESDPKETMSASGASSSVSQPATGIKSESSRIQNNQPPVFQAAATVNVSQNSYATDGRSSSRMTSTDFNVGKTPDHYHQDPKPSGDRVDGREHRDHNPGHGDTSPFETKFVDATSAARAAAESAERASFAARRAAELSSKERMMMMQNSTESRNSSSYENLRSNPPHSRTSSSNMQGGGFGKEELLKSNNRQVDQSTTTTRAESSKKTVDELSENTSWRRGHSRENSLEMRPNDSFAKIGREKQQPGMDDINLSSSADVLNKKQSSRASSHSPSSNFSDDNDVTALDHIDSPSIFEENKFQSTVGDRESYNDSPVVVVAPAFDDYSSFFDKPQFDTEDAYHDEPEQGLGFSLLGSSSKTSDHMPTEISSWSLEGHKDLGKLSSASTSQVLEKEKPSSPPTFDDGPTSPPASLHEPEPSAKFDDYDRDSESEEDNLGRLSGRAEGKSKLTAQKSHMSEGPDDLGRYFFPSDTEDQGDDSKTQEESDAETPTGLKFGPLASGLENETTLPSYGSSPPRDKTSSKSIKEYLPTEVDPSRSSSLQTASSSSIRNELYTQKASNSDKRPSSIPPDSSSSDDESDMELPKRVSFRYQEKRTESRTRPTHLHSGVSHKDLEEEIPTRASTRSQDRRTHKTTPASASASYFHTMSSDDEDEKEVHRDTAHIQTRPYISISRRTKGQERRPSLVTAKIDKVSFDEESPPKLSPEAKPLTKQQGSASSLSYLPKTEKVSHDQESHPKLGLGAKPLIKQQGSASSLSFLPKTNKASPDQDSPPKLVPKEKPAAKQRGSASSLSFLPKTDKASPDQDSPPKLLPKEKPAAKQQGSATSSSSLPKTEKISHYRESPSKLTPEAKSMAKQEGLASSSSSLPKTVTSPDPETPAKEKASHVHPKLPDYDDIFAKLGALRR

SEQ ID NO: 80595 - protein, 897 aa, Arabidopsis thaliana
  peptide (1)..(897): Ceres Seq. ID no. 12656518
MSASGASSSVSQPATGIKSESSRIQNNQPPVFQAAATVNVSQNSYATDGRSSSRMTSTDFNVGKTPDHYHQDPKPSGDRVDGREHRDHNPGHGDTSPFETKFVDATSAARAAAESAERASFAARRAAELSSKERMMMMQNSTESRNSSSYENLRSNPPHSRTSSSNMQGGGFGKEELLKSNNRQVDQSTTTTRAESSKKTVDELSENTSWRRGHSRENSLEMRPNDSFAKIGREKQQPGMDDINLSSSADVLNKKQSSRASSHSPSSNFSDDNDVTALDHIDSPSIFEENKFQSTVGDRESYNDSPVVVVAPAFDDYSSFFDKPQFDTEDAYHDEPEQGLGFSLLGSSSKTSDHMPTEISSWSLEGHKDLGKLSSASTSQVLEKEKPSSPPTFDDGPTSPPASLHEPEPSAKFDDYDRDSESEEDNLGRLSGRAEGKSKLTAQKSHMSEGPDDLGRYFFPSDTEDQGDDSKTQEESDAETPTGLKFGPLASGLENETTLPSYGSSPPRDKTSSKSIKEYLPTEVDPSRSSSLQTASSSSIRNELYTQKASNSDKRPSSIPPDSSSSDDESDMELPKRVSFRYQEKRTESRTRPTHLHSGVSHKDLEEEIPTRASTRSQDRRTHKTTPASASASYFHTMSSDDEDEKEVHRDTAHIQTRPYISISRRTKGQERRPSLVTAKIDKVSFDEESPPKLSPEAKPLTKQQGSASSLSYLPKTEKVSHDQESHPKLGLGAKPLIKQQGSASSLSFLPKTNKASPDQDSPPKLVPKEKPAAKQRGSASSLSFLPKTDKASPDQDSPPKLLPKEKPAAKQQGSATSSSSLPKTEKISHYRESPSKLTPEAKSMAKQEGLASSSSSLPKTVTSPDPETPAKEKASHVHPKLPDYDDIFAKLGALRR

SEQ ID NO: 80596 - protein, 843 aa, Arabidopsis thaliana
  peptide (1)..(843): Ceres Seq. ID no. 12656519
MTSTDFNVGKTPDHYHQDPKPSGDRVDGREHRDHNPGHGDTSPFETKFVDATSAARAAAESAERASFAARRAAELSSKERMMMMQNSTESRNSSSYENLRSNPPHSRTSSSNMQGGGFGKEELLKSNNRQVDQSTTTTRAESSKKTVDELSENTSWRRGHSRENSLEMRPNDSFAKIGREKQQPGMDDINLSSSADVLNKKQSSRASSHSPSSNFSDDNDVTALDHIDSPSIFEENKFQSTVGDRESYNDSPVVVVAPAFDDYSSFFDKPQFDTEDAYHDEPEQGLGFSLLGSSSKTSDHMPTEISSWSLEGHKDLGKLSSASTSQVLEKEKPSSPPTFDDGPTSPPASLHEPEPSAKFDDYDRDSESEEDNLGRLSGRAEGKSKLTAQKSHMSEGPDDLGRYFFPSDTEDQGDDSKTQEESDAETPTGLKFGPLASGLENETTLPSYGSSPPRDKTSSKSIKEYLPTEVDPSRSSSLQTASSSSIRNELYTQKASNSDKRPSSIPPDSSSSDDESDMELPKRVSFRYQEKRTESRTRPTHLHSGVSHKDLEEEIPTRASTRSQDRRTHKTTPASASASYFHTMSSDDEDEKEVHRDTAHIQTRPYISISRRTKGQERRPSLVTAKIDKVSFDEESPPKLSPEAKPLTKQQGSASSLSYLPKTEKVSHDQESHPKLGLGAKPLIKQQGSASSLSFLPKTNKASPDQDSPPKLVPKEKPAAKQRGSASSLSFLPKTDKASPDQDSPPKLLPKEKPAAKQQGSATSSSSLPKTEKISHYRESPSKLTPEAKSMAKQEGLASSSSSLPKTVTSPDPETPAKEKASHVHPKLPDYDDIFAKLGALRR

SEQ ID NO: 80597 - DNA, 2592 bp, Arabidopsis thaliana
  misc_feature (1)..(2592): Ceres Seq. ID no. 12656520
  misc_feature (1)..(2592): Ortholog of  Ceres SEQ ID NO 13654989 as cited in SEQ ID NO 63117
  misc_feature (1)..(2592): Ortholog of  Ceres SEQ ID NO 13584744 as cited in SEQ ID NO 69137
atgagggctaatctcgttttcggcatattttgtgcccttgttaccaccattttagttcacggccaagaccaatcaggttacatcagcatcgattgtggcatacctccttacgatacccctgaagacactatgactaacattaattacgtctccgatgaagctttcataaccaccggcgtaaacttcaaggtctctgaagaatacggctatccaaaaaacccggtattgctgtcaactcttgctgaagtaagagctttccctcaaggaaacagaaactgttacaccttaaaactttcacaaggaaaagatcatctttatctcattagagcttcctttatgtatggaaactacgatggtaaaaaagctttgcctgagtttgatctctatgtaaacgtgaacttctggtcgacagtgaaattcaaaaatgcttctgatcaagtcaccaaagagattttaagctttgcagagtcggatacaatatatgtttgccttgtgaataaaggcaaaggaactccttttatttcagggttagagctccgaccagtgaacagctcaatctacggtactgaatttggaagaaatgtctctttggttctctatcgaagatgggacattggatatttaaacggaacaggacggtaccaagacgatagattcgatcgtatttggtctccatactcctcaaatatctcctggaactcgattataacatcgggctatatcgatgtttttcagaacggttattgtccacctgatgaagttattaagacagctgctgctcctgaaaacgttgatgatccgttggaattgttctggacatcagacgatccaaatgttcggttctacgcatatctttacttcgcggaactcgaaacactagagaagaatgagactagaaagatcaagattttgtggaatggttcccctgtttctgaaacttctttcgaaccttcttcaaaatattcaacgacgttttctaatccaagagctttcactggtaaagatcactggatttctattcagaagactgtagattcaacgcttccaccgattctcaatgctatagagatttttaccgcacaatctctagatgaattttccaccacaattgaagacattcatgctatagaaagcataaaagcaacttataaagtgaacaaggtttggagtggtgatccttgctccccaagattattcccttgggaaggtgttggatgcagcgacaacaataataatcatcaaatcaagtccctgaatcttagctcaagcggattactaggaccaatagtcttggcatttagaaatctctctcttcttgagtcattggatttatccaacaatgacctgcaacaaaatgtgcctgagtttttggctgatctaaaacatttgaaagtcctgaatttgaaaggaaacaattttactgggtttatcccaaaatcccttatgaaaaagttaaaggccggtttacttacgctcagtgcggatgagcaaaacctttgtaactcatgtcaagaaaagaagaagaagaagagcatggtcgtgccaatagctgtagcagcatcagtgatcgttctcgttgtcgtcttggttatcatatggatcatactaaggcaaagaaaaaaaggagcctattcaggaccactcctgccttcagggaagagaaggttcacatataatgaggtctctagcataacaaacaacttcaataaagtgattggtaaaggagggtttggtattgtgtaccttggttcccttgaagatgggactaaaattgctgtaaagatgataaacgattcttcattggcaaaacctaaaggaacttcatcatcatcattatcccgggcttctaaccaattccaagtcgaggcagagcttcttttgacagtgcatcaccgtaacttagcttcatttgttggatactgcgatgatgatcgtagcatggctctcatctacgagtacatggccaacggcaacttgcaggcttatctttcaagtgagaatgcagaggatcttagttgggaaaagagactccatatagccatagattctgcacaaggtttggagtatttgcacgatggatgcagaccagcaatagtacatagagacgttaaaacagcaaacattctaataaacgataacttggaagccaagattgctgatttcggcctttctaaggtcttccctgaagacgatctcagccacgtcgtgactaccgtcatgggcactcccggctacgttgatcctgaatactacagaacatttgtgctgaacgagaagagcgacgtgtacagttttggggtcgttcttcttgaactcatcactggccagcgagccatcatcaaaacagaagaaggagacaatatcagcgttattcactacgtttggccgttctttgaggctagagaactagacggcgtcgtggacccgctgcttcggggagacttctcgcaggactcagcttggaagtttgtggatgtggcaatgtcttgcgtcagagataaaggatcgaatagaccaacgatgaaccagatcgtagcggagctgaaacagtgcctagctgctgagctggaccgtgagccacagagccagtga

SEQ ID NO: 80598 - protein, 863 aa, Arabidopsis thaliana
  peptide (1)..(863): Ceres Seq. ID no. 12656521
MRANLVFGIFCALVTTILVHGQDQSGYISIDCGIPPYDTPEDTMTNINYVSDEAFITTGVNFKVSEEYGYPKNPVLLSTLAEVRAFPQGNRNCYTLKLSQGKDHLYLIRASFMYGNYDGKKALPEFDLYVNVNFWSTVKFKNASDQVTKEILSFAESDTIYVCLVNKGKGTPFISGLELRPVNSSIYGTEFGRNVSLVLYRRWDIGYLNGTGRYQDDRFDRIWSPYSSNISWNSIITSGYIDVFQNGYCPPDEVIKTAAAPENVDDPLELFWTSDDPNVRFYAYLYFAELETLEKNETRKIKILWNGSPVSETSFEPSSKYSTTFSNPRAFTGKDHWISIQKTVDSTLPPILNAIEIFTAQSLDEFSTTIEDIHAIESIKATYKVNKVWSGDPCSPRLFPWEGVGCSDNNNNHQIKSLNLSSSGLLGPIVLAFRNLSLLESLDLSNNDLQQNVPEFLADLKHLKVLNLKGNNFTGFIPKSLMKKLKAGLLTLSADEQNLCNSCQEKKKKKSMVVPIAVAASVIVLVVVLVIIWIILRQRKKGAYSGPLLPSGKRRFTYNEVSSITNNFNKVIGKGGFGIVYLGSLEDGTKIAVKMINDSSLAKPKGTSSSSLSRASNQFQVEAELLLTVHHRNLASFVGYCDDDRSMALIYEYMANGNLQAYLSSENAEDLSWEKRLHIAIDSAQGLEYLHDGCRPAIVHRDVKTANILINDNLEAKIADFGLSKVFPEDDLSHVVTTVMGTPGYVDPEYYRTFVLNEKSDVYSFGVVLLELITGQRAIIKTEEGDNISVIHYVWPFFEARELDGVVDPLLRGDFSQDSAWKFVDVAMSCVRDKGSNRPTMNQIVAELKQCLAAELDREPQSQ

SEQ ID NO: 80599 - protein, 820 aa, Arabidopsis thaliana
  peptide (1)..(820): Ceres Seq. ID no. 12656522
MTNINYVSDEAFITTGVNFKVSEEYGYPKNPVLLSTLAEVRAFPQGNRNCYTLKLSQGKDHLYLIRASFMYGNYDGKKALPEFDLYVNVNFWSTVKFKNASDQVTKEILSFAESDTIYVCLVNKGKGTPFISGLELRPVNSSIYGTEFGRNVSLVLYRRWDIGYLNGTGRYQDDRFDRIWSPYSSNISWNSIITSGYIDVFQNGYCPPDEVIKTAAAPENVDDPLELFWTSDDPNVRFYAYLYFAELETLEKNETRKIKILWNGSPVSETSFEPSSKYSTTFSNPRAFTGKDHWISIQKTVDSTLPPILNAIEIFTAQSLDEFSTTIEDIHAIESIKATYKVNKVWSGDPCSPRLFPWEGVGCSDNNNNHQIKSLNLSSSGLLGPIVLAFRNLSLLESLDLSNNDLQQNVPEFLADLKHLKVLNLKGNNFTGFIPKSLMKKLKAGLLTLSADEQNLCNSCQEKKKKKSMVVPIAVAASVIVLVVVLVIIWIILRQRKKGAYSGPLLPSGKRRFTYNEVSSITNNFNKVIGKGGFGIVYLGSLEDGTKIAVKMINDSSLAKPKGTSSSSLSRASNQFQVEAELLLTVHHRNLASFVGYCDDDRSMALIYEYMANGNLQAYLSSENAEDLSWEKRLHIAIDSAQGLEYLHDGCRPAIVHRDVKTANILINDNLEAKIADFGLSKVFPEDDLSHVVTTVMGTPGYVDPEYYRTFVLNEKSDVYSFGVVLLELITGQRAIIKTEEGDNISVIHYVWPFFEARELDGVVDPLLRGDFSQDSAWKFVDVAMSCVRDKGSNRPTMNQIVAELKQCLAAELDREPQSQ

SEQ ID NO: 80600 - protein, 751 aa, Arabidopsis thaliana
  peptide (1)..(751): Ceres Seq. ID no. 12656523
MYGNYDGKKALPEFDLYVNVNFWSTVKFKNASDQVTKEILSFAESDTIYVCLVNKGKGTPFISGLELRPVNSSIYGTEFGRNVSLVLYRRWDIGYLNGTGRYQDDRFDRIWSPYSSNISWNSIITSGYIDVFQNGYCPPDEVIKTAAAPENVDDPLELFWTSDDPNVRFYAYLYFAELETLEKNETRKIKILWNGSPVSETSFEPSSKYSTTFSNPRAFTGKDHWISIQKTVDSTLPPILNAIEIFTAQSLDEFSTTIEDIHAIESIKATYKVNKVWSGDPCSPRLFPWEGVGCSDNNNNHQIKSLNLSSSGLLGPIVLAFRNLSLLESLDLSNNDLQQNVPEFLADLKHLKVLNLKGNNFTGFIPKSLMKKLKAGLLTLSADEQNLCNSCQEKKKKKSMVVPIAVAASVIVLVVVLVIIWIILRQRKKGAYSGPLLPSGKRRFTYNEVSSITNNFNKVIGKGGFGIVYLGSLEDGTKIAVKMINDSSLAKPKGTSSSSLSRASNQFQVEAELLLTVHHRNLASFVGYCDDDRSMALIYEYMANGNLQAYLSSENAEDLSWEKRLHIAIDSAQGLEYLHDGCRPAIVHRDVKTANILINDNLEAKIADFGLSKVFPEDDLSHVVTTVMGTPGYVDPEYYRTFVLNEKSDVYSFGVVLLELITGQRAIIKTEEGDNISVIHYVWPFFEARELDGVVDPLLRGDFSQDSAWKFVDVAMSCVRDKGSNRPTMNQIVAELKQCLAAELDREPQSQ

SEQ ID NO: 80601 - DNA, 1173 bp, Arabidopsis thaliana
  misc_feature (1)..(1173): Ceres Seq. ID no. 12656532
  misc_feature (1)..(1173): Ortholog of  Ceres SEQ ID NO 15170501 as cited in SEQ ID NO 52774
atgactaagaacagtaaccacgacgagaatgagttcatcagctttgaaccaaatcagaacacgaagatacgctttgaagatgctgatgaagacgaagttgctgaagggtctggtgttgccggcgaggaaactccccaagatgagtccatgttcgacgccggagagagcgccgacaccgctgaagtaactgatgataccaccagtgccgattactacttcgattcttactctcactttggaatccatgaagagatgttgaaggatgttgtgagaacaaagacttatcagaatgttatttatcagaacaagtttcttatcaaggacaaaattgttcttgatgttggagctggaaccggaattttgtctctgttctgtgccaaggcaggagctgctcatgtctacgctgttgagtgttctcaaatggctgacatggcaaaggagattgttaaagctaatggattttctgatgttattacggtattgaaagggaagattgaggagatagagcttcccactcctaaagtggatgtgattatatcggaatggatgggttactttttgttgtttgaaaatatgttggacagtgtcttgtatgctcgtgataaatggcttgttgaaggtggagttgtgctaccagacaaagcctctctgcatcttacagccatagaggattcagagtacaaagaagacaaaatcgaattttggaacagtgtgtatggttttgacatgtcatgtattaagaaaaaagctatgatggaaccacttgttgacacagtcgaccaaaaccaaatcgtcaccgatagtaggcttctaaagacgatggatatctcaaagatgtcctctggtgatgcttccttcacagctccctttaagcttgttgcacaacgcaatgactacatccacgcccttgtagcctactttgatgtatcgtttaccatgtgccacaagctgctgggcttctcaacaggaccgaaatcccgagctacacactggaaacaaacagttctgtatctagaagatgtgttaaccatatgtgagggtgagacaatcactggaactatgtccgtttctcctaacaagaagaatcctcgagacattgacataaagctaagctattctttgaatggccagcattgcaagatctcaaggacccaacactacaaaatgcgttaa

SEQ ID NO: 80602 - protein, 390 aa, Arabidopsis thaliana
  peptide (1)..(390): Ceres Seq. ID no. 12656533
MTKNSNHDENEFISFEPNQNTKIRFEDADEDEVAEGSGVAGEETPQDESMFDAGESADTAEVTDDTTSADYYFDSYSHFGIHEEMLKDVVRTKTYQNVIYQNKFLIKDKIVLDVGAGTGILSLFCAKAGAAHVYAVECSQMADMAKEIVKANGFSDVITVLKGKIEEIELPTPKVDVIISEWMGYFLLFENMLDSVLYARDKWLVEGGVVLPDKASLHLTAIEDSEYKEDKIEFWNSVYGFDMSCIKKKAMMEPLVDTVDQNQIVTDSRLLKTMDISKMSSGDASFTAPFKLVAQRNDYIHALVAYFDVSFTMCHKLLGFSTGPKSRATHWKQTVLYLEDVLTICEGETITGTMSVSPNKKNPRDIDIKLSYSLNGQHCKISRTQHYKMR

SEQ ID NO: 80603 - protein, 341 aa, Arabidopsis thaliana
  peptide (1)..(341): Ceres Seq. ID no. 12656534
MFDAGESADTAEVTDDTTSADYYFDSYSHFGIHEEMLKDVVRTKTYQNVIYQNKFLIKDKIVLDVGAGTGILSLFCAKAGAAHVYAVECSQMADMAKEIVKANGFSDVITVLKGKIEEIELPTPKVDVIISEWMGYFLLFENMLDSVLYARDKWLVEGGVVLPDKASLHLTAIEDSEYKEDKIEFWNSVYGFDMSCIKKKAMMEPLVDTVDQNQIVTDSRLLKTMDISKMSSGDASFTAPFKLVAQRNDYIHALVAYFDVSFTMCHKLLGFSTGPKSRATHWKQTVLYLEDVLTICEGETITGTMSVSPNKKNPRDIDIKLSYSLNGQHCKISRTQHYKMR

SEQ ID NO: 80604 - protein, 306 aa, Arabidopsis thaliana
  peptide (1)..(306): Ceres Seq. ID no. 12656535
MLKDVVRTKTYQNVIYQNKFLIKDKIVLDVGAGTGILSLFCAKAGAAHVYAVECSQMADMAKEIVKANGFSDVITVLKGKIEEIELPTPKVDVIISEWMGYFLLFENMLDSVLYARDKWLVEGGVVLPDKASLHLTAIEDSEYKEDKIEFWNSVYGFDMSCIKKKAMMEPLVDTVDQNQIVTDSRLLKTMDISKMSSGDASFTAPFKLVAQRNDYIHALVAYFDVSFTMCHKLLGFSTGPKSRATHWKQTVLYLEDVLTICEGETITGTMSVSPNKKNPRDIDIKLSYSLNGQHCKISRTQHYKMR

SEQ ID NO: 80605 - DNA, 1799 bp, Arabidopsis thaliana
  misc_feature (1)..(1799): Ceres Seq. ID no. 12656575
  misc_feature (1)..(1799): Ortholog of  Ceres SEQ ID NO 15225244 as cited in SEQ ID NO 66088
atcatcaaccaattgggtttaaatcagaagagaagcaatgatctccggcgacacattatcagctaaaaaacctaaatcagttccacaagaagaagaccaagacccaccaagccaatcaatcgcacttctcgacaatcacacagattcctccggttctgattcttccactagaagcatctcaagctgcttcatcttcacatctctacttctcgtcacctgcatcgctctatccgccgcttcagctttcgccttcctcttcttctcttctcaaaaacctgtcctttccttaaaccaaatctcaaagtcaccagctttcgacagatccgtagctcgtccgctcaagaaactcgacaagcctgttgttcttttgatttcatcagatgggtttcgtttcgggtaccagttcaagaccaaactaccgagcatccacagattaatagccaacggaaccgaagctgagactggtctaatccctgtttttccgacactaactttccctaaccattactctatcgtcacaggtctatacccagcttatcatggaatcatcaataaccactttgttgatccagaaacagggaacgttttcacaatggctagtcatgaaccagagtggtggttaggtgagcctttgtgggagacagttgtgaaccaaggacttaaggctgctacttacttctggcctggctctgaggtacacaaaggctcttggaattgtcctcaaggtttatgtcaaaactacaatggctctgttccttttgatgatagggttgatactattttgagctatttcgatttgcctagtaacgaaatcccgagttttatgacgctttactttgaagatcctgatcatcaaggtcaccaagttggccctgatgatcctcagatcacagaagctgtagttaacattgatcggttaataggaagattaattgatgggttagaaaaacgagggatttttgaggatgtgactatgattatggttggtgatcatggaatggttggaacttgcgataaaaaattggtggttttagatgatttagctccttggatcaaaatccctagcagttgggtacagtactacactccgttgctagcgattcaacccccttcagggcacgatgcagcggatatagtggctaagataaacgaaggtttgagctcgggtaaagtagagaatgggaagtacttgaaggtttatctcaaagaggatttacctagcaggctgcattatgtagacagtgaccgcatcccgcctattataggactagtcgatgagggcttcaaggtggagcagaagaaaagtaaagccaaggaatgcggtggagctcacgggtatgacaatgccttcttttcgatgagaactatattcatcgggcatggtcctatgttctcaaaaggaaggaaagtgccttcttttgagaatgttcagatatacaatgtgatcagttcgattctaggacttaaggcagcaccaaacaatggatctgatgagttttcttcaagcattctcttgccacgcgtgtagaagagtagggtaagtttattcttctgtcaataaaaggcagtctagactcttgagactttgttgtcaaaacataaacgcgtttgacctcttagacgttttatgcgttttgatctgattgctgtttttgtatgatttcatcacgaagttgcactaaaacgtattgtagtatttcggagtatgaaacttgtcttgacatttgatgccaagattggaagctttgtactttccttcaaagaaacaatgctttgaattggatactcgattctttgcc

SEQ ID NO: 80606 - protein, 496 aa, Arabidopsis thaliana
  peptide (1)..(496): Ceres Seq. ID no. 12656576
MISGDTLSAKKPKSVPQEEDQDPPSQSIALLDNHTDSSGSDSSTRSISSCFIFTSLLLVTCIALSAASAFAFLFFSSQKPVLSLNQISKSPAFDRSVARPLKKLDKPVVLLISSDGFRFGYQFKTKLPSIHRLIANGTEAETGLIPVFPTLTFPNHYSIVTGLYPAYHGIINNHFVDPETGNVFTMASHEPEWWLGEPLWETVVNQGLKAATYFWPGSEVHKGSWNCPQGLCQNYNGSVPFDDRVDTILSYFDLPSNEIPSFMTLYFEDPDHQGHQVGPDDPQITEAVVNIDRLIGRLIDGLEKRGIFEDVTMIMVGDHGMVGTCDKKLVVLDDLAPWIKIPSSWVQYYTPLLAIQPPSGHDAADIVAKINEGLSSGKVENGKYLKVYLKEDLPSRLHYVDSDRIPPIIGLVDEGFKVEQKKSKAKECGGAHGYDNAFFSMRTIFIGHGPMFSKGRKVPSFENVQIYNVISSILGLKAAPNNGSDEFSSSILLPRV

SEQ ID NO: 80607 - protein, 311 aa, Arabidopsis thaliana
  peptide (1)..(311): Ceres Seq. ID no. 12656577
MASHEPEWWLGEPLWETVVNQGLKAATYFWPGSEVHKGSWNCPQGLCQNYNGSVPFDDRVDTILSYFDLPSNEIPSFMTLYFEDPDHQGHQVGPDDPQITEAVVNIDRLIGRLIDGLEKRGIFEDVTMIMVGDHGMVGTCDKKLVVLDDLAPWIKIPSSWVQYYTPLLAIQPPSGHDAADIVAKINEGLSSGKVENGKYLKVYLKEDLPSRLHYVDSDRIPPIIGLVDEGFKVEQKKSKAKECGGAHGYDNAFFSMRTIFIGHGPMFSKGRKVPSFENVQIYNVISSILGLKAAPNNGSDEFSSSILLPRV

SEQ ID NO: 80608 - DNA, 1374 bp, Arabidopsis thaliana
  misc_feature (1)..(1374): Ceres Seq. ID no. 12656578
  misc_feature (1)..(1374): Ortholog of  Ceres SEQ ID NO 15225244 as cited in SEQ ID NO 66088
atgacgaaaagtaaacctggccggtccggtttttccggttacatattgtacaagttatctctaaccgttctcattgtcctctccgtagccgtcactgccaatggttcggactccccatcttcctacgtcaggagaccccaaccccccaagaagctcaacaaaccggtggttctgttaatttcctgcgatggtttccggttcggttaccaattcaagacagagacaccaaacatcgatctgctcatatccagaggtaccgaagctaagaccggtttaattccggttttccccaccatgacgttcccaaaccattactcaatcgctaccggactctatccggcttcccacggcataatcatgaacaaatttaccgatccggtaagtggggaactattcaacaggaacctaaaccctaaatggtggttaggtgagccgttgtgggtgaccgcagtgaaccaagggctcatggctgcgacttacttttggccaggcgctgacgtccacaaagggtcttggaactgcccaaaaggcttttgtaaagctccttacaatgtttcagttcctttagaagaaagagtcgatacgatcttgaactatttcgatcttccagagagagaaatccctgatttcatggctctgtatttcgatgaaccggacatacaaggccatgagtacggccctgatgatcctcgcgtcacggaagccgtctcaaaggtcgataaaatgatcggtaggatcatcatgggattggagaagaggaaggtttttagtgatgttcatgtgatattgcttggtgatcacggaatggttactaactgtgacaagaaagtgatttacattgatgatttagccgattggatcaagatacccgcggattggatccaagattatagtccggtgctagcgatgaatccgcgctggggcaaagatgtcaagaatccaggacagaagaatgcagaactcgtaaggaagatgaacgaagctttgagctcagggaaagtagccaacggagagtttttgcaggtttacttgaaggagaatttaccgcaaaggctgcattattccgatagttctcggattccaccgatcatcggaatggtgggagaaggtctaatggttaaacagaacagaacatacgttcaagaatgttctggaactcatggatacgataatatgttcttttctatgagatcaatctttgttggatatggtccaaggtttaggagaggaataaaagtgccatcgttcgagaatgttcaggtctataatgctgttgcagagattctcggactccgaccagctccgaacaacggttcttctttgtttactcgtagtcttctcttgccatttggagaaacatcacaagtagaatga

SEQ ID NO: 80609 - protein, 457 aa, Arabidopsis thaliana
  peptide (1)..(457): Ceres Seq. ID no. 12656579
MTKSKPGRSGFSGYILYKLSLTVLIVLSVAVTANGSDSPSSYVRRPQPPKKLNKPVVLLISCDGFRFGYQFKTETPNIDLLISRGTEAKTGLIPVFPTMTFPNHYSIATGLYPASHGIIMNKFTDPVSGELFNRNLNPKWWLGEPLWVTAVNQGLMAATYFWPGADVHKGSWNCPKGFCKAPYNVSVPLEERVDTILNYFDLPEREIPDFMALYFDEPDIQGHEYGPDDPRVTEAVSKVDKMIGRIIMGLEKRKVFSDVHVILLGDHGMVTNCDKKVIYIDDLADWIKIPADWIQDYSPVLAMNPRWGKDVKNPGQKNAELVRKMNEALSSGKVANGEFLQVYLKENLPQRLHYSDSSRIPPIIGMVGEGLMVKQNRTYVQECSGTHGYDNMFFSMRSIFVGYGPRFRRGIKVPSFENVQVYNAVAEILGLRPAPNNGSSLFTRSLLLPFGETSQVE

SEQ ID NO: 80610 - protein, 359 aa, Arabidopsis thaliana
  peptide (1)..(359): Ceres Seq. ID no. 12656580
MTFPNHYSIATGLYPASHGIIMNKFTDPVSGELFNRNLNPKWWLGEPLWVTAVNQGLMAATYFWPGADVHKGSWNCPKGFCKAPYNVSVPLEERVDTILNYFDLPEREIPDFMALYFDEPDIQGHEYGPDDPRVTEAVSKVDKMIGRIIMGLEKRKVFSDVHVILLGDHGMVTNCDKKVIYIDDLADWIKIPADWIQDYSPVLAMNPRWGKDVKNPGQKNAELVRKMNEALSSGKVANGEFLQVYLKENLPQRLHYSDSSRIPPIIGMVGEGLMVKQNRTYVQECSGTHGYDNMFFSMRSIFVGYGPRFRRGIKVPSFENVQVYNAVAEILGLRPAPNNGSSLFTRSLLLPFGETSQVE

SEQ ID NO: 80611 - protein, 338 aa, Arabidopsis thaliana
  peptide (1)..(338): Ceres Seq. ID no. 12656581
MNKFTDPVSGELFNRNLNPKWWLGEPLWVTAVNQGLMAATYFWPGADVHKGSWNCPKGFCKAPYNVSVPLEERVDTILNYFDLPEREIPDFMALYFDEPDIQGHEYGPDDPRVTEAVSKVDKMIGRIIMGLEKRKVFSDVHVILLGDHGMVTNCDKKVIYIDDLADWIKIPADWIQDYSPVLAMNPRWGKDVKNPGQKNAELVRKMNEALSSGKVANGEFLQVYLKENLPQRLHYSDSSRIPPIIGMVGEGLMVKQNRTYVQECSGTHGYDNMFFSMRSIFVGYGPRFRRGIKVPSFENVQVYNAVAEILGLRPAPNNGSSLFTRSLLLPFGETSQVE

SEQ ID NO: 80612 - DNA, 402 bp, Arabidopsis thaliana
  misc_feature (1)..(402): Ceres Seq. ID no. 12656582
  misc_feature (1)..(402): Ortholog of  Ceres SEQ ID NO 15225244 as cited in SEQ ID NO 66088
atgaacgaagctttgagctcagggaaagtaaaaaacggagagtttttgactgtttacttgaaggagaagttaccggacagactgcattattcccagagttatcggattccaccaatcataggaatggtcggagaaggtctaattgtcagacaaaatagaactaatgctcaagaatgctacggagaccatggttatgacaacaagttcttctcaatgaggactatttttgtcggacatggttctaggtttaggagaggaaagaaagtgccatcgtttgagaatgtgcagatctatagcgtcgttgcagatattcttggactccgaccagctccgaacaatggttcttctttgttccctcggagcattctcttgcctttcagagcaacaagggggttagaatga

SEQ ID NO: 80613 - protein, 133 aa, Arabidopsis thaliana
  peptide (1)..(133): Ceres Seq. ID no. 12656583
MNEALSSGKVKNGEFLTVYLKEKLPDRLHYSQSYRIPPIIGMVGEGLIVRQNRTNAQECYGDHGYDNKFFSMRTIFVGHGSRFRRGKKVPSFENVQIYSVVADILGLRPAPNNGSSLFPRSILLPFRATRGLE

SEQ ID NO: 80614 - protein, 92 aa, Arabidopsis thaliana
  peptide (1)..(92): Ceres Seq. ID no. 12656584
MVGEGLIVRQNRTNAQECYGDHGYDNKFFSMRTIFVGHGSRFRRGKKVPSFENVQIYSVVADILGLRPAPNNGSSLFPRSILLPFRATRGLE

SEQ ID NO: 80615 - DNA, 1861 bp, Arabidopsis thaliana
  misc_feature (1)..(1861): Ceres Seq. ID no. 12656585
  misc_feature (1)..(1861): Ortholog of  Ceres SEQ ID NO 15171856 as cited in SEQ ID NO 55120
agtaatcccataatcaacaagacactctaatagtaatatctcaacctccgtctcgttttcccattaacctacccgtttgttagattatgactaatactctctgtttaagcctcatcaccctaataacgctttttataagtttaaccccaaccttaatcaaatcagatgagggcattgatgttttcttacccatatcactcaaccttacggtcctaaccgatcccttctccatctctgccgcttctcacgacttcggtaacataaccgacgaaaatcccggcgccgtcctctgcccttcctccaccacggaggtggctcgtctcctccgtttcgctaacggaggattctcttacaataaaggctcaaccagccccgcgtctactttcaaagtggctgctcgaggccaaggccactccctccgtggccaagcctctgcacccggaggtgtcgtcgtgaacatgacgtgtctcgccatggcggctaaaccagcggcggttgttatctcggcagacgggacttacgctgacgtggctgccgggacgatgtgggtggatgttctgaaggcggcggtggatagaggcgtctcgccggttacatggacggattatttgtatctcagcgtcggcgggacgttgtcgaacgctggaatcggtggtcagacgtttagacacggccctcagattagtaacgttcatgagcttgacgttattaccggaaaaggtgaaatgatgacttgctctccaaagttaaaccctgaattgttctatggagttttaggaggtttgggtcaattcggtattataacgagggccaggattgcgttggatcatgcacccacaagggtgaaatggtctcgcatactctacagtgacttctcggcttttaaaagagaccaagagcgtttaatatcaatgaccaatgatctcggagttgactttttggaaggtcaacttatgatgtcaaatggcttcgtagacacctctttcttcccactctccgatcaaacaagagtcgcatctcttgtgaatgaccaccggatcatctatgttctcgaagtagccaagtattatgacagaaccacccttcccattattgaccaggtgattgacacgttaagtagaactctaggtttcgctccagggtttatgttcgtacaagatgttccgtatttcgatttcttgaaccgtgtccgaaacgaagaagataaactcagatctttaggactatgggaagttcctcatccatggcttaacatctttgtcccggggtctcgaatccaagattttcatgatggtgttattaatggccttcttctaaaccaaacctcaacttctggtgttactctcttctatcccacaaaccgaaacaaatggaacaaccgcatgtcaacgatgacaccggacgaagatgttttttatgtgatcggattactgcaatcagctggtggatctcaaaattggcaagaacttgaaaatctcaacgacaaggttattcagttttgtgaaaactcgggaattaagattaaggaatatttgatgcactatacaagaaaagaagattgggttaaacattttggaccaaaatgggatgattttttaagaaagaaaattatgtttgatcccaaaagactattgtctccaggacaagacatatttaattaacttatcacatgtcttaattaatttgttatgtaactttagaacgtatttttataacatatacagacaagtacgttcatcgtctaactaacaaatattatagtttagtgatttggttaggctacttacgttaatctttttcgttcttgtatgaaatatattgtataagtcaaaagacaaagaaaaatatattattatagcgg

SEQ ID NO: 80616 - protein, 524 aa, Arabidopsis thaliana
  peptide (1)..(524): Ceres Seq. ID no. 12656586
MTNTLCLSLITLITLFISLTPTLIKSDEGIDVFLPISLNLTVLTDPFSISAASHDFGNITDENPGAVLCPSSTTEVARLLRFANGGFSYNKGSTSPASTFKVAARGQGHSLRGQASAPGGVVVNMTCLAMAAKPAAVVISADGTYADVAAGTMWVDVLKAAVDRGVSPVTWTDYLYLSVGGTLSNAGIGGQTFRHGPQISNVHELDVITGKGEMMTCSPKLNPELFYGVLGGLGQFGIITRARIALDHAPTRVKWSRILYSDFSAFKRDQERLISMTNDLGVDFLEGQLMMSNGFVDTSFFPLSDQTRVASLVNDHRIIYVLEVAKYYDRTTLPIIDQVIDTLSRTLGFAPGFMFVQDVPYFDFLNRVRNEEDKLRSLGLWEVPHPWLNIFVPGSRIQDFHDGVINGLLLNQTSTSGVTLFYPTNRNKWNNRMSTMTPDEDVFYVIGLLQSAGGSQNWQELENLNDKVIQFCENSGIKIKEYLMHYTRKEDWVKHFGPKWDDFLRKKIMFDPKRLLSPGQDIFN

SEQ ID NO: 80617 - protein, 400 aa, Arabidopsis thaliana
  peptide (1)..(400): Ceres Seq. ID no. 12656587
MTCLAMAAKPAAVVISADGTYADVAAGTMWVDVLKAAVDRGVSPVTWTDYLYLSVGGTLSNAGIGGQTFRHGPQISNVHELDVITGKGEMMTCSPKLNPELFYGVLGGLGQFGIITRARIALDHAPTRVKWSRILYSDFSAFKRDQERLISMTNDLGVDFLEGQLMMSNGFVDTSFFPLSDQTRVASLVNDHRIIYVLEVAKYYDRTTLPIIDQVIDTLSRTLGFAPGFMFVQDVPYFDFLNRVRNEEDKLRSLGLWEVPHPWLNIFVPGSRIQDFHDGVINGLLLNQTSTSGVTLFYPTNRNKWNNRMSTMTPDEDVFYVIGLLQSAGGSQNWQELENLNDKVIQFCENSGIKIKEYLMHYTRKEDWVKHFGPKWDDFLRKKIMFDPKRLLSPGQDIFN

SEQ ID NO: 80618 - protein, 395 aa, Arabidopsis thaliana
  peptide (1)..(395): Ceres Seq. ID no. 12656588
MAAKPAAVVISADGTYADVAAGTMWVDVLKAAVDRGVSPVTWTDYLYLSVGGTLSNAGIGGQTFRHGPQISNVHELDVITGKGEMMTCSPKLNPELFYGVLGGLGQFGIITRARIALDHAPTRVKWSRILYSDFSAFKRDQERLISMTNDLGVDFLEGQLMMSNGFVDTSFFPLSDQTRVASLVNDHRIIYVLEVAKYYDRTTLPIIDQVIDTLSRTLGFAPGFMFVQDVPYFDFLNRVRNEEDKLRSLGLWEVPHPWLNIFVPGSRIQDFHDGVINGLLLNQTSTSGVTLFYPTNRNKWNNRMSTMTPDEDVFYVIGLLQSAGGSQNWQELENLNDKVIQFCENSGIKIKEYLMHYTRKEDWVKHFGPKWDDFLRKKIMFDPKRLLSPGQDIFN

SEQ ID NO: 80619 - DNA, 3331 bp, Arabidopsis thaliana
  misc_feature (1)..(3331): Ceres Seq. ID no. 12656625
  misc_feature (1)..(3331): Ortholog of  Ceres SEQ ID NO 15226720 as cited in SEQ ID NO 58707
aaaaactctctttctatcagaaagaaatgacatttttaatattacatgcctatacagttacaagaatacggttcatcctatagattgtcatgtaatctgcttatgaatgtttcatggtgaaatcattgggaaacctgcaggcgatctgatggacacatttcgttttggatgatcatagtttctgagataggagaccaatacaggcctgattatggcaaattcctttagaaacgattttatattcgttttctgtagcggctgccccttgcaactattaaaggttttttttgcaaaattataaacaaaaggtttcctgtagaaaagaagattgtatttcttttgtttactagtcgtcaactttgcaagtataattttcaagggaccaaaccaaatcaaggattttatttgacttttgtttatatatgtattgtaactgtaattgtaattgtatatcaacccaacatgctaatactataacttagatggagttgaagcgggtacgtgtagtagctgtccttttgatcttgcctcgtctatatattgcatgagagaacattttccataagaaagtaatcaaacacatttggtgataatgacacgtctacgccttctttcatggatttcaatcacgagctgtgtttgtctcgtttttgctcaagaccaatcaggttttattagtatcgattgtgggataccagatgattcaagctacactgatgagaaaacaaacatgaaatacgtttcggatttgggttttgttgagtctggaacaagtcatagcatagtctctgaccttcaaacaacttctcttgaaaggcagttccaaaacgtaagaagcttccctgaaggtaagagaaactgttacgacataaggcctcagcaagggaaaggtttcaagtatctgattagaactcgttttatgtacgggaactatgatggttttagtaaaacacctgagtttgatctctatattggagccaatctttgggaatctgttgttcttatcaatgaaacggctataatgaccaaagaaatcatttatacacctccatcagaccatattcatgtgtgtcttgttgataaaaacagaggaactccttttctctctgtcttggaaataagatttttgaagaacgatacatatgacactccttatgaagcgcttatgcttggtcgaagatgggatttcggcacagcgaccaatcttcaaatcaggtacaaagatgatttctatgatcgcatatggatgccttataagtctccgtaccagaaaactttgaatacatccctcaccatcgatgaaactaaccacaacggtttcagacctgctagtatagtcatgagatctgcgatagcacctggaaacgaaagcaatcccttgaagtttaactgggcaccagatgatccgaggtcgaagttttatatatacatgcacttcgctgaagttcgagagctacaaagaaacgagacacgagaattcgatatatacataaatgacgttatacttgccgagaatttccgtcctttttatttgtttacagacacacgctccactgtagatccagttggcagaaaaatgaatgaaattgtccttcagagaactggtgtatcgacccttccaccgatcatcaacgctatagagatctatcaaatcaacgagttccttcagttaccaacagatcaacaggatgttgatgccatgacgaagattaagttcaagtatagagtaaagaagaactggcaaggagacccatgtgttccagtggacaattcttgggaaggtcttgaatgtctccatagtgataataatacttctccaaaatccattgctctgaacttatcctccagtggactgactggccagattgatccagctttcgccaacctaacatcaataaataaattagacttatcaaacaacagcttaacagggaaagtacccgatttcctcgccagtttaccaaacttgactgaattaaacctggaaggaaacaagttaactggttcgattccagctaaactgttggagaaatcaaaagatggttctctttcgcttagatttggtggaaacccggacctttgtcagtctccctcatgtcaaacaacaacgaagaagaaaattggttacatcgtcccagtagtagcatcactcgcaggattgctcattgttttgaccgcattagctttgatctggcattttaaaaaacgatcacgaagaggtacaatctcaaacaaaccattaggtgtcaacaccggaccattggacacagccaaaagatactttatatactcagaagttgtgaatatcacaaacaacttcgagagagttcttggtaaaggaggttttggtaaagtataccatggtttcttgaatggagatcaagtagctgtgaagatactttccgaagagtcaactcaaggttacaaagagtttcgagcagaggttgagcttctgatgagagtccatcacacaaatttgacatctcttatcggatactgcaatgaagataaccacatggcacttatctacgagtacatggctaatggaaacttaggagactatttgtcaggaaaaagttccttaatcttgagctgggaagagagattacagatatcattggatgcagcacaaggcctcgagtatctccattacggttgcaagcctcccatagttcacagagatgtgaagccggcaaatatcttactgaacgagaatcttcaagccaagatagctgactttggtttatctagaagcttcccagtcgaaggtagtagtcaagtctccaccgttgtcgctggaaccatcggttacttagaccctgagtattacgcaacgcggcaaatgaacgagaagagtgatgtttacagcttcggggtggttcttcttgaagtaataacaggaaaaccggcaatttggcattcaagaacagagagtgtgcatctaagtgatcaggttggttcaatgttggcgaatggagacataaaaggtattgtggatcaacgtctgggagatagatttgaggttggctcggcttggaagatcactgaactagcattggcttgtgcgtctgagagttcagaacaaagaccgacaatgagccaagtcgttatggagctgaaacagagtatctttgggagagtgaacaatcgaagtgaccataaggaccctgtgagaatggttacgatgaacctcgatactgaaatggttcctcgggcgaggtaaagatggatatttgtatcttcataaaactatcagtgtattatcatcccatcattaccgttactatcagtatcattcaaaatcagccatgaatcatgttaaatgcacttg

SEQ ID NO: 80620 - protein, 876 aa, Arabidopsis thaliana
  peptide (1)..(876): Ceres Seq. ID no. 12656626
MTRLRLLSWISITSCVCLVFAQDQSGFISIDCGIPDDSSYTDEKTNMKYVSDLGFVESGTSHSIVSDLQTTSLERQFQNVRSFPEGKRNCYDIRPQQGKGFKYLIRTRFMYGNYDGFSKTPEFDLYIGANLWESVVLINETAIMTKEIIYTPPSDHIHVCLVDKNRGTPFLSVLEIRFLKNDTYDTPYEALMLGRRWDFGTATNLQIRYKDDFYDRIWMPYKSPYQKTLNTSLTIDETNHNGFRPASIVMRSAIAPGNESNPLKFNWAPDDPRSKFYIYMHFAEVRELQRNETREFDIYINDVILAENFRPFYLFTDTRSTVDPVGRKMNEIVLQRTGVSTLPPIINAIEIYQINEFLQLPTDQQDVDAMTKIKFKYRVKKNWQGDPCVPVDNSWEGLECLHSDNNTSPKSIALNLSSSGLTGQIDPAFANLTSINKLDLSNNSLTGKVPDFLASLPNLTELNLEGNKLTGSIPAKLLEKSKDGSLSLRFGGNPDLCQSPSCQTTTKKKIGYIVPVVASLAGLLIVLTALALIWHFKKRSRRGTISNKPLGVNTGPLDTAKRYFIYSEVVNITNNFERVLGKGGFGKVYHGFLNGDQVAVKILSEESTQGYKEFRAEVELLMRVHHTNLTSLIGYCNEDNHMALIYEYMANGNLGDYLSGKSSLILSWEERLQISLDAAQGLEYLHYGCKPPIVHRDVKPANILLNENLQAKIADFGLSRSFPVEGSSQVSTVVAGTIGYLDPEYYATRQMNEKSDVYSFGVVLLEVITGKPAIWHSRTESVHLSDQVGSMLANGDIKGIVDQRLGDRFEVGSAWKITELALACASESSEQRPTMSQVVMELKQSIFGRVNNRSDHKDPVRMVTMNLDTEMVPRAR

SEQ ID NO: 80621 - protein, 830 aa, Arabidopsis thaliana
  peptide (1)..(830): Ceres Seq. ID no. 12656627
MKYVSDLGFVESGTSHSIVSDLQTTSLERQFQNVRSFPEGKRNCYDIRPQQGKGFKYLIRTRFMYGNYDGFSKTPEFDLYIGANLWESVVLINETAIMTKEIIYTPPSDHIHVCLVDKNRGTPFLSVLEIRFLKNDTYDTPYEALMLGRRWDFGTATNLQIRYKDDFYDRIWMPYKSPYQKTLNTSLTIDETNHNGFRPASIVMRSAIAPGNESNPLKFNWAPDDPRSKFYIYMHFAEVRELQRNETREFDIYINDVILAENFRPFYLFTDTRSTVDPVGRKMNEIVLQRTGVSTLPPIINAIEIYQINEFLQLPTDQQDVDAMTKIKFKYRVKKNWQGDPCVPVDNSWEGLECLHSDNNTSPKSIALNLSSSGLTGQIDPAFANLTSINKLDLSNNSLTGKVPDFLASLPNLTELNLEGNKLTGSIPAKLLEKSKDGSLSLRFGGNPDLCQSPSCQTTTKKKIGYIVPVVASLAGLLIVLTALALIWHFKKRSRRGTISNKPLGVNTGPLDTAKRYFIYSEVVNITNNFERVLGKGGFGKVYHGFLNGDQVAVKILSEESTQGYKEFRAEVELLMRVHHTNLTSLIGYCNEDNHMALIYEYMANGNLGDYLSGKSSLILSWEERLQISLDAAQGLEYLHYGCKPPIVHRDVKPANILLNENLQAKIADFGLSRSFPVEGSSQVSTVVAGTIGYLDPEYYATRQMNEKSDVYSFGVVLLEVITGKPAIWHSRTESVHLSDQVGSMLANGDIKGIVDQRLGDRFEVGSAWKITELALACASESSEQRPTMSQVVMELKQSIFGRVNNRSDHKDPVRMVTMNLDTEMVPRAR

SEQ ID NO: 80622 - protein, 767 aa, Arabidopsis thaliana
  peptide (1)..(767): Ceres Seq. ID no. 12656628
MYGNYDGFSKTPEFDLYIGANLWESVVLINETAIMTKEIIYTPPSDHIHVCLVDKNRGTPFLSVLEIRFLKNDTYDTPYEALMLGRRWDFGTATNLQIRYKDDFYDRIWMPYKSPYQKTLNTSLTIDETNHNGFRPASIVMRSAIAPGNESNPLKFNWAPDDPRSKFYIYMHFAEVRELQRNETREFDIYINDVILAENFRPFYLFTDTRSTVDPVGRKMNEIVLQRTGVSTLPPIINAIEIYQINEFLQLPTDQQDVDAMTKIKFKYRVKKNWQGDPCVPVDNSWEGLECLHSDNNTSPKSIALNLSSSGLTGQIDPAFANLTSINKLDLSNNSLTGKVPDFLASLPNLTELNLEGNKLTGSIPAKLLEKSKDGSLSLRFGGNPDLCQSPSCQTTTKKKIGYIVPVVASLAGLLIVLTALALIWHFKKRSRRGTISNKPLGVNTGPLDTAKRYFIYSEVVNITNNFERVLGKGGFGKVYHGFLNGDQVAVKILSEESTQGYKEFRAEVELLMRVHHTNLTSLIGYCNEDNHMALIYEYMANGNLGDYLSGKSSLILSWEERLQISLDAAQGLEYLHYGCKPPIVHRDVKPANILLNENLQAKIADFGLSRSFPVEGSSQVSTVVAGTIGYLDPEYYATRQMNEKSDVYSFGVVLLEVITGKPAIWHSRTESVHLSDQVGSMLANGDIKGIVDQRLGDRFEVGSAWKITELALACASESSEQRPTMSQVVMELKQSIFGRVNNRSDHKDPVRMVTMNLDTEMVPRAR

SEQ ID NO: 80623 - DNA, 2002 bp, Arabidopsis thaliana
  misc_feature (1)..(2002): Ceres Seq. ID no. 12656637
  misc_feature (1)..(2002): Ortholog of  Ceres SEQ ID NO 13599859 as cited in SEQ ID NO 1323
  misc_feature (1)..(2002): Ortholog of  Ceres SEQ ID NO 13596244 as cited in SEQ ID NO 69307
atctctgcctcaaaaatttgcttcctctgtttcgaacccaattgggcatcttcgtcgtcttcttcttcaacattcatcatcgtcatcaatttctctgtagctctttcacaagtatttcttcaatttcatagcgagagagaaataaaagggagaacacagagatcagagagaaattcaaaaacgaatccgtgtgaggacgttttaaaactgccaaagagacgttttacttttacatgcacatagagacatacgtttattttgtgtagctatagctcttaagagtttgaattttctcgagatctttgaccggagcgaaaacgacgaagatatagaaaatctagcgaaacgacgattcggacttgggagactctcttgcgttgtgcttggatctggttccgttgtaaatttgaggttttgattgaccagaggaagttagctttgttcatctagattaggctattattgaggtgttgttgtggctctgaagcaataaaggatttgatgagatgaaggcagttaaaagatggagtatagggaacttagcggacattcccgtgtctttgcctggagctcgataccgtgctcctcctccaggaagaagacgagtatggatcatcatggtgctttcactgatcaccatgttctttattatggcttacatgtatcctcatcatagtaaacgtgcttgttatatgatttcatcaagaggatgcaaggctttagctgattggcttccaccttctctgagggaatattcagatgatgagattgcagctcgtgtagtcattagagaaatattgagttcacctcctgttattagaaagaactctaaaattgctttcatgtttttaactcctggtacattgccttttgagaggctttgggacagatttttcctgggccatgaagggaaattctctgtttatatacatgcatcaaaggaaaggccagttcactacagtcgttactttctcaaccgcgaaattcgtagtgatgaggtggtgtggggaaggatatcaatggttgacgcagagagacggttgttagctaatgctcttagagacacttctaaccagcaatttgttttactctctgatagttgtgtaccacttcgaagttttgaatacatttacaattacctgatgcacagcaatctcagctatgttgactgctttgacgatccaggtcaacatggagcaggcaggcatatgaatcacatgttgcctgaaatcccaaagaaggattttcgaaagggtgcacagtggttcaccatgaagcgacaacacgctgtagcaactatggcagacagtctttactactctaaattccgagattactgcgggccaggtatagagaacaacaagaactgcatagctgatgaacactatctgccaacattctttcatatgcttgatcccggtggcattgctaactggactgtaacacaagttgattggtctgagagaaagtggcatcccaaaacatatatgcctgaggatatcacacacgagttactaaacaacctcacgtctactgacacactcgtacatgtcacaagtgttgggatgggtgaagaaatatggatgccttgtatgtggaacggaatccaaagaccgtgttacttgtttggaaggaaatttcacccggatacactcgataaactgttggatctcttctcaaattacacaagatcagtcacttggaatttgtgattaaaatcagatttttcttcatatacacagtattctttgaccaatgttcgactcccccacccacatgaatcaatatcacctttgaagctgtaacactgcaagtctagaagcttaaggaggtatgagatattttatctcataatatgcttcatttggttggaaggatacgttggttttattcttctctactctgttttttttttggctatatatctcattgttactttactgttgttttgtgttcagaatgttgaacaaacaaaagttatacaggtttatagagtttcttt

SEQ ID NO: 80624 - protein, 401 aa, Arabidopsis thaliana
  peptide (1)..(401): Ceres Seq. ID no. 12656638
MKAVKRWSIGNLADIPVSLPGARYRAPPPGRRRVWIIMVLSLITMFFIMAYMYPHHSKRACYMISSRGCKALADWLPPSLREYSDDEIAARVVIREILSSPPVIRKNSKIAFMFLTPGTLPFERLWDRFFLGHEGKFSVYIHASKERPVHYSRYFLNREIRSDEVVWGRISMVDAERRLLANALRDTSNQQFVLLSDSCVPLRSFEYIYNYLMHSNLSYVDCFDDPGQHGAGRHMNHMLPEIPKKDFRKGAQWFTMKRQHAVATMADSLYYSKFRDYCGPGIENNKNCIADEHYLPTFFHMLDPGGIANWTVTQVDWSERKWHPKTYMPEDITHELLNNLTSTDTLVHVTSVGMGEEIWMPCMWNGIQRPCYLFGRKFHPDTLDKLLDLFSNYTRSVTWNL

SEQ ID NO: 80625 - protein, 364 aa, Arabidopsis thaliana
  peptide (1)..(364): Ceres Seq. ID no. 12656639
MVLSLITMFFIMAYMYPHHSKRACYMISSRGCKALADWLPPSLREYSDDEIAARVVIREILSSPPVIRKNSKIAFMFLTPGTLPFERLWDRFFLGHEGKFSVYIHASKERPVHYSRYFLNREIRSDEVVWGRISMVDAERRLLANALRDTSNQQFVLLSDSCVPLRSFEYIYNYLMHSNLSYVDCFDDPGQHGAGRHMNHMLPEIPKKDFRKGAQWFTMKRQHAVATMADSLYYSKFRDYCGPGIENNKNCIADEHYLPTFFHMLDPGGIANWTVTQVDWSERKWHPKTYMPEDITHELLNNLTSTDTLVHVTSVGMGEEIWMPCMWNGIQRPCYLFGRKFHPDTLDKLLDLFSNYTRSVTWNL

SEQ ID NO: 80626 - protein, 357 aa, Arabidopsis thaliana
  peptide (1)..(357): Ceres Seq. ID no. 12656640
MFFIMAYMYPHHSKRACYMISSRGCKALADWLPPSLREYSDDEIAARVVIREILSSPPVIRKNSKIAFMFLTPGTLPFERLWDRFFLGHEGKFSVYIHASKERPVHYSRYFLNREIRSDEVVWGRISMVDAERRLLANALRDTSNQQFVLLSDSCVPLRSFEYIYNYLMHSNLSYVDCFDDPGQHGAGRHMNHMLPEIPKKDFRKGAQWFTMKRQHAVATMADSLYYSKFRDYCGPGIENNKNCIADEHYLPTFFHMLDPGGIANWTVTQVDWSERKWHPKTYMPEDITHELLNNLTSTDTLVHVTSVGMGEEIWMPCMWNGIQRPCYLFGRKFHPDTLDKLLDLFSNYTRSVTWNL

SEQ ID NO: 80627 - DNA, 2305 bp, Arabidopsis thaliana
  misc_feature (1)..(2305): Ceres Seq. ID no. 12656641
  misc_feature (1)..(2305): Ortholog of  Ceres SEQ ID NO 15225034 as cited in SEQ ID NO 53426
gtgcaaaaagtgtaaccttccttatccgattctgaagcagaaattagctgcagaatcttcagattctctctatacctagattggtttttcacagaatcttcgctattttgttcagatctgccactgtttcagcaaaaacggtcacaaaaaatatgataaatgtgatgaatccaatgaaaggtggaacagagaaaggtttagatcctcagctatggcatgcatgtgctggtggtatggttcgtatgcctcctatgaactctaaagtcttttactttcctcaaggtcacgccgaaaacgcttacgattgtgtcgatttcggtaatctccctattcctcccatggttttgtgtcgtgttttagccattaagtatatggctgatgctgaatctgacgaggttttcgctaaactgagattgattcctttgaaagatgatgagtatgttgatcacgagtatggtgatggtgaagatagtaacggtttcgagagtaatagtgagaaaacgccttcgtttgctaagactttgactcagtctgatgctaataacggtgggggtttctctgttcctcgttattgcgctgagacgattttcccgaggttggattataacgccgagccgccggttcagaccattcttgctaaggatgttcatggtgatgtttggaagttcagacatatttatagagggacgcctcggcgtcaccttcttacaaccggatggagtaattttgtaaaccagaagaagcttgtggcgggagattcgattgtcttcatgagagcggagaatggagatctttgtgtaggtattaggagggctaagagaggagggataggtaatggacccgaatattcagcgggttggaatccgatcggtggaagttgcggctactcttctctgttaagggaagatgaaagcaatagtttgaggagaagtaattgttcccttgcggataggaaggggaaagtgacggctgaatctgttatagaagcagccactcttgctattagcggaagaccgtttgaggttgtgtactatccgagagctagcacttcagagttttgtgtcaaggcattagatgctcgagctgccatgcggattccgtggtgctcaggtatgaggtttaagatggcttttgagacagaggattcgtctcggataagttggtttatggggactgtttcagctgttaatgtctctgatcctatccgttggcctaactctccttggcggcttctacaggtggcgtgggatgagccagatttactccaaaacgtgaagcgagttaacccgtggttggtggaattggtatcaaacgtacatccgatcccgcttacttcgttttcgccaccgaggaaaaagatgcggctacctcagcatccagattacaacaatctgatcaattcgattccagtaccttcattcccaagcaatccccttattagatcaagcccgttaagctctgttctggacaatgttcccgtgggtttacagggagccaggcataatgctcatcagtactacgggttatcatcttcggatcttcaccattactacttgaatagaccacctcctcctcctcctccatcctctctccaactttctccttctctcggtctccgaaacatcgataccaaaaacgaaaaaggattttgctttttgacaatgggaacaacaccatgcaatgataccaaatctaaaaagtcccatattgtattgttcggcaagcttatactacccgaggaacagctatcagaaaaaggctcaacggataccgcaaacatagagaaaacgcagatttcatcaggcgggtcgaaccaaaacggcgttgcgggaagggagttttcttcgtcagatgaaggatcaccttgctctaagaaagttcatgatgcatcaggtttggaaacagggcattgtaaagtgtttatggagtcagacgatgtaggtcgaaccttagacctatcggttcttggttcatacgaagaattgagtcggaaactctctgacatgtttggaatcaaaaagtctgagatgttaagctctgttctctatagggatgcatcaggagccatcaaatacgcaggaaacgaacctttcagtgagttcttgaagacagctcgaagattgacaattctgacggaacaaggaagtgagagcgttgtagtataacttggcagagtgttttgttggagcttggaagtcaaaactcaacgattgaatcttttaagttttttttttcttttatttgtttattttagttccacttttttggattatgtaagtttcaaaatgcaattcacaatctattt

SEQ ID NO: 80628 - protein, 670 aa, Arabidopsis thaliana
  peptide (1)..(670): Ceres Seq. ID no. 12656642
MINVMNPMKGGTEKGLDPQLWHACAGGMVRMPPMNSKVFYFPQGHAENAYDCVDFGNLPIPPMVLCRVLAIKYMADAESDEVFAKLRLIPLKDDEYVDHEYGDGEDSNGFESNSEKTPSFAKTLTQSDANNGGGFSVPRYCAETIFPRLDYNAEPPVQTILAKDVHGDVWKFRHIYRGTPRRHLLTTGWSNFVNQKKLVAGDSIVFMRAENGDLCVGIRRAKRGGIGNGPEYSAGWNPIGGSCGYSSLLREDESNSLRRSNCSLADRKGKVTAESVIEAATLAISGRPFEVVYYPRASTSEFCVKALDARAAMRIPWCSGMRFKMAFETEDSSRISWFMGTVSAVNVSDPIRWPNSPWRLLQVAWDEPDLLQNVKRVNPWLVELVSNVHPIPLTSFSPPRKKMRLPQHPDYNNLINSIPVPSFPSNPLIRSSPLSSVLDNVPVGLQGARHNAHQYYGLSSSDLHHYYLNRPPPPPPPSSLQLSPSLGLRNIDTKNEKGFCFLTMGTTPCNDTKSKKSHIVLFGKLILPEEQLSEKGSTDTANIEKTQISSGGSNQNGVAGREFSSSDEGSPCSKKVHDASGLETGHCKVFMESDDVGRTLDLSVLGSYEELSRKLSDMFGIKKSEMLSSVLYRDASGAIKYAGNEPFSEFLKTARRLTILTEQGSESVVV

SEQ ID NO: 80629 - protein, 666 aa, Arabidopsis thaliana
  peptide (1)..(666): Ceres Seq. ID no. 12656643
MNPMKGGTEKGLDPQLWHACAGGMVRMPPMNSKVFYFPQGHAENAYDCVDFGNLPIPPMVLCRVLAIKYMADAESDEVFAKLRLIPLKDDEYVDHEYGDGEDSNGFESNSEKTPSFAKTLTQSDANNGGGFSVPRYCAETIFPRLDYNAEPPVQTILAKDVHGDVWKFRHIYRGTPRRHLLTTGWSNFVNQKKLVAGDSIVFMRAENGDLCVGIRRAKRGGIGNGPEYSAGWNPIGGSCGYSSLLREDESNSLRRSNCSLADRKGKVTAESVIEAATLAISGRPFEVVYYPRASTSEFCVKALDARAAMRIPWCSGMRFKMAFETEDSSRISWFMGTVSAVNVSDPIRWPNSPWRLLQVAWDEPDLLQNVKRVNPWLVELVSNVHPIPLTSFSPPRKKMRLPQHPDYNNLINSIPVPSFPSNPLIRSSPLSSVLDNVPVGLQGARHNAHQYYGLSSSDLHHYYLNRPPPPPPPSSLQLSPSLGLRNIDTKNEKGFCFLTMGTTPCNDTKSKKSHIVLFGKLILPEEQLSEKGSTDTANIEKTQISSGGSNQNGVAGREFSSSDEGSPCSKKVHDASGLETGHCKVFMESDDVGRTLDLSVLGSYEELSRKLSDMFGIKKSEMLSSVLYRDASGAIKYAGNEPFSEFLKTARRLTILTEQGSESVVV

SEQ ID NO: 80630 - protein, 663 aa, Arabidopsis thaliana
  peptide (1)..(663): Ceres Seq. ID no. 12656644
MKGGTEKGLDPQLWHACAGGMVRMPPMNSKVFYFPQGHAENAYDCVDFGNLPIPPMVLCRVLAIKYMADAESDEVFAKLRLIPLKDDEYVDHEYGDGEDSNGFESNSEKTPSFAKTLTQSDANNGGGFSVPRYCAETIFPRLDYNAEPPVQTILAKDVHGDVWKFRHIYRGTPRRHLLTTGWSNFVNQKKLVAGDSIVFMRAENGDLCVGIRRAKRGGIGNGPEYSAGWNPIGGSCGYSSLLREDESNSLRRSNCSLADRKGKVTAESVIEAATLAISGRPFEVVYYPRASTSEFCVKALDARAAMRIPWCSGMRFKMAFETEDSSRISWFMGTVSAVNVSDPIRWPNSPWRLLQVAWDEPDLLQNVKRVNPWLVELVSNVHPIPLTSFSPPRKKMRLPQHPDYNNLINSIPVPSFPSNPLIRSSPLSSVLDNVPVGLQGARHNAHQYYGLSSSDLHHYYLNRPPPPPPPSSLQLSPSLGLRNIDTKNEKGFCFLTMGTTPCNDTKSKKSHIVLFGKLILPEEQLSEKGSTDTANIEKTQISSGGSNQNGVAGREFSSSDEGSPCSKKVHDASGLETGHCKVFMESDDVGRTLDLSVLGSYEELSRKLSDMFGIKKSEMLSSVLYRDASGAIKYAGNEPFSEFLKTARRLTILTEQGSESVVV

SEQ ID NO: 80631 - DNA, 2506 bp, Arabidopsis thaliana
  misc_feature (1)..(2506): Ceres Seq. ID no. 12656657
  misc_feature (1)..(2506): Ortholog of  Ceres SEQ ID NO 13600301 as cited in SEQ ID NO 1010
actactcacaaatatatttttgaccgttgttcactctcaccttcttcacacgctccacatcttcttctgattgacctttaacacctgaaagtttctcctcttgagctttggaattgaagctaagataagaaatttagagagaaatgggatgttctcattcgaagtttgatgacgatgaagctgttcagatctgtaaagataggaaacgtttcatcaaacaagcagtggaacataggactgggtttgcttctggtcacattgcttatatccagtctctgaggaaggtttcagatgctctccgggaatatatcgaaggagatgagccacatgagttcatgttggacacatgtgtcactccagtgaagagaatgagcagctcaggcggcttcattgagatatctcctccttcaaaaatggttcagagtgaggcagagtcgaaattgaatgtcaacagttacttgatggctagtggaagcagaccggttcgggttgaagaaaagcctcctagatcacctgagacttttcaggttgagacttatggagcagatagtttctttgggatgaacatgaacatgaacagtccgggactaggcagtcacaatataccgcctccttcaccacagaactctcaatgggatttcttttggaatccattctcggcattggatcagtatggatacagttatgataaccaaaatggtatggatgatgatatgagacggctgaggcgggttcgggaagaagaagggattccagatcttgaagaagatgaatatgtaaagtttgaggatcatcataacatgaaagcaacagaagattttaatggaggtaaaatgtatcaagaagataaagtagaacatgttaatgaggagttcacggacagtggatgcaagattgagaatgagagcgacaagaactgcaatggaactcaagaacggcgcagtcttgaggtgtccagaggaggaactacagggcatgttgttggagttacatcagatgatggaaaaggagagacacctggtttcactgtgtacttgaatagaaggccaacaagcatggcagaagttattaaagatcttgaagatcagtttgcgatcatatgtaccgctggtaaagaagtctcgggtctgttggaagctagtcgagttcaatacacatcctctaatgaactgagtgccatgacaatgctgaacccagtagctttgttccgctcaggcggctcatcgagatcttcttcctcatcaagattcttgatcagctcttctggaggttcaagggcgagtgaattcgaaagcagcagcgaattttcggaagaatcttgtatgctctcgggtagccatcaatcaacattggaccgactatacgcgtgggagaagaaactctatgatgaagtcaagtctggagaccgaatacggattgcatatgaaaagaaatgtttggtgctgaggaatcaggatgtgaaaggagctgactcttcggcagttgataaaacaagagctacaataagagatctacatactcagatcaaggtctctatacactcaatagagtctatttccgaaaggatcgagactcttcgcgaccaagaactgcttccacagcttcttgagcttgttcaaggattagctcagatgtggaaagtgatggcagagtgtcaccagatacagaagcgaacattggacgaagccaaactattacttgcaaccacaccttctaaccgtcacaagaagcaacaacagacttcactaccagagatcaactctcaaagattagctcgatcagcattgcatcttgtggttcagcttcgaaactggagagcctgcttccaagcatggatcacatcacaaagatcctacatactctctttaaccgggtggttactcagatgtttcagatgtgaccctgacccagagaaagtcacattaacgtcttgtcctcacccaatttatgaagtctgcatccaatggtcaaggctactcaacggattaaacgagaagccagtactagacaaactcgacttctttgcctcagggatgggtgcaatctatgctcggcaactaaaggaagacacgtctccggtaacagattcttcgaggaagtactcaagaccagagagcatggagcttgttgaagctgagaaagtggaagaagagaagataatgactgcagagaaactagctgagattgcagttaaagtactctgccatggaatgtcagttgcagtgagctcactcgccgagttctccattagctcagccgatgaacactcgaagctagttacccatcgagaggaggacatgccagagcaaaccaagatttaaacttttctattctcaacttctcatttatttatttatatatccttagaagattaggactttaggttagattagccatggaagctgcatcatctactatcaaaagatagtttagatggatggagatttgtgtaatattaagacacataaagttagttcagttagacttctaatttgggattttggtc

SEQ ID NO: 80632 - protein, 725 aa, Arabidopsis thaliana
  peptide (1)..(725): Ceres Seq. ID no. 12656658
MGCSHSKFDDDEAVQICKDRKRFIKQAVEHRTGFASGHIAYIQSLRKVSDALREYIEGDEPHEFMLDTCVTPVKRMSSSGGFIEISPPSKMVQSEAESKLNVNSYLMASGSRPVRVEEKPPRSPETFQVETYGADSFFGMNMNMNSPGLGSHNIPPPSPQNSQWDFFWNPFSALDQYGYSYDNQNGMDDDMRRLRRVREEEGIPDLEEDEYVKFEDHHNMKATEDFNGGKMYQEDKVEHVNEEFTDSGCKIENESDKNCNGTQERRSLEVSRGGTTGHVVGVTSDDGKGETPGFTVYLNRRPTSMAEVIKDLEDQFAIICTAGKEVSGLLEASRVQYTSSNELSAMTMLNPVALFRSGGSSRSSSSSRFLISSSGGSRASEFESSSEFSEESCMLSGSHQSTLDRLYAWEKKLYDEVKSGDRIRIAYEKKCLVLRNQDVKGADSSAVDKTRATIRDLHTQIKVSIHSIESISERIETLRDQELLPQLLELVQGLAQMWKVMAECHQIQKRTLDEAKLLLATTPSNRHKKQQQTSLPEINSQRLARSALHLVVQLRNWRACFQAWITSQRSYILSLTGWLLRCFRCDPDPEKVTLTSCPHPIYEVCIQWSRLLNGLNEKPVLDKLDFFASGMGAIYARQLKEDTSPVTDSSRKYSRPESMELVEAEKVEEEKIMTAEKLAEIAVKVLCHGMSVAVSSLAEFSISSADEHSKLVTHREEDMPEQTKI

SEQ ID NO: 80633 - protein, 661 aa, Arabidopsis thaliana
  peptide (1)..(661): Ceres Seq. ID no. 12656659
MLDTCVTPVKRMSSSGGFIEISPPSKMVQSEAESKLNVNSYLMASGSRPVRVEEKPPRSPETFQVETYGADSFFGMNMNMNSPGLGSHNIPPPSPQNSQWDFFWNPFSALDQYGYSYDNQNGMDDDMRRLRRVREEEGIPDLEEDEYVKFEDHHNMKATEDFNGGKMYQEDKVEHVNEEFTDSGCKIENESDKNCNGTQERRSLEVSRGGTTGHVVGVTSDDGKGETPGFTVYLNRRPTSMAEVIKDLEDQFAIICTAGKEVSGLLEASRVQYTSSNELSAMTMLNPVALFRSGGSSRSSSSSRFLISSSGGSRASEFESSSEFSEESCMLSGSHQSTLDRLYAWEKKLYDEVKSGDRIRIAYEKKCLVLRNQDVKGADSSAVDKTRATIRDLHTQIKVSIHSIESISERIETLRDQELLPQLLELVQGLAQMWKVMAECHQIQKRTLDEAKLLLATTPSNRHKKQQQTSLPEINSQRLARSALHLVVQLRNWRACFQAWITSQRSYILSLTGWLLRCFRCDPDPEKVTLTSCPHPIYEVCIQWSRLLNGLNEKPVLDKLDFFASGMGAIYARQLKEDTSPVTDSSRKYSRPESMELVEAEKVEEEKIMTAEKLAEIAVKVLCHGMSVAVSSLAEFSISSADEHSKLVTHREEDMPEQTKI

SEQ ID NO: 80634 - protein, 650 aa, Arabidopsis thaliana
  peptide (1)..(650): Ceres Seq. ID no. 12656660
MSSSGGFIEISPPSKMVQSEAESKLNVNSYLMASGSRPVRVEEKPPRSPETFQVETYGADSFFGMNMNMNSPGLGSHNIPPPSPQNSQWDFFWNPFSALDQYGYSYDNQNGMDDDMRRLRRVREEEGIPDLEEDEYVKFEDHHNMKATEDFNGGKMYQEDKVEHVNEEFTDSGCKIENESDKNCNGTQERRSLEVSRGGTTGHVVGVTSDDGKGETPGFTVYLNRRPTSMAEVIKDLEDQFAIICTAGKEVSGLLEASRVQYTSSNELSAMTMLNPVALFRSGGSSRSSSSSRFLISSSGGSRASEFESSSEFSEESCMLSGSHQSTLDRLYAWEKKLYDEVKSGDRIRIAYEKKCLVLRNQDVKGADSSAVDKTRATIRDLHTQIKVSIHSIESISERIETLRDQELLPQLLELVQGLAQMWKVMAECHQIQKRTLDEAKLLLATTPSNRHKKQQQTSLPEINSQRLARSALHLVVQLRNWRACFQAWITSQRSYILSLTGWLLRCFRCDPDPEKVTLTSCPHPIYEVCIQWSRLLNGLNEKPVLDKLDFFASGMGAIYARQLKEDTSPVTDSSRKYSRPESMELVEAEKVEEEKIMTAEKLAEIAVKVLCHGMSVAVSSLAEFSISSADEHSKLVTHREEDMPEQTKI

SEQ ID NO: 80635 - DNA, 477 bp, Arabidopsis thaliana
  misc_feature (1)..(477): Ceres Seq. ID no. 12656661
  misc_feature (1)..(477): Ortholog of  Ceres SEQ ID NO 12609907 as cited in SEQ ID NO 51820
atggagaggcaaatcataaacaggaagaaacgagtgttttctcttgaaccaaacaagaaccctagtgcagttttcacgagaaaatacacaagccacttggttcctgcactcaagaagctcaacatgaacaagaactcttcaaaacaaaccgtgaagcatgaagtagatatggctttggctttgtctgctcaagaatttgcatggagccgtttcttgctgcagaagctatcgtcctcatcgaatccaaccactaccactagttcttcttccgatggaattcggattcttgaaagacccgataaagaaggcggaaacgaagaaggagggatagaggagagactgagggaattgaagaagcttttgccaggtggggaagagatgaatgtggaagaaatgttgagtgagattggtaactacattaaatgtcttgagttgcagacgattgctctcaagtccattgttcaagatagtacttga

SEQ ID NO: 80636 - protein, 158 aa, Arabidopsis thaliana
  peptide (1)..(158): Ceres Seq. ID no. 12656662
MERQIINRKKRVFSLEPNKNPSAVFTRKYTSHLVPALKKLNMNKNSSKQTVKHEVDMALALSAQEFAWSRFLLQKLSSSSNPTTTTSSSSDGIRILERPDKEGGNEEGGIEERLRELKKLLPGGEEMNVEEMLSEIGNYIKCLELQTIALKSIVQDST

SEQ ID NO: 80637 - protein, 117 aa, Arabidopsis thaliana
  peptide (1)..(117): Ceres Seq. ID no. 12656663
MNKNSSKQTVKHEVDMALALSAQEFAWSRFLLQKLSSSSNPTTTTSSSSDGIRILERPDKEGGNEEGGIEERLRELKKLLPGGEEMNVEEMLSEIGNYIKCLELQTIALKSIVQDST

SEQ ID NO: 80638 - protein, 102 aa, Arabidopsis thaliana
  peptide (1)..(102): Ceres Seq. ID no. 12656664
MALALSAQEFAWSRFLLQKLSSSSNPTTTTSSSSDGIRILERPDKEGGNEEGGIEERLRELKKLLPGGEEMNVEEMLSEIGNYIKCLELQTIALKSIVQDST

SEQ ID NO: 80639 - DNA, 2603 bp, Arabidopsis thaliana
  misc_feature (1)..(2603): Ceres Seq. ID no. 12656665
  misc_feature (1)..(2603): Ortholog of  Ceres SEQ ID NO 13599779 as cited in SEQ ID NO 0
gcgacaatctctatctctctctatctcttctccgctcacagcgaatctctctctctctctctctctctctctcttctccggtgtattccgttctccgggaatttctccgaagagggagagaggaaaaaaaaaacgtccgattcaatctcttcgttgctcgacgaatttttcttaagctttccttattggagatttgaagattctgagtggttgttatgataatgtgggtttgattagttcttcacacacagcttctctacgctcatggattcttctctcgatggagctgcaggtgactcatcgaaatgcagtgaaatgagtgttgatgagaagagacagcttgtttatgaactgtcgaagcaatcacatctagctgctgaggtcttgcaggcatggagccgccaagagattctacagatcttatgcgcagaaatgggaaaagaaaggaagtatactggtttgaccaaagtcaagatcatcgagacccttttgaaaattgtatctgagaaaaactctggagagtgtgaagggaagaagagagattctgattgtttgcctattcagagaaacactaagagacaaaggaaggttgataatccttctcggtatgtgattccagcaaccaacattgtaacaagcaacaatgcctcagggagctgcagctcggttaatactaaaggtgagagtactaccatctactgcaaaaatttggcttgtcgtgctgtactgagacaggaagactcgttttgcagaaggtgttcatgttgcatctgtcgtaagtatgatgataacaaagatcctagtctctggttaacatgtagctcagatcctccatttgagggtgagtcttgcggattctcgtgtcatcttgaatgtgctttcaacactgaaaaatccggtcttggaaaagacaagcaaagtgagggatgctgcttctattgtgtctcttgcggtaaagcaaacagtttgcttgaatgctggaagaagcaattgacgattgctaaagaaaccagaagggtagaagtgctttgttaccgtcttttcttagtccagaaactattgaagagctcaactaaataccgaaatctgtgtgaggttgtggatgaagctgtcaagactcttgaagctgatgtgggtcctctcactggtcttcctatgaaaatgggtagaggaattgtaaacagacttcattcgggacccgatgtgcagaaactttgctcttctgctcttgaatctcttgaaactatagcaactacacctcctgatgttgctgcattaccttcacctcgcagctccaagatgcagcaagattgttcttatgtattgagcaatgagatatctgcagatacagcaaccacaggatcaaccaagatcaggttcgaggatgtaaacgcgacttcacttacagtggttctcgcctctaatgaaattccctcacctccaaacatcgttcactacagtatttggcatcgtaaggtaccagaaaaagattacccggagaaatcgacttgcacattgtttattccaaacacaagatttgttgtctctggattagctccagcttctgagtactgcttcaaagttgtgtcctatagtggaaccagagaaatgggcgttgatgaaatcaatgttttgacacgtagcgctgaagaaggagcgaattgctcttcggcagtggaaagaagcgtaagccctctcacaaattgcagcacattgtcttctaatccttcttctgttgaagctgagtccaacaacgattacattgtcccaaagaagccatcttcaaagaacgaagacaacaattctccttcagtcgatgaaagtgctgcgaaaaggatgaagaggacaaccgactcagacattgtacagattgagaaggacgttgagcagattgtgttgttggatgatgaagaacaagaagctgttctggataagacggaatctgaaactccagtcgtggttactacgaaaagtcttgttggtaatcgaaacagttcagatgcgagtttgccaattactcccttcaggtcagatgaaatcaagaaccgtcaagctagaatcgaaatatcgatgaaagacaactgtaacaacggtgatcattcagcgaatggaggaacagaaagtggattagagcattgtgtgaagatcataagacaactcgagtgttcaggacatatcgataagaatttcagacagaagtttctgacttggtatagcttgagagcaacgtcacaagagattagagttgtgaagatattcattgatacatttattgatgatcccatggctttggctgagcagctcattgatactttcgacgaccgtgtttcgataaagcgttctgcggttggtggtagcggtgcgtctgcagttgttccatctggattctgtatgaagttgtggcattagagaatgggaacttgtgctctgtttttttcaagtcattttcaaaacgttattctaattattgggaaatttgcattattggaacatttccatgcaagaacagtagtactgttgctatcgaatagatcgtctttgtcggattatttatttatttttagtggatttgattccatttataatttagtaattagtcctag

SEQ ID NO: 80640 - protein, 714 aa, Arabidopsis thaliana
  peptide (1)..(714): Ceres Seq. ID no. 12656666
MDSSLDGAAGDSSKCSEMSVDEKRQLVYELSKQSHLAAEVLQAWSRQEILQILCAEMGKERKYTGLTKVKIIETLLKIVSEKNSGECEGKKRDSDCLPIQRNTKRQRKVDNPSRYVIPATNIVTSNNASGSCSSVNTKGESTTIYCKNLACRAVLRQEDSFCRRCSCCICRKYDDNKDPSLWLTCSSDPPFEGESCGFSCHLECAFNTEKSGLGKDKQSEGCCFYCVSCGKANSLLECWKKQLTIAKETRRVEVLCYRLFLVQKLLKSSTKYRNLCEVVDEAVKTLEADVGPLTGLPMKMGRGIVNRLHSGPDVQKLCSSALESLETIATTPPDVAALPSPRSSKMQQDCSYVLSNEISADTATTGSTKIRFEDVNATSLTVVLASNEIPSPPNIVHYSIWHRKVPEKDYPEKSTCTLFIPNTRFVVSGLAPASEYCFKVVSYSGTREMGVDEINVLTRSAEEGANCSSAVERSVSPLTNCSTLSSNPSSVEAESNNDYIVPKKPSSKNEDNNSPSVDESAAKRMKRTTDSDIVQIEKDVEQIVLLDDEEQEAVLDKTESETPVVVTTKSLVGNRNSSDASLPITPFRSDEIKNRQARIEISMKDNCNNGDHSANGGTESGLEHCVKIIRQLECSGHIDKNFRQKFLTWYSLRATSQEIRVVKIFIDTFIDDPMALAEQLIDTFDDRVSIKRSAVGGSGASAVVPSGFCMKLWH

SEQ ID NO: 80641 - protein, 697 aa, Arabidopsis thaliana
  peptide (1)..(697): Ceres Seq. ID no. 12656667
MSVDEKRQLVYELSKQSHLAAEVLQAWSRQEILQILCAEMGKERKYTGLTKVKIIETLLKIVSEKNSGECEGKKRDSDCLPIQRNTKRQRKVDNPSRYVIPATNIVTSNNASGSCSSVNTKGESTTIYCKNLACRAVLRQEDSFCRRCSCCICRKYDDNKDPSLWLTCSSDPPFEGESCGFSCHLECAFNTEKSGLGKDKQSEGCCFYCVSCGKANSLLECWKKQLTIAKETRRVEVLCYRLFLVQKLLKSSTKYRNLCEVVDEAVKTLEADVGPLTGLPMKMGRGIVNRLHSGPDVQKLCSSALESLETIATTPPDVAALPSPRSSKMQQDCSYVLSNEISADTATTGSTKIRFEDVNATSLTVVLASNEIPSPPNIVHYSIWHRKVPEKDYPEKSTCTLFIPNTRFVVSGLAPASEYCFKVVSYSGTREMGVDEINVLTRSAEEGANCSSAVERSVSPLTNCSTLSSNPSSVEAESNNDYIVPKKPSSKNEDNNSPSVDESAAKRMKRTTDSDIVQIEKDVEQIVLLDDEEQEAVLDKTESETPVVVTTKSLVGNRNSSDASLPITPFRSDEIKNRQARIEISMKDNCNNGDHSANGGTESGLEHCVKIIRQLECSGHIDKNFRQKFLTWYSLRATSQEIRVVKIFIDTFIDDPMALAEQLIDTFDDRVSIKRSAVGGSGASAVVPSGFCMKLWH

SEQ ID NO: 80642 - protein, 658 aa, Arabidopsis thaliana
  peptide (1)..(658): Ceres Seq. ID no. 12656668
MGKERKYTGLTKVKIIETLLKIVSEKNSGECEGKKRDSDCLPIQRNTKRQRKVDNPSRYVIPATNIVTSNNASGSCSSVNTKGESTTIYCKNLACRAVLRQEDSFCRRCSCCICRKYDDNKDPSLWLTCSSDPPFEGESCGFSCHLECAFNTEKSGLGKDKQSEGCCFYCVSCGKANSLLECWKKQLTIAKETRRVEVLCYRLFLVQKLLKSSTKYRNLCEVVDEAVKTLEADVGPLTGLPMKMGRGIVNRLHSGPDVQKLCSSALESLETIATTPPDVAALPSPRSSKMQQDCSYVLSNEISADTATTGSTKIRFEDVNATSLTVVLASNEIPSPPNIVHYSIWHRKVPEKDYPEKSTCTLFIPNTRFVVSGLAPASEYCFKVVSYSGTREMGVDEINVLTRSAEEGANCSSAVERSVSPLTNCSTLSSNPSSVEAESNNDYIVPKKPSSKNEDNNSPSVDESAAKRMKRTTDSDIVQIEKDVEQIVLLDDEEQEAVLDKTESETPVVVTTKSLVGNRNSSDASLPITPFRSDEIKNRQARIEISMKDNCNNGDHSANGGTESGLEHCVKIIRQLECSGHIDKNFRQKFLTWYSLRATSQEIRVVKIFIDTFIDDPMALAEQLIDTFDDRVSIKRSAVGGSGASAVVPSGFCMKLWH

SEQ ID NO: 80643 - DNA, 1025 bp, Arabidopsis thaliana
  misc_feature (1)..(1025): Ceres Seq. ID no. 12656697
  misc_feature (1)..(1025): Ortholog of  Ceres SEQ ID NO 15170447 as cited in SEQ ID NO 52849
  misc_feature (1)..(1025): Ortholog of  Ceres SEQ ID NO 13589042 as cited in SEQ ID NO 60626
  misc_feature (1)..(1025): Ortholog of  Ceres SEQ ID NO 14302887 as cited in SEQ ID NO 66146
atgcctaaaccacttgttgattttggaaacaaacccatgattttgcatcagattgaagctctaaaaggtgctggagtgactgaagttgtattagctatcaatcaccaacaaccagaggtcatgttgaactttgtgaaagaatatgagaagaagctagagattaagattacattttcccaagaaactgaaccgcttggaacagcagggcctctcgcgctggctcgggataagctggtcgatgaatcaggccaacccttttttgtactaaacagcgatgttatctgtgaatacccattgcttgagatgatcgagtttcacaagactaaccgtgctgaagcatcaatcatggtgaccgaggttgatgatccttctaagtatggtgtggtggttacagaggaaggtacagcgagagttgaaagttttgtcgagaaaccgaaacattttgtggggaacaagatcaacgctgggatatacctcttgagcccatctgttcttgacaggattgagctgagaaggacttcgatagagaaagagatattccctaagatagcttcagagaagaagctttacgcgatggtactacctggtttttggatggacattggtcaaccgaaagattacataaccgggcaaagaatgtaccttaactctctaagagagaaaactccgcaagaactggccacaggggataacataatcgggaatgttctcgtgcacgaaagtgcggttataggagaaggttgcttgataggacctgatgtggtgattggtccgggatgtgtgattgattcaggtgtaagattgtttggttgtactgtaatgcgcggtgtgtggatcaaggaacatgcgtgtatctctaatagtatcgtgggatgggattcaaccgttggaaggtgggctcgagtttttaatataacggttcttggcaaagatgttaacgtcgccgatgcagaggtttacaacagtggggttgttatcgaagagcaaggtctgtgaaaccagagcctagacctagattagttagt

SEQ ID NO: 80644 - protein, 331 aa, Arabidopsis thaliana
  peptide (1)..(331): Ceres Seq. ID no. 12656698
MPKPLVDFGNKPMILHQIEALKGAGVTEVVLAINHQQPEVMLNFVKEYEKKLEIKITFSQETEPLGTAGPLALARDKLVDESGQPFFVLNSDVICEYPLLEMIEFHKTNRAEASIMVTEVDDPSKYGVVVTEEGTARVESFVEKPKHFVGNKINAGIYLLSPSVLDRIELRRTSIEKEIFPKIASEKKLYAMVLPGFWMDIGQPKDYITGQRMYLNSLREKTPQELATGDNIIGNVLVHESAVIGEGCLIGPDVVIGPGCVIDSGVRLFGCTVMRGVWIKEHACISNSIVGWDSTVGRWARVFNITVLGKDVNVADAEVYNSGVVIEEQGL

SEQ ID NO: 80645 - protein, 319 aa, Arabidopsis thaliana
  peptide (1)..(319): Ceres Seq. ID no. 12656699
MILHQIEALKGAGVTEVVLAINHQQPEVMLNFVKEYEKKLEIKITFSQETEPLGTAGPLALARDKLVDESGQPFFVLNSDVICEYPLLEMIEFHKTNRAEASIMVTEVDDPSKYGVVVTEEGTARVESFVEKPKHFVGNKINAGIYLLSPSVLDRIELRRTSIEKEIFPKIASEKKLYAMVLPGFWMDIGQPKDYITGQRMYLNSLREKTPQELATGDNIIGNVLVHESAVIGEGCLIGPDVVIGPGCVIDSGVRLFGCTVMRGVWIKEHACISNSIVGWDSTVGRWARVFNITVLGKDVNVADAEVYNSGVVIEEQGL

SEQ ID NO: 80646 - protein, 291 aa, Arabidopsis thaliana
  peptide (1)..(291): Ceres Seq. ID no. 12656700
MLNFVKEYEKKLEIKITFSQETEPLGTAGPLALARDKLVDESGQPFFVLNSDVICEYPLLEMIEFHKTNRAEASIMVTEVDDPSKYGVVVTEEGTARVESFVEKPKHFVGNKINAGIYLLSPSVLDRIELRRTSIEKEIFPKIASEKKLYAMVLPGFWMDIGQPKDYITGQRMYLNSLREKTPQELATGDNIIGNVLVHESAVIGEGCLIGPDVVIGPGCVIDSGVRLFGCTVMRGVWIKEHACISNSIVGWDSTVGRWARVFNITVLGKDVNVADAEVYNSGVVIEEQGL

SEQ ID NO: 80647 - DNA, 1570 bp, Arabidopsis thaliana
  misc_feature (1)..(1570): Ceres Seq. ID no. 12656701
  misc_feature (1)..(1570): Ortholog of  Ceres SEQ ID NO 14315241 as cited in SEQ ID NO 52516
  misc_feature (1)..(1570): Ortholog of  Ceres SEQ ID NO 13594349 as cited in SEQ ID NO 58161
  misc_feature (1)..(1570): Ortholog of  Ceres SEQ ID NO 13663419 as cited in SEQ ID NO 66561
  misc_feature (1)..(1570): Ortholog of  Ceres SEQ ID NO 15177892 as cited in SEQ ID NO 0
atatactatatgacctaattaattacacacacacacacaaaaacccattgaagaaaaaaaaagcgtggagagtgtgtgagaggacacgaaatggcaagaacccatttcattttccttcttcttgtagctcttttatcgacaacatttccatcatcatcatcttcaagagagcaagagaaggacagaatcaaagcacttccaggccaaccaaaagtggcattctcacaatactcaggctatgtcaatgttaaccagtctcatggtcgtgccctcttctattggcttactgagtcatcttctccttctccccacaccaagccccttcttctttggctcaatggaggaccgggctgctcgtcgattgcttatggagcttcagaggaaattggaccgtttcgtatcaacaaaaccggttccaatctctatctcaacaagttcgcttggaacaaagacgcaaaccttctgtttcttgaatcaccggccggagttggatattcctacacgaacacaagctccgatcttaaagactccggagatgaacgaacagctcaagacaacttgatatttcttatcaaatggttatcgagatttcctcaatacaaatacagagacttctatatcgctggtgaaagctatgccgggcattatgttcctcagcttgccaaaaagataaatgactacaacaaagctttctccaaaccaatcattaatctcaaaggattcttggtgggaaatgcagtgacggacaatcagtacgacagtataggaacagtaacttactggtggactcacgcaattatctccgacaaaagctacaagtcaatcctcaaatactgcaatttcacggtggagagagtttccgacgattgcgacaatgcggttaactacgctatgaaccatgagtttggtgacattgatcagtacagcatttacaccccaacgtgcgtggctgctcaacagaagaagaacacaaccggtttctttgtgcggatgaagaacacactcttgcgtagacggttagtgtctggctatgatccttgtacggagagttatgcagagaagtattttaaccgtcccgatgttcagagagccatgcacgctaatgttactggaattcgctataaatggacagcttgcagtgatgttctgatcaagacctggaaagattcggacaagaccatgttgcccatatacaaggaacttgcagcgtccggtttgaggatctggattttcagcggtgatacagactcggtggttccagtgaccgcgacacggttttccctcagccatcttaatctcccggtgaaaactcgttggtatccttggtacactgataaccaggtgggaggatggacagaggtttacaagggactgacctttgcaacggtacgaggggcaggccacgaggtgcctttatttgaaccaaagcgtgctctcattcttttcagatcattcttggccgggaaggaactcccaagatcttattagctactttaataacctaaacatagagtaagagaaaatgtcccgaaggacaatttggctaccagattaggaacctattccgagt

SEQ ID NO: 80648 - protein, 465 aa, Arabidopsis thaliana
  peptide (1)..(465): Ceres Seq. ID no. 12656702
MARTHFIFLLLVALLSTTFPSSSSSREQEKDRIKALPGQPKVAFSQYSGYVNVNQSHGRALFYWLTESSSPSPHTKPLLLWLNGGPGCSSIAYGASEEIGPFRINKTGSNLYLNKFAWNKDANLLFLESPAGVGYSYTNTSSDLKDSGDERTAQDNLIFLIKWLSRFPQYKYRDFYIAGESYAGHYVPQLAKKINDYNKAFSKPIINLKGFLVGNAVTDNQYDSIGTVTYWWTHAIISDKSYKSILKYCNFTVERVSDDCDNAVNYAMNHEFGDIDQYSIYTPTCVAAQQKKNTTGFFVRMKNTLLRRRLVSGYDPCTESYAEKYFNRPDVQRAMHANVTGIRYKWTACSDVLIKTWKDSDKTMLPIYKELAASGLRIWIFSGDTDSVVPVTATRFSLSHLNLPVKTRWYPWYTDNQVGGWTEVYKGLTFATVRGAGHEVPLFEPKRALILFRSFLAGKELPRSY

SEQ ID NO: 80649 - DNA, 2459 bp, Arabidopsis thaliana
  misc_feature (1)..(2459): Ceres Seq. ID no. 12656710
  misc_feature (1)..(2459): Ortholog of  Ceres SEQ ID NO 12586556 as cited in SEQ ID NO 64667
  misc_feature (1)..(2459): Ortholog of  Ceres SEQ ID NO 13660894 as cited in SEQ ID NO 67475
atgctgctacggacagtatcgtccgccaccgccgagacaaccgccgcattgataagcaagaacacatatctcgatttcttcaaaagatcaacttctatatctcaccttgctcaaacccatgctcagatcattctccatggcttccgaaacgacatctcattgctcaccaagcttactcaacgactctccgacctcggcgccatttactacgcacgcgacattttcctctccgtccaaagacctgacgttttccttttcaacgtcctcatgcgtggcttctccgtcaacgaatcacctcactcttcgctctctgtgttcgctcatctaaggaaatccactgatctcaagcccaacagctccacctacgccttcgctatctcggctgcttctgggtttcgtgacgacagagctggccgtgttattcatggtcaagcggtcgttgatgggtgtgactcagaattgctgcttgggtctaacattgttaagatgtacttcaagttttggcgagtcgaagatgctaggaaggtgttcgacagaatgcctgagaaagacaccattttgtggaacacgatgatatctggctaccgaaagaatgaaatgtatgtggaatctattcaggttttcagggatttgatcaatgagagctgtacccgtttggacactacaactctgcttgatattcttcccgctgttgcagagttgcaggagctgagactcggcatgcaaatccatagtcttgctacaaaaactgggtgctactcccacgattatgttcttactggtttcatctcactatactcaaagtgtggaaagattaagatgggaagtgctctgtttcgtgagtttcgtaaaccagatatagtagcttacaatgcaatgattcatgggtacacatccaatggagagactgagctctctttaagcctgtttaaagagctgatgttatcaggagcaaggttgaggtcaagcacgttggtgagtctggtccctgtctctggtcatcttatgcttatatatgccattcatggttactgcttgaaatcgaatttcctgtctcatgcttctgtctcaaccgcgttaactacggtttatagtaaattgaatgagatagaatcagcccggaagctttttgatgagtctccggaaaaaagcttgccatcttggaatgcaatgatctcaggttacacccaaaacgggttgacagaggacgcgatatctctcttcagagaaatgcagaagtctgaattcagtccaaaccctgtcacaataacttgtattctatcagcttgtgcgcagttaggagctttaagtttggggaaatgggttcatgatttagtaaggagcacagattttgagtctagcatatatgtgtctactgctttgattggtatgtatgcaaagtgtggaagcattgcagaagcacgccgattgtttgacttgatgacaaagaagaatgaagttacatggaacacgatgatttctggttatggacttcatggacaaggacaagaagctctgaatattttctatgagatgttgaattccggtattacaccaacaccagtcactttcctctgcgttctttacgcttgtagtcatgctggcttggtcaaagaaggtgatgaaattttcaattccatgatccaccggtatggttttgaaccatcagtcaagcattacgcctgtatggttgatattcttggccgagcaggacacttacagagagcattgcagtttatagaggcaatgtcgattgagcctggttcttctgtgtgggaaacattgctaggagcttgtaggattcacaaagacacaaaccttgcccgaacagtctctgagaagctctttgagctagatccagacaatgtaggataccatgttttgctgtcgaatattcactcagctgatagaaactatccacaggctgctacggttagacaaactgcaaagaagaggaaactagccaaagctcctggatataccttaatagaaataggtgaaacgcctcatgtctttacctcaggtgatcagtcacatccacaggtaaaggaaatctatgagaagctggagaagcttgaagggaagatgagggaagctgggtaccaacccgagactgagttggccctgcatgatgtggaggaggaagaaagggagctgatggtgaaggttcacagcgagaggctagccattgcctttggactcatagctactgagccaggaactgaaatccggatcataaagaatcttcgagtctgtttagactgtcacaccgtaaccaaactcatctcaaagatcacagagagagtgattgttgtaagagatgccaaccgcttccatcacttcaaagacggtgtctgttcatgtggagattattggtagtgactcgtttttggcctcaacacaagtcatagtgtactcatcctgtaacattacctcactcataattgatttcttttttg

SEQ ID NO: 80650 - protein, 792 aa, Arabidopsis thaliana
  peptide (1)..(792): Ceres Seq. ID no. 12656711
MLLRTVSSATAETTAALISKNTYLDFFKRSTSISHLAQTHAQIILHGFRNDISLLTKLTQRLSDLGAIYYARDIFLSVQRPDVFLFNVLMRGFSVNESPHSSLSVFAHLRKSTDLKPNSSTYAFAISAASGFRDDRAGRVIHGQAVVDGCDSELLLGSNIVKMYFKFWRVEDARKVFDRMPEKDTILWNTMISGYRKNEMYVESIQVFRDLINESCTRLDTTTLLDILPAVAELQELRLGMQIHSLATKTGCYSHDYVLTGFISLYSKCGKIKMGSALFREFRKPDIVAYNAMIHGYTSNGETELSLSLFKELMLSGARLRSSTLVSLVPVSGHLMLIYAIHGYCLKSNFLSHASVSTALTTVYSKLNEIESARKLFDESPEKSLPSWNAMISGYTQNGLTEDAISLFREMQKSEFSPNPVTITCILSACAQLGALSLGKWVHDLVRSTDFESSIYVSTALIGMYAKCGSIAEARRLFDLMTKKNEVTWNTMISGYGLHGQGQEALNIFYEMLNSGITPTPVTFLCVLYACSHAGLVKEGDEIFNSMIHRYGFEPSVKHYACMVDILGRAGHLQRALQFIEAMSIEPGSSVWETLLGACRIHKDTNLARTVSEKLFELDPDNVGYHVLLSNIHSADRNYPQAATVRQTAKKRKLAKAPGYTLIEIGETPHVFTSGDQSHPQVKEIYEKLEKLEGKMREAGYQPETELALHDVEEEERELMVKVHSERLAIAFGLIATEPGTEIRIIKNLRVCLDCHTVTKLISKITERVIVVRDANRFHHFKDGVCSCGDYW

SEQ ID NO: 80651 - protein, 703 aa, Arabidopsis thaliana
  peptide (1)..(703): Ceres Seq. ID no. 12656712
MRGFSVNESPHSSLSVFAHLRKSTDLKPNSSTYAFAISAASGFRDDRAGRVIHGQAVVDGCDSELLLGSNIVKMYFKFWRVEDARKVFDRMPEKDTILWNTMISGYRKNEMYVESIQVFRDLINESCTRLDTTTLLDILPAVAELQELRLGMQIHSLATKTGCYSHDYVLTGFISLYSKCGKIKMGSALFREFRKPDIVAYNAMIHGYTSNGETELSLSLFKELMLSGARLRSSTLVSLVPVSGHLMLIYAIHGYCLKSNFLSHASVSTALTTVYSKLNEIESARKLFDESPEKSLPSWNAMISGYTQNGLTEDAISLFREMQKSEFSPNPVTITCILSACAQLGALSLGKWVHDLVRSTDFESSIYVSTALIGMYAKCGSIAEARRLFDLMTKKNEVTWNTMISGYGLHGQGQEALNIFYEMLNSGITPTPVTFLCVLYACSHAGLVKEGDEIFNSMIHRYGFEPSVKHYACMVDILGRAGHLQRALQFIEAMSIEPGSSVWETLLGACRIHKDTNLARTVSEKLFELDPDNVGYHVLLSNIHSADRNYPQAATVRQTAKKRKLAKAPGYTLIEIGETPHVFTSGDQSHPQVKEIYEKLEKLEGKMREAGYQPETELALHDVEEEERELMVKVHSERLAIAFGLIATEPGTEIRIIKNLRVCLDCHTVTKLISKITERVIVVRDANRFHHFKDGVCSCGDYW

SEQ ID NO: 80652 - protein, 630 aa, Arabidopsis thaliana
  peptide (1)..(630): Ceres Seq. ID no. 12656713
MYFKFWRVEDARKVFDRMPEKDTILWNTMISGYRKNEMYVESIQVFRDLINESCTRLDTTTLLDILPAVAELQELRLGMQIHSLATKTGCYSHDYVLTGFISLYSKCGKIKMGSALFREFRKPDIVAYNAMIHGYTSNGETELSLSLFKELMLSGARLRSSTLVSLVPVSGHLMLIYAIHGYCLKSNFLSHASVSTALTTVYSKLNEIESARKLFDESPEKSLPSWNAMISGYTQNGLTEDAISLFREMQKSEFSPNPVTITCILSACAQLGALSLGKWVHDLVRSTDFESSIYVSTALIGMYAKCGSIAEARRLFDLMTKKNEVTWNTMISGYGLHGQGQEALNIFYEMLNSGITPTPVTFLCVLYACSHAGLVKEGDEIFNSMIHRYGFEPSVKHYACMVDILGRAGHLQRALQFIEAMSIEPGSSVWETLLGACRIHKDTNLARTVSEKLFELDPDNVGYHVLLSNIHSADRNYPQAATVRQTAKKRKLAKAPGYTLIEIGETPHVFTSGDQSHPQVKEIYEKLEKLEGKMREAGYQPETELALHDVEEEERELMVKVHSERLAIAFGLIATEPGTEIRIIKNLRVCLDCHTVTKLISKITERVIVVRDANRFHHFKDGVCSCGDYW

SEQ ID NO: 80653 - DNA, 1935 bp, Arabidopsis thaliana
  misc_feature (1)..(1935): Ceres Seq. ID no. 12656721
  misc_feature (1)..(1935): Ortholog of  Ceres SEQ ID NO 13594349 as cited in SEQ ID NO 58161
  misc_feature (1)..(1935): Ortholog of  Ceres SEQ ID NO 13663419 as cited in SEQ ID NO 66561
gaagtatagtttctgtaacaacaatggccaaaaccagagggtcttgttgtctcgtcaacgctctaatcgctatagcttttttggcgacagcccatttgtgtgaagctggcttgtctcagaaagaacaggacaaggtctcgaaattgcctggtcagaattttaatgttagttttgctcactactctgggtttgttgctactaatgagcaattgggaagagctctcttttactggttatttgaagccgttgaagatgctaagtctaagcctcttgttctctggctcaatggaggaccaggatgttcatctgttgcatatggtgaagcagaagagataggaccatttcacattaaggcagatgggaagactctttaccttaatcaatattcttggaaccaagctgcaaatattttgttccttgatgcacctgttggagttggttattcatactcaaacacctcgtctgatttgaagagcaatggtgataaaagaactgccgaagattcactgaaatttctgctgaaatgggttgagcggtttccggaatacaaaggaagggacttttatatagtaggggagagctatgcaggacattacattcctcagctgagtgaagccattgtaaaacataaccaaggttctgacaaaaacagtataaatctgaagggttacatggtaggaaatgggctgatggacgatttccatgacaggcttggtcttttccaatatatttggtcgttgggttttatatctgaccaaacatacagcttactgcaacttcaatgcggtttcgaatcgtttattcactcctccaaacagtgtaacaagattctggagatagcggacaaagaaataggtaacatagaccaatacagtgtcttcaccccagcttgtgttgccaatgcttcccagtcaaatatgttgctaaagaaaagacctatgactagccgcgtgagcgaacagtatgatccttgtacggagaaacacactacagtttatttcaatcttccagaggttcaaaaagccctccatgtcccaccaggacttgcaccatcaaaatgggatacttgcagtgatgtcgtgagtgaacactggaatgactctccttcctcggttctaaacatttaccacgagcttatagctgctgggcttcgtatctgggttttcagtggggacgcagatgccgttgtaccagtcacatcaacccggtacagtatcgatgcactaaaccttcgtcctttgagtgcctatggtccttggtacttagatggacaggtgggagggtggagtcagcagtatgctggtctgaactttgtgacagtgagaggtgcaggccatgaagttcctttgcacagaccgaagcaagctcttgcgctcttcaaggcttttatatctggaactccattgtccacacatgagaacagcatcagccgcgacatgtctgaactcgttagtgactcataatgagttctgatttgatgtaatgtgtgatttggattctcaatcaaaaactttccacataggccgttgaaataagaagagggaaagagaataaatcagtgttttaagtgatacgttcaatgcttcttcttcttctggttgtttgtttgtttggataaacatttgctgcttggaatctaataaaagaagtttctaccatttgtcagccatacgatccttgaataacaacaacatattcttgtgtaatgagaaagtgaagtctgatctgtgatgtataggactgggtattaatctggtaacggatataatactggggtagaaaatagaatttagactagtattgggggtctaaacgaaattatacagaagcattgggcttgacttggcccatgagacctaagcccatattttaaagaattaggggtttcttcttcctttgtctgttcaaattgaagaaacctgttttttttttttt

SEQ ID NO: 80654 - protein, 486 aa, Arabidopsis thaliana; identical to SEQ ID NO: 34843
  peptide (1)..(486): Ceres Seq. ID no. 12656722

SEQ ID NO: 80655 - protein, 479 aa, Arabidopsis thaliana; identical to SEQ ID NO: 34844
  peptide (1)..(479): Ceres Seq. ID no. 12656723

SEQ ID NO: 80656 - protein, 263 aa, Arabidopsis thaliana; identical to SEQ ID NO: 34845
  peptide (1)..(263): Ceres Seq. ID no. 12656724

SEQ ID NO: 80657 - DNA, 1383 bp, Arabidopsis thaliana
  misc_feature (1)..(1383): Ceres Seq. ID no. 12656736
  misc_feature (1)..(1383): Ortholog of  Ceres SEQ ID NO 14306569 as cited in SEQ ID NO 53008
atggaagaagacactggtatcgacgaagctaagacatacacggtggagaagagcgagaaagtggagccggagaaggacggactgagtcaattcagagacgaggaaaaatcacttggtgcggatatggaagatttacatgatgagactgtgcgagaaaccctaggcaaggatcaggttcaaggtgttcgagaaaattcctctgtggaaccaaatgttgaagatgtattagaagtgaatgagactgatagcgtcaaggaaactgttgtaagtgcgattgtgccggttgatgaagtggaagagaatcgtcaggtagaaacatctccttctctggctgcatcgtcagactcattgacagtgacgccatgtctatctttggatcctgcaactgcttcaaccgcacaagatttaccactggtttcagttccaactaaacaagagcaaagatcagattcgccggtggttaacagattgtcggttactcctgttcctaggacaccggctcgtgatggttataattggagaaaatatggacagaagcaggttaagagtcccaagggctcacggagttactacaggtgtacatacactgaatgttgtgctaaaaaaattgaatgctccaatgattcaggcaatgtggtagagattgttaacaaaggtttacatactcatgaacctccccggaagactagcttctccccgagagagattagagttacaacagctatccggcctgtttcagaggatgatacagtagtagaagagctatcaattgttcctagcggttcagatccgtctgcttctactaaagaatacatctgtgagtcgcaaacactcgttgaccggaaaagacactgtgagaacgaagctgtggaggaaccagagccaaaacgaaggcaaagttcagattctgtctccaaacctggaaagaaaaacaaattcgtagtacacgcagctggtgatgttggtatctgtggtgatggatacaggtggcgtaaatacgggcagaaaatggtgaaaggaaatcctcatccaaggaactactaccgatgcacttcagcgggatgtccagttcgtaaacacattgagacagcagtcgagaacacaaaagcagtaataatcacatacaaaggagtacacaaccacgacatgccggtgcctaagaaacgccatggtcctccaagctcaatgctcgtagctgcagccgctccaacatcaatgagaaccaggacagacgatcaggtgaacattccgacttcaagccagtgctcggtggggcgagaaagtgagaagcagagtaaagaagcattggacgttggtggagagaaagtgatggaatcagctaggactttgttgagcattggattcgaaatcaagcaatgctga

SEQ ID NO: 80658 - protein, 460 aa, Arabidopsis thaliana
  peptide (1)..(460): Ceres Seq. ID no. 12656737
MEEDTGIDEAKTYTVEKSEKVEPEKDGLSQFRDEEKSLGADMEDLHDETVRETLGKDQVQGVRENSSVEPNVEDVLEVNETDSVKETVVSAIVPVDEVEENRQVETSPSLAASSDSLTVTPCLSLDPATASTAQDLPLVSVPTKQEQRSDSPVVNRLSVTPVPRTPARDGYNWRKYGQKQVKSPKGSRSYYRCTYTECCAKKIECSNDSGNVVEIVNKGLHTHEPPRKTSFSPREIRVTTAIRPVSEDDTVVEELSIVPSGSDPSASTKEYICESQTLVDRKRHCENEAVEEPEPKRRQSSDSVSKPGKKNKFVVHAAGDVGICGDGYRWRKYGQKMVKGNPHPRNYYRCTSAGCPVRKHIETAVENTKAVIITYKGVHNHDMPVPKKRHGPPSSMLVAAAAPTSMRTRTDDQVNIPTSSQCSVGRESEKQSKEALDVGGEKVMESARTLLSIGFEIKQC

SEQ ID NO: 80659 - protein, 419 aa, Arabidopsis thaliana
  peptide (1)..(419): Ceres Seq. ID no. 12656738
MEDLHDETVRETLGKDQVQGVRENSSVEPNVEDVLEVNETDSVKETVVSAIVPVDEVEENRQVETSPSLAASSDSLTVTPCLSLDPATASTAQDLPLVSVPTKQEQRSDSPVVNRLSVTPVPRTPARDGYNWRKYGQKQVKSPKGSRSYYRCTYTECCAKKIECSNDSGNVVEIVNKGLHTHEPPRKTSFSPREIRVTTAIRPVSEDDTVVEELSIVPSGSDPSASTKEYICESQTLVDRKRHCENEAVEEPEPKRRQSSDSVSKPGKKNKFVVHAAGDVGICGDGYRWRKYGQKMVKGNPHPRNYYRCTSAGCPVRKHIETAVENTKAVIITYKGVHNHDMPVPKKRHGPPSSMLVAAAAPTSMRTRTDDQVNIPTSSQCSVGRESEKQSKEALDVGGEKVMESARTLLSIGFEIKQC

SEQ ID NO: 80660 - DNA, 1420 bp, Arabidopsis thaliana
  misc_feature (1)..(1420): Ceres Seq. ID no. 12656747
  misc_feature (1)..(1420): Ortholog of  Ceres SEQ ID NO 14303043 as cited in SEQ ID NO 67110
agcctctttccgatttcttcttcagtctctctccactggttcgtcgacttcgtagaagcaaaaaatgttcttgattcgtctctcccgccataacccatcatcttttacacttctcacgcgccgccttcacgaccaaacaatttcctcgtcacgactccgagacctttacaattttcaatcaccgccgcctttgtcgtcgtcagcctccgaaaatcctgactttaaccagaaaaacaacaataagaagaagccaaagccgcagtaccgtccaccttcttcgctggaaggtgtgaagacggttcactctgatcttccgttcgatttccggttcagttacacagagagttgctcaaatgtgaggccaattggcttgagagaaccaaagtattcaccttttggtcctgatcgattggaccgggaatggaccggtgtctgtgcgccggcggttaatccaaaggtagagtctgttgacggagtggaggatccgaagctggaagagaaaagaaggaaagtgagagagaagattcaaggggcatcactcactgaagctgaaaggaaatttctggtggagctgtgtcagaggaacaaaactaaaagacaagtcaatcttgggcgagatggtttgactcataatatgctgaatgatgtctataatcattggaaacatgctgaagcagttcgggtcaaatgtcttggagtcccaaccctcgatatgaagaacgttatattccaccttgaggacaaaacgtttggccaggtagtctctaaacactctggtacacttgtgttatatagagggcgaaactacgatcccaagaaaaggcctaagatcccattgatgttgtggaaacctcatgaaccagtgtaccctaggctgattaaaacaacaattgatggtctaagcatcgatgagaccaaagcaatgagaaagaaagggctagctgttcctgccttgacaaaacttgccaagaatggttattacggtagtcttgttccaatggtgagagatgctttcctcgtgagtgaattagtacgtattgattgcttgggactagagagaaaggattacaagaaaattggagcaaagcttagggatttggtcccttgcatcctggtgacatttgacaaggagcaggtcgtgatttggagaggtaaagactataagccacccaaagaagatgatgaatattcgtccttcattcatcgtgaatcttccatagactctgatgtcgatttaagttgtagcagaggggctcaagattctcctgacgagacaacctaggatgatttagtactcttgatcccagatgtatagttataatgtgagagtattttgtggtaatgtacttaattgtctcgctaaggagcactagatagttcgaaggaaatgctgattacatcttttctgtgttgcttctcc

SEQ ID NO: 80661 - protein, 405 aa, Arabidopsis thaliana
  peptide (1)..(405): Ceres Seq. ID no. 12656748
MFLIRLSRHNPSSFTLLTRRLHDQTISSSRLRDLYNFQSPPPLSSSASENPDFNQKNNNKKKPKPQYRPPSSLEGVKTVHSDLPFDFRFSYTESCSNVRPIGLREPKYSPFGPDRLDREWTGVCAPAVNPKVESVDGVEDPKLEEKRRKVREKIQGASLTEAERKFLVELCQRNKTKRQVNLGRDGLTHNMLNDVYNHWKHAEAVRVKCLGVPTLDMKNVIFHLEDKTFGQVVSKHSGTLVLYRGRNYDPKKRPKIPLMLWKPHEPVYPRLIKTTIDGLSIDETKAMRKKGLAVPALTKLAKNGYYGSLVPMVRDAFLVSELVRIDCLGLERKDYKKIGAKLRDLVPCILVTFDKEQVVIWRGKDYKPPKEDDEYSSFIHRESSIDSDVDLSCSRGAQDSPDETT

SEQ ID NO: 80662 - protein, 215 aa, Arabidopsis thaliana
  peptide (1)..(215): Ceres Seq. ID no. 12656749
MLNDVYNHWKHAEAVRVKCLGVPTLDMKNVIFHLEDKTFGQVVSKHSGTLVLYRGRNYDPKKRPKIPLMLWKPHEPVYPRLIKTTIDGLSIDETKAMRKKGLAVPALTKLAKNGYYGSLVPMVRDAFLVSELVRIDCLGLERKDYKKIGAKLRDLVPCILVTFDKEQVVIWRGKDYKPPKEDDEYSSFIHRESSIDSDVDLSCSRGAQDSPDETT

SEQ ID NO: 80663 - DNA, 1038 bp, Arabidopsis thaliana
  misc_feature (1)..(1038): Ceres Seq. ID no. 12656750
  misc_feature (1)..(1038): Ortholog of  Ceres SEQ ID NO 12637732 as cited in SEQ ID NO 0
agtacagagttatggagttgctgaatggagtagaaactctagtttcgggaattcatcatcaccatcgtactaacgcgaagagaaacagattagttagatctgtcaagatcttaaactccgggaatcatgaaatccccagaaagtgcctgtgttttgatctttacgacaaattggttccatacaagaaagcttggtcatggcagaagagcattgtcgaggagaaaaagacattgattgatagaaaccaagactgcgctgatacagtgattttgttacaacactctcctgtttacacaatgggaactgctagtacagaggattatctcaatttcgatataaaggatgctcctttcaatgtttatcgaactgaacgtggtggcgaagtcacttaccatggccctggtcagctagttatgtatcctataatcaatcttcgaaatcacgagatggatcttcattggtacctcaggatgcttgaagagattgtcatccgtgtgctttcctcaactttctccattaaagcttctcgtcttgacggtttaactggagtttgggttggcaaccaaaaagtggcggcgataggtattcgtgtgtcgaaatggataacatatcatggtttagctcttaatgtcactacagatctaacaccattcaactggatagttccatgtgggattagagaccggaaagttggaaacataaagggcttgcttgaagatggagaacacggaatggttgatgatttgaggttgatcgatatagttcacgagtctttactaaaggaattctctgaagctttccagcttcagatcgaaaagcaaacagtttcagatcctaatattctgtaagctgagtcttttaaacgattggagtgctaaaaggaaggtggtattggtagaacaaaatccttgcaatctctatagcattcttgttaagttttgaacataatgatcttatctacatagaaggttttattggatgttttgtgacattgtctgcttcttgttgatgtttatatgagattggtctatttacttc

SEQ ID NO: 80664 - protein, 281 aa, Arabidopsis thaliana
  peptide (1)..(281): Ceres Seq. ID no. 12656751
YRVMELLNGVETLVSGIHHHHRTNAKRNRLVRSVKILNSGNHEIPRKCLCFDLYDKLVPYKKAWSWQKSIVEEKKTLIDRNQDCADTVILLQHSPVYTMGTASTEDYLNFDIKDAPFNVYRTERGGEVTYHGPGQLVMYPIINLRNHEMDLHWYLRMLEEIVIRVLSSTFSIKASRLDGLTGVWVGNQKVAAIGIRVSKWITYHGLALNVTTDLTPFNWIVPCGIRDRKVGNIKGLLEDGEHGMVDDLRLIDIVHESLLKEFSEAFQLQIEKQTVSDPNIL

SEQ ID NO: 80665 - protein, 278 aa, Arabidopsis thaliana
  peptide (1)..(278): Ceres Seq. ID no. 12656752
MELLNGVETLVSGIHHHHRTNAKRNRLVRSVKILNSGNHEIPRKCLCFDLYDKLVPYKKAWSWQKSIVEEKKTLIDRNQDCADTVILLQHSPVYTMGTASTEDYLNFDIKDAPFNVYRTERGGEVTYHGPGQLVMYPIINLRNHEMDLHWYLRMLEEIVIRVLSSTFSIKASRLDGLTGVWVGNQKVAAIGIRVSKWITYHGLALNVTTDLTPFNWIVPCGIRDRKVGNIKGLLEDGEHGMVDDLRLIDIVHESLLKEFSEAFQLQIEKQTVSDPNIL

SEQ ID NO: 80666 - protein, 183 aa, Arabidopsis thaliana
  peptide (1)..(183): Ceres Seq. ID no. 12656753
MGTASTEDYLNFDIKDAPFNVYRTERGGEVTYHGPGQLVMYPIINLRNHEMDLHWYLRMLEEIVIRVLSSTFSIKASRLDGLTGVWVGNQKVAAIGIRVSKWITYHGLALNVTTDLTPFNWIVPCGIRDRKVGNIKGLLEDGEHGMVDDLRLIDIVHESLLKEFSEAFQLQIEKQTVSDPNIL

SEQ ID NO: 80667 - DNA, 1740 bp, Arabidopsis thaliana
  misc_feature (1)..(1740): Ceres Seq. ID no. 12656760
  misc_feature (1)..(1740): Ortholog of  Ceres SEQ ID NO 14311131 as cited in SEQ ID NO 53729
  misc_feature (1)..(1740): Ortholog of  Ceres SEQ ID NO 13594037 as cited in SEQ ID NO 55666
  misc_feature (1)..(1740): Ortholog of  Ceres SEQ ID NO 13657707 as cited in SEQ ID NO 66407
atggaatctccaatattcattctcatcacactatcattctttcttcaatcagttcttgcttcttctcaaactctatcaaactcttcaacaatctgcaaaacgacgccggatccaaagtattgcaaatccgtttttccacatagccaaggcaatgttcaacaatacggctgtttctctatccgcaaatcgctatcgcaatcgcgaaaatttattcgcaccgtcgatagatatatcaaacgcaacgctcatttatctcaacctgccgttatcagagctctccaagattgccgttttctcgccggtctaacaatggattacctcttaacgtcgttcgaaaccgttaacgacacgtcagcaaaaacctctttcaaaccgctgtcgtttcccaaagccgacgacatccaaacgcttctttccgcggcgctgactaatgagcagacgtgtcttgaaggacttaccacggccgcttcttattccgccacgtggactgtaagaaccggcgtcgctttgcctctcgtcaatgacacgaagctcttgggcgtctcactcgctctcttcaccaaaggttgggttccaaagaagaagaaacgggccgggtttgcttgggcccaaccgagatccggttcatcgacccacactaaaccattccgtctgttccgtaacggagctctaccgttaaagatgacagagaaaacaaaagcggtttacgagtcactcagcagaagaaaactcgccgacggtgacagtaacggtgatggagacgacggaagcatggttctgataagcgatatcgttaccgtgagccaagacggaacaggaaatttcaccaacatcacggcagctgtagcggcggcgccgaacaacaccgacggaagcgccggtttctttttgatctatgtgacggcgggaatctacgaagagtatatctcaatcgcgaagaacaaaaggtacatgatgatgataggtgacgggattaatcagacggtggtcaccggaaatagaagcgtcgtcgacggttggactactttcaattccgccacatttgctgtgacagcaccgaactttgttgcggtgaacataacgttccggaacacggccggaccggagaagcaccaggctgttgcgttacggagcggcgcagatttctcaatcttctatagttgtagtttcgaggcttatcaagatacactctacacacattctctaagacagttttatagagaatgcgatgtctatggaacggtcgattttatatttggaaacgcggcagttgtgtttcaaaactgtaatttatacccgaggaaaccgatgccaaatcagttcaatgctatcaccgcccaaggccggtctgatccgaaccagaacactggtacatcaatccaaaactgtacgattaagccggcggatgatcttgtttcgagtaactatacagttaaaacgtatttgggtcgaccgtggaaagagtattcaaggacggtttacatgcaatcgtacattgatggtttcgttgaaccggttggttggagagaatggaacggtgattttgcgttaagtacattgtactatgcagagtataacaataccggaccgggctcaaacactacaaaccgggttacatggcctggttaccacgtgattaattccactgatgcagctaatttcacggtcactggtttatttatcgaagctgattggatttggaagacaggagtgccttacaccagcggtctaatttcatag

SEQ ID NO: 80668 - protein, 579 aa, Arabidopsis thaliana
  peptide (1)..(579): Ceres Seq. ID no. 12656761
MESPIFILITLSFFLQSVLASSQTLSNSSTICKTTPDPKYCKSVFPHSQGNVQQYGCFSIRKSLSQSRKFIRTVDRYIKRNAHLSQPAVIRALQDCRFLAGLTMDYLLTSFETVNDTSAKTSFKPLSFPKADDIQTLLSAALTNEQTCLEGLTTAASYSATWTVRTGVALPLVNDTKLLGVSLALFTKGWVPKKKKRAGFAWAQPRSGSSTHTKPFRLFRNGALPLKMTEKTKAVYESLSRRKLADGDSNGDGDDGSMVLISDIVTVSQDGTGNFTNITAAVAAAPNNTDGSAGFFLIYVTAGIYEEYISIAKNKRYMMMIGDGINQTVVTGNRSVVDGWTTFNSATFAVTAPNFVAVNITFRNTAGPEKHQAVALRSGADFSIFYSCSFEAYQDTLYTHSLRQFYRECDVYGTVDFIFGNAAVVFQNCNLYPRKPMPNQFNAITAQGRSDPNQNTGTSIQNCTIKPADDLVSSNYTVKTYLGRPWKEYSRTVYMQSYIDGFVEPVGWREWNGDFALSTLYYAEYNNTGPGSNTTNRVTWPGYHVINSTDAANFTVTGLFIEADWIWKTGVPYTSGLIS

SEQ ID NO: 80669 - protein, 476 aa, Arabidopsis thaliana
  peptide (1)..(476): Ceres Seq. ID no. 12656762
MDYLLTSFETVNDTSAKTSFKPLSFPKADDIQTLLSAALTNEQTCLEGLTTAASYSATWTVRTGVALPLVNDTKLLGVSLALFTKGWVPKKKKRAGFAWAQPRSGSSTHTKPFRLFRNGALPLKMTEKTKAVYESLSRRKLADGDSNGDGDDGSMVLISDIVTVSQDGTGNFTNITAAVAAAPNNTDGSAGFFLIYVTAGIYEEYISIAKNKRYMMMIGDGINQTVVTGNRSVVDGWTTFNSATFAVTAPNFVAVNITFRNTAGPEKHQAVALRSGADFSIFYSCSFEAYQDTLYTHSLRQFYRECDVYGTVDFIFGNAAVVFQNCNLYPRKPMPNQFNAITAQGRSDPNQNTGTSIQNCTIKPADDLVSSNYTVKTYLGRPWKEYSRTVYMQSYIDGFVEPVGWREWNGDFALSTLYYAEYNNTGPGSNTTNRVTWPGYHVINSTDAANFTVTGLFIEADWIWKTGVPYTSGLIS

SEQ ID NO: 80670 - protein, 352 aa, Arabidopsis thaliana
  peptide (1)..(352): Ceres Seq. ID no. 12656763
MTEKTKAVYESLSRRKLADGDSNGDGDDGSMVLISDIVTVSQDGTGNFTNITAAVAAAPNNTDGSAGFFLIYVTAGIYEEYISIAKNKRYMMMIGDGINQTVVTGNRSVVDGWTTFNSATFAVTAPNFVAVNITFRNTAGPEKHQAVALRSGADFSIFYSCSFEAYQDTLYTHSLRQFYRECDVYGTVDFIFGNAAVVFQNCNLYPRKPMPNQFNAITAQGRSDPNQNTGTSIQNCTIKPADDLVSSNYTVKTYLGRPWKEYSRTVYMQSYIDGFVEPVGWREWNGDFALSTLYYAEYNNTGPGSNTTNRVTWPGYHVINSTDAANFTVTGLFIEADWIWKTGVPYTSGLIS

SEQ ID NO: 80671 - DNA, 917 bp, Arabidopsis thaliana
  misc_feature (1)..(917): Ceres Seq. ID no. 12656791
  misc_feature (1)..(917): Ortholog of  Ceres SEQ ID NO 15171329 as cited in SEQ ID NO 51748
gccaaaaactcttcttctacccaaaaaaaaaacaaaagatatgaacactaagctatcactttctcagaccaaaatcttcactttcacaacttggttcaacgatactcgaagtggcttagatagacgctcaagcatttccccgactctctgttcaaagcccgtctactccggaaaactcaaggctgcaaaagagacagcaagaatcgagacatcgaatacgaagaatgcgagtattgaggacagcttcttctcgaaaattgcaattaattatctatcaaagaatcttcaagacgcagctgggattagtagtagcagtaagagtaccgattatgataggttagtggatacggcaactagggtttcgcgtaactttgacaccaagcaacaacatgagtttgttcttagctctttggacagagcattaccgacagtaataagctccttgatcaaaatggcatttccaccttcaaaagtctcgagggagctcttcgctctattcacgacaatatctttcgcttggcttgttggaccttcagaggtgagggagactgaggttaatggaagaaaagagaagagtgttgtgtacatagagaagtgcaggtttcttgaacagtcaaattgtgttggcatgtgcactcatatttgtaaaattccatcccaaatcttcatcaaaaactcactgggaatgcctatctacatggagcccgattttaatgatcttagctgtaaaatgatgtttggtcgggagcctccagagatcgaagatgatcctgctatgaaacaaccatgctttgaattctgcaaatcaaacaaaagctacggtgtgaagcattagaactagtactagagcgattagataaattgtgatatcaaaacatatttaagtttttcttttaaagtcataccagagattacaa

SEQ ID NO: 80672 - protein, 277 aa, Arabidopsis thaliana
  peptide (1)..(277): Ceres Seq. ID no. 12656792
PKTLLLPKKKTKDMNTKLSLSQTKIFTFTTWFNDTRSGLDRRSSISPTLCSKPVYSGKLKAAKETARIETSNTKNASIEDSFFSKIAINYLSKNLQDAAGISSSSKSTDYDRLVDTATRVSRNFDTKQQHEFVLSSLDRALPTVISSLIKMAFPPSKVSRELFALFTTISFAWLVGPSEVRETEVNGRKEKSVVYIEKCRFLEQSNCVGMCTHICKIPSQIFIKNSLGMPIYMEPDFNDLSCKMMFGREPPEIEDDPAMKQPCFEFCKSNKSYGVKH

SEQ ID NO: 80673 - protein, 264 aa, Arabidopsis thaliana
  peptide (1)..(264): Ceres Seq. ID no. 12656793
MNTKLSLSQTKIFTFTTWFNDTRSGLDRRSSISPTLCSKPVYSGKLKAAKETARIETSNTKNASIEDSFFSKIAINYLSKNLQDAAGISSSSKSTDYDRLVDTATRVSRNFDTKQQHEFVLSSLDRALPTVISSLIKMAFPPSKVSRELFALFTTISFAWLVGPSEVRETEVNGRKEKSVVYIEKCRFLEQSNCVGMCTHICKIPSQIFIKNSLGMPIYMEPDFNDLSCKMMFGREPPEIEDDPAMKQPCFEFCKSNKSYGVKH

SEQ ID NO: 80674 - DNA, 744 bp, Arabidopsis thaliana
  misc_feature (1)..(744): Ceres Seq. ID no. 12656794
  misc_feature (1)..(744): Ortholog of  Ceres SEQ ID NO 14304124 as cited in SEQ ID NO 56378
  misc_feature (1)..(744): Ortholog of  Ceres SEQ ID NO 12585331 as cited in SEQ ID NO 62912
  misc_feature (1)..(744): Ortholog of  Ceres SEQ ID NO 13654964 as cited in SEQ ID NO 63176
atgtataagtggaatcttccttaccgaaaagatgacgtggagaccggccgtgaaggcggtgagagatctctgtatccgactatgcttgagagccccgaactccgatggggtttcatcagaaaggtatattccataatcgcattccagcttttagcaaccatcgccgtcgcctccacggtggtttttgtccgtccgatcgccgtgttcttcgccactactagtgccggtctcgctctctggattgtcttaatcatcacgcctcttatagtaatgtgtcctttgtactattaccaccagaaacatccagtgaattatttgcttctagggattttcacggtagctttggctttcgccgtcggattaacatgtgctttcaccagcgggaaagtgattcttgaggcagcgattttgacaacagtagtggtgctttccttaaccgtctacaccttttgggcagcaaagaaaggatatgactttaacttcctcggtccattcttgtttggtgctctcatcgttctcatggtctttgcccttattcagattttcttcccgttgggacggatctcagtgatgatctatggatgtttggctgcgataatattctgcgggtacatagtttacgatacagacaatctcatcaaacgttacagctacgatgagtatatttgggcagcagtttcgctctacttagatattatcaacctcttcttggctctccttaccattttcagagctgccgagtga

SEQ ID NO: 80675 - protein, 247 aa, Arabidopsis thaliana
  peptide (1)..(247): Ceres Seq. ID no. 12656795
MYKWNLPYRKDDVETGREGGERSLYPTMLESPELRWGFIRKVYSIIAFQLLATIAVASTVVFVRPIAVFFATTSAGLALWIVLIITPLIVMCPLYYYHQKHPVNYLLLGIFTVALAFAVGLTCAFTSGKVILEAAILTTVVVLSLTVYTFWAAKKGYDFNFLGPFLFGALIVLMVFALIQIFFPLGRISVMIYGCLAAIIFCGYIVYDTDNLIKRYSYDEYIWAAVSLYLDIINLFLALLTIFRAAE

SEQ ID NO: 80676 - protein, 220 aa, Arabidopsis thaliana
  peptide (1)..(220): Ceres Seq. ID no. 12656796
MLESPELRWGFIRKVYSIIAFQLLATIAVASTVVFVRPIAVFFATTSAGLALWIVLIITPLIVMCPLYYYHQKHPVNYLLLGIFTVALAFAVGLTCAFTSGKVILEAAILTTVVVLSLTVYTFWAAKKGYDFNFLGPFLFGALIVLMVFALIQIFFPLGRISVMIYGCLAAIIFCGYIVYDTDNLIKRYSYDEYIWAAVSLYLDIINLFLALLTIFRAAE

SEQ ID NO: 80677 - protein, 157 aa, Arabidopsis thaliana
  peptide (1)..(157): Ceres Seq. ID no. 12656797
MCPLYYYHQKHPVNYLLLGIFTVALAFAVGLTCAFTSGKVILEAAILTTVVVLSLTVYTFWAAKKGYDFNFLGPFLFGALIVLMVFALIQIFFPLGRISVMIYGCLAAIIFCGYIVYDTDNLIKRYSYDEYIWAAVSLYLDIINLFLALLTIFRAAE

SEQ ID NO: 80678 - DNA, 810 bp, Arabidopsis thaliana
  misc_feature (1)..(810): Ceres Seq. ID no. 12656813
  misc_feature (1)..(810): Ortholog of  Ceres SEQ ID NO 13639476 as cited in SEQ ID NO 58353
atgtcctttactccgtccacttttcgaatcgctatctcgttgctccttcttgttgctatcgtctccgccgtcatttttctcccgaaattgaaggacttcttgttatggattaaggaagatcttggaccttttggtccacttgcattggctttggcttatattcctctcacaattgtggcggttcctgcttctgtactcacgctaggtggtggttacctttttggcctgccagtaggatttgtagccgactctcttggagctacattaggtgcaacagcggcatttctgcttggtagaacgattggtaaatcttatgtcacttcaaaaataaagcattacccaaagtttcaagctgtttccgttgcaattcaaaaatctggcttcaagatagtcttgctgctacgcgttgtccccatactgcccttcaatatgttgaattacctcctatctgtaactcctgttcgcttaggggaatacatgctggccacttggttgggaatgatgcagcccattacatttgcgctagtatatgttggaactactctgaaagatctttctgatattacacatggatggcatgaggtgtcagtatttcgttgggtaattatgatggttggcgtagctctagctgtaattctgataatatgcataacaagagtggcgaaatcatccttggacaaagcattggctgagaatggtactgaattagatgggaagaagaatgacgacgcttccgtactcccgatcgcagagccaccaccggatctacaagagcctctcgttatcagaatcgacccatccaatacttga

SEQ ID NO: 80679 - protein, 269 aa, Arabidopsis thaliana
  peptide (1)..(269): Ceres Seq. ID no. 12656814
MSFTPSTFRIAISLLLLVAIVSAVIFLPKLKDFLLWIKEDLGPFGPLALALAYIPLTIVAVPASVLTLGGGYLFGLPVGFVADSLGATLGATAAFLLGRTIGKSYVTSKIKHYPKFQAVSVAIQKSGFKIVLLLRVVPILPFNMLNYLLSVTPVRLGEYMLATWLGMMQPITFALVYVGTTLKDLSDITHGWHEVSVFRWVIMMVGVALAVILIICITRVAKSSLDKALAENGTELDGKKNDDASVLPIAEPPPDLQEPLVIRIDPSNT

SEQ ID NO: 80680 - DNA, 1386 bp, Arabidopsis thaliana
  misc_feature (1)..(1386): Ceres Seq. ID no. 12656826
  misc_feature (1)..(1386): Ortholog of  Ceres SEQ ID NO 15174752 as cited in SEQ ID NO 53279
  misc_feature (1)..(1386): Ortholog of  Ceres SEQ ID NO 15177652 as cited in SEQ ID NO 56858
  misc_feature (1)..(1386): Ortholog of  Ceres SEQ ID NO 15226087 as cited in SEQ ID NO 58655
  misc_feature (1)..(1386): Ortholog of  Ceres SEQ ID NO 13662197 as cited in SEQ ID NO 63622
  misc_feature (1)..(1386): Ortholog of  Ceres SEQ ID NO 13597162 as cited in SEQ ID NO 63955
  misc_feature (1)..(1386): Ortholog of  Ceres SEQ ID NO 14313292 as cited in SEQ ID NO 67393
  misc_feature (1)..(1386): Ortholog of  Ceres SEQ ID NO 14313567 as cited in SEQ ID NO 68074
atggcttcttgcatccaagaacttcatttcactcacctccatatcccagtcaccatcaaccagcaatttcttgtacatccatcaagtccaacacctgcaaatcaatctcctcaccatagtctctatctatcaaacctagatgatataatcggagcacgagttttcactccctccgtttatttctatccatcaaccaataatcgagaatcttttgtactgaaacggcttcaagatgctcttagtgaggttttagttccgtattatccactctctggtaggttaagagaagtggaaaatgggaaactggaagttttctttggagaagagcaaggtgtgttaatggtgtcggcaaattcatcaatggatttagctgatcttggagatcttacagttccaaatccagcttggttaccattaatctttcgaaacccaggagaagaagcttacaagatcctcgaaatgccgttacttatagctcaagtaacgtttttcacctgtggtggatttagcctcgggattagactttgccattgcatttgtgatggttttggagctatgcagtttctcggctcgtgggcagctacagcgaaaaccggaaaattgattgcagatcctgagccggtttgggatagagagactttcaaaccaagaaaccctccaatggtgaaatacccacatcatgagtatcttccaattgaagaaagatcgaatttgacgaactccttgtgggatacaaagccattgcagaaatgttacaggataagcaaagagtttcagtgtcgtgttaaaagcattgctcaaggagaagatccaaccttagtttgtagcacgtttgatgcaatggctgcacacatatggagatcatgggtcaaagcacttgatgtgaagccactggattacaatctcaggctcacgttttcagtcaacgtaagaacaagactagaaaccctaaagttaagaaaaggtttttacggcaatgtggtgtgtttggcttgcgcaatgagcagtgtcgagagtcttattaacgattctctttctaagacaacacgtttggttcaggatgcgagacttagggtttcagaggattacttgcgttctatggtggattacgttgatgtaaagaggccaaagaggttagagtttggtgggaagctaacgataacgcaatggacccggtttgaaatgtatgagactgcggattttggatggggtaaaccggtttatgcagggccaattgacttgaggcctacgccacaggtttgcgtgttgttgccacaaggaggagttgagtctggcaatgaccaaagcatggtggtttgcctttgcttgcctcctactgctgttcatacctttactcggcttctatctttaaatgatcataaataa

SEQ ID NO: 80681 - protein, 461 aa, Arabidopsis thaliana
  peptide (1)..(461): Ceres Seq. ID no. 12656827
MASCIQELHFTHLHIPVTINQQFLVHPSSPTPANQSPHHSLYLSNLDDIIGARVFTPSVYFYPSTNNRESFVLKRLQDALSEVLVPYYPLSGRLREVENGKLEVFFGEEQGVLMVSANSSMDLADLGDLTVPNPAWLPLIFRNPGEEAYKILEMPLLIAQVTFFTCGGFSLGIRLCHCICDGFGAMQFLGSWAATAKTGKLIADPEPVWDRETFKPRNPPMVKYPHHEYLPIEERSNLTNSLWDTKPLQKCYRISKEFQCRVKSIAQGEDPTLVCSTFDAMAAHIWRSWVKALDVKPLDYNLRLTFSVNVRTRLETLKLRKGFYGNVVCLACAMSSVESLINDSLSKTTRLVQDARLRVSEDYLRSMVDYVDVKRPKRLEFGGKLTITQWTRFEMYETADFGWGKPVYAGPIDLRPTPQVCVLLPQGGVESGNDQSMVVCLCLPPTAVHTFTRLLSLNDHK

SEQ ID NO: 80682 - protein, 348 aa, Arabidopsis thaliana
  peptide (1)..(348): Ceres Seq. ID no. 12656828
MVSANSSMDLADLGDLTVPNPAWLPLIFRNPGEEAYKILEMPLLIAQVTFFTCGGFSLGIRLCHCICDGFGAMQFLGSWAATAKTGKLIADPEPVWDRETFKPRNPPMVKYPHHEYLPIEERSNLTNSLWDTKPLQKCYRISKEFQCRVKSIAQGEDPTLVCSTFDAMAAHIWRSWVKALDVKPLDYNLRLTFSVNVRTRLETLKLRKGFYGNVVCLACAMSSVESLINDSLSKTTRLVQDARLRVSEDYLRSMVDYVDVKRPKRLEFGGKLTITQWTRFEMYETADFGWGKPVYAGPIDLRPTPQVCVLLPQGGVESGNDQSMVVCLCLPPTAVHTFTRLLSLNDHK

SEQ ID NO: 80683 - protein, 341 aa, Arabidopsis thaliana
  peptide (1)..(341): Ceres Seq. ID no. 12656829
MDLADLGDLTVPNPAWLPLIFRNPGEEAYKILEMPLLIAQVTFFTCGGFSLGIRLCHCICDGFGAMQFLGSWAATAKTGKLIADPEPVWDRETFKPRNPPMVKYPHHEYLPIEERSNLTNSLWDTKPLQKCYRISKEFQCRVKSIAQGEDPTLVCSTFDAMAAHIWRSWVKALDVKPLDYNLRLTFSVNVRTRLETLKLRKGFYGNVVCLACAMSSVESLINDSLSKTTRLVQDARLRVSEDYLRSMVDYVDVKRPKRLEFGGKLTITQWTRFEMYETADFGWGKPVYAGPIDLRPTPQVCVLLPQGGVESGNDQSMVVCLCLPPTAVHTFTRLLSLNDHK

SEQ ID NO: 80684 - DNA, 1210 bp, Arabidopsis thaliana
  misc_feature (1)..(1210): Ceres Seq. ID no. 12656830
  misc_feature (1)..(1210): Ortholog of  Ceres SEQ ID NO 12636774 as cited in SEQ ID NO 372
  misc_feature (1)..(1210): Ortholog of  Ceres SEQ ID NO 12578315 as cited in SEQ ID NO 62451
  misc_feature (1)..(1210): Ortholog of  Ceres SEQ ID NO 12617090 as cited in SEQ ID NO 64005
  misc_feature (1)..(1210): Ortholog of  Ceres SEQ ID NO 13597233 as cited in SEQ ID NO 64370
  misc_feature (1)..(1210): Ortholog of  Ceres SEQ ID NO 13584577 as cited in SEQ ID NO 65298
aagaagcaatggagtcaactgatcgttcaagtcaagcaaaagctttcgacgaggccaaaatcggtgtgaaagggcttgtggattcaggaatcacagagattccggccctgttccgtgcaacgccggctactcttgcaagcctgaagtcgccaccacctccaaagcatctcaccatccctaccgttgatctcaaaggagcaagcgtggtggagaagatcggagaagctgctgagaaatggggattattccatttggtgaatcacggcatcccggtggaggttctggagaggatgattcaagggattcgcgggtttcacgagcaagaacctgaagccaagaaacgcttctactctagggatcacactagagacgtgctttactttagcaatcatgatctccaaaactccgaggccgccagttggagagacactctcggttgttataccgcacccgagcctcccagattagaggatttgcccgcggtttgcggggagattatgctggagtactcaaaggaaataatgagtttaggtgaaaggctatttgagcttctatcagaggctttggggttgaactctcatcatctcaaggacatggactgtgccaagtctcaatatatggttggccaacactacccaccttgccctcagcctgaccttactataggcataaacaagcacaccgatatttcctttctcaccgttcttcttcaagacaatgttggagggcttcaagttttccatgaacagtattggattgatgttactcctgtccctggggctctagtcattaacattggagattttcttcagcttataaccaatgataagttcataagcgcggagcatagggtgatagccaatggatcttctgaaccgcggacttccgtggcaattgttttcagcacgttcatgagggcgtattctcgagtatatgggccaatcaaagatctcctgtctgcagaaaaccctgctaagtatagagactgcaccctcaccgaattttcaaccatcttcagctcaaaaacgctcgatgctcctaagttacaccatttcaaaatctaagacatttgggtttagaccttttttgtctactaatctatcaaactctctcggtacacaatgaaaactggtacttcatatgtaagccatgatataatacgatagtgtacatttcgaagcttattggcctcgcattcatcctcatccac

SEQ ID NO: 80685 - protein, 353 aa, Arabidopsis thaliana
  peptide (1)..(353): Ceres Seq. ID no. 12656831
EAMESTDRSSQAKAFDEAKIGVKGLVDSGITEIPALFRATPATLASLKSPPPPKHLTIPTVDLKGASVVEKIGEAAEKWGLFHLVNHGIPVEVLERMIQGIRGFHEQEPEAKKRFYSRDHTRDVLYFSNHDLQNSEAASWRDTLGCYTAPEPPRLEDLPAVCGEIMLEYSKEIMSLGERLFELLSEALGLNSHHLKDMDCAKSQYMVGQHYPPCPQPDLTIGINKHTDISFLTVLLQDNVGGLQVFHEQYWIDVTPVPGALVINIGDFLQLITNDKFISAEHRVIANGSSEPRTSVAIVFSTFMRAYSRVYGPIKDLLSAENPAKYRDCTLTEFSTIFSSKTLDAPKLHHFKI

SEQ ID NO: 80686 - protein, 351 aa, Arabidopsis thaliana
  peptide (1)..(351): Ceres Seq. ID no. 12656832
MESTDRSSQAKAFDEAKIGVKGLVDSGITEIPALFRATPATLASLKSPPPPKHLTIPTVDLKGASVVEKIGEAAEKWGLFHLVNHGIPVEVLERMIQGIRGFHEQEPEAKKRFYSRDHTRDVLYFSNHDLQNSEAASWRDTLGCYTAPEPPRLEDLPAVCGEIMLEYSKEIMSLGERLFELLSEALGLNSHHLKDMDCAKSQYMVGQHYPPCPQPDLTIGINKHTDISFLTVLLQDNVGGLQVFHEQYWIDVTPVPGALVINIGDFLQLITNDKFISAEHRVIANGSSEPRTSVAIVFSTFMRAYSRVYGPIKDLLSAENPAKYRDCTLTEFSTIFSSKTLDAPKLHHFKI

SEQ ID NO: 80687 - protein, 257 aa, Arabidopsis thaliana
  peptide (1)..(257): Ceres Seq. ID no. 12656833
MIQGIRGFHEQEPEAKKRFYSRDHTRDVLYFSNHDLQNSEAASWRDTLGCYTAPEPPRLEDLPAVCGEIMLEYSKEIMSLGERLFELLSEALGLNSHHLKDMDCAKSQYMVGQHYPPCPQPDLTIGINKHTDISFLTVLLQDNVGGLQVFHEQYWIDVTPVPGALVINIGDFLQLITNDKFISAEHRVIANGSSEPRTSVAIVFSTFMRAYSRVYGPIKDLLSAENPAKYRDCTLTEFSTIFSSKTLDAPKLHHFKI

SEQ ID NO: 80688 - DNA, 2394 bp, Arabidopsis thaliana
  misc_feature (1)..(2394): Ceres Seq. ID no. 12656841
  misc_feature (1)..(2394): Ortholog of  Ceres SEQ ID NO 13596392 as cited in SEQ ID NO 62136
  misc_feature (1)..(2394): Ortholog of  Ceres SEQ ID NO 13654360 as cited in SEQ ID NO 67980
  misc_feature (1)..(2394): Ortholog of  Ceres SEQ ID NO 13596394 as cited in SEQ ID NO 68561
atgccattcaagaaatttcgtcggagtctaaacttcattatttgcttaccaaaactaaaagagtgcgctcgtggacaaattttaggctataaaatggagacgaaggcgattggatttcaccacctttctccaccacaaaatattgtgttatggctcctgatcaatcttatcaatatccatctccttcgtatgaatcgatacagaccttttacgatacctgatgaggattggccgggtcctagatgcggccatactctcacggcggttttcgtcaacaattcccatcagcttatcctcttcggcggcagtactactgccgtcgccaaccataactcctccttacccgagatcagtttagatggcgtcaccaattcggtccattcttttgatgttttgaccaggaagtggacaaggcttaatccgattggtgacgttccgtctcccagggcttgtcatgctgccgctttatatggcaccttgatccttattcagggtgggattggtccatccggaccttctgatggagatgtctacatgcttgacatgactaataacaagtggattaagtttctggttggaggggagactccaagccctcgctatggccatgttatggatatagctgctcagaggtggcttgtcatattcagcgggaataatggtatgcttcaggtagttctcgagaagatgacactgggagatacttacgggctgaaaatggatagcgataatgtttggactcctgttccagctgtagctccttccccgagatatcaacatactgcggttttcggaggttcaaaactgcatgtcattgggggtatactgaatagggctcgcctaatcgatggtgaagcagttgttgctgtgcttgatactgagactggtgaatgggtagataccaatcaaccagagacctctgcgagcggcgccaatagacaaaatcaatatcaacttatgcgacgttgtcaccatgctgctgcatcgtttggcagccacctatatgtgcatggcgggattagagaagatgtattgctcgacgatttgctagttgctgaaacatcccagtcttcaagtcctgaaccagaagaagataatcctgataattatatgttgctcgacgactatctaatggatgaacctaagcctttaagttctgaaccagaagcttcatcctttataatgaggagcacaagtgaaattgcgatggatagattggcagaggcacataacttaccaactatcgaaaatgctttttatgatagtgctattgaaggatacgttccacttcaacatggagctgagacggttggaaatcgaggtggcttggtgagaactgcaagcttggatcaatctactcaagacttgcataagaaggtcatttcgacactgttgagacctaaaacctggacgcctcctgccaacagagattttttcttgagttatttagaagttaagcatttgtgcgatgaggtagagaaaatatttatgaatgaaccaacacttcttcagctcaaagttccaatcaaagtcttcggcgatatccatggacaatacggggatttgatgcgtttatttcatgaatatggacatccttcagtggaaggagatatcacccatatagactatttgtttttgggagattatgttgaccgtggacaacacagcttggagatcatcatgttgctgtttgctttgaagatagaatatccgaagaacatccacttgattcgtggaaatcatgagtctcttgcaatgaatagaatttatggttttcttacagaatgcgaagaaagaatgggcgagtcctatgggttcgaagcatggttaaagattaatcaagtttttgattatcttccgcttgctgcacttctagaaaagaaagttttgtgtgtccatggcggaattgggagggcagttacgatcgaagaaattgaaaatatcgaaaggccggcattcccggatactggatcaatggtcttgaaagacatcttatggtcagatcctacgatgaatgacactgttttgggtatagtagacaatgccagaggagaaggtgttgtctcatttgggcctgatatagtcaaggcatttctagaaaggaatggtctggagatgatactaagagcacacgagtgtgttattgacggctttgaaagattcgctgacggacggcttataacagtcttttctgctacaaattactgtggaactgcacaaaatgcgggagcaatattggtaattggtagagatatggtaatttatcctaagctgattcatcctcaccctcctcccatctcatcttcagaagaagactatacagacaaagcatggatgcaggagctgaacatcgagatgccgcctactccagctcgaggggagtcaagtgaataa

SEQ ID NO: 80689 - protein, 797 aa, Arabidopsis thaliana
  peptide (1)..(797): Ceres Seq. ID no. 12656842
MPFKKFRRSLNFIICLPKLKECARGQILGYKMETKAIGFHHLSPPQNIVLWLLINLINIHLLRMNRYRPFTIPDEDWPGPRCGHTLTAVFVNNSHQLILFGGSTTAVANHNSSLPEISLDGVTNSVHSFDVLTRKWTRLNPIGDVPSPRACHAAALYGTLILIQGGIGPSGPSDGDVYMLDMTNNKWIKFLVGGETPSPRYGHVMDIAAQRWLVIFSGNNGMLQVVLEKMTLGDTYGLKMDSDNVWTPVPAVAPSPRYQHTAVFGGSKLHVIGGILNRARLIDGEAVVAVLDTETGEWVDTNQPETSASGANRQNQYQLMRRCHHAAASFGSHLYVHGGIREDVLLDDLLVAETSQSSSPEPEEDNPDNYMLLDDYLMDEPKPLSSEPEASSFIMRSTSEIAMDRLAEAHNLPTIENAFYDSAIEGYVPLQHGAETVGNRGGLVRTASLDQSTQDLHKKVISTLLRPKTWTPPANRDFFLSYLEVKHLCDEVEKIFMNEPTLLQLKVPIKVFGDIHGQYGDLMRLFHEYGHPSVEGDITHIDYLFLGDYVDRGQHSLEIIMLLFALKIEYPKNIHLIRGNHESLAMNRIYGFLTECEERMGESYGFEAWLKINQVFDYLPLAALLEKKVLCVHGGIGRAVTIEEIENIERPAFPDTGSMVLKDILWSDPTMNDTVLGIVDNARGEGVVSFGPDIVKAFLERNGLEMILRAHECVIDGFERFADGRLITVFSATNYCGTAQNAGAILVIGRDMVIYPKLIHPHPPPISSSEEDYTDKAWMQELNIEMPPTPARGESSE

SEQ ID NO: 80690 - protein, 766 aa, Arabidopsis thaliana
  peptide (1)..(766): Ceres Seq. ID no. 12656843
METKAIGFHHLSPPQNIVLWLLINLINIHLLRMNRYRPFTIPDEDWPGPRCGHTLTAVFVNNSHQLILFGGSTTAVANHNSSLPEISLDGVTNSVHSFDVLTRKWTRLNPIGDVPSPRACHAAALYGTLILIQGGIGPSGPSDGDVYMLDMTNNKWIKFLVGGETPSPRYGHVMDIAAQRWLVIFSGNNGMLQVVLEKMTLGDTYGLKMDSDNVWTPVPAVAPSPRYQHTAVFGGSKLHVIGGILNRARLIDGEAVVAVLDTETGEWVDTNQPETSASGANRQNQYQLMRRCHHAAASFGSHLYVHGGIREDVLLDDLLVAETSQSSSPEPEEDNPDNYMLLDDYLMDEPKPLSSEPEASSFIMRSTSEIAMDRLAEAHNLPTIENAFYDSAIEGYVPLQHGAETVGNRGGLVRTASLDQSTQDLHKKVISTLLRPKTWTPPANRDFFLSYLEVKHLCDEVEKIFMNEPTLLQLKVPIKVFGDIHGQYGDLMRLFHEYGHPSVEGDITHIDYLFLGDYVDRGQHSLEIIMLLFALKIEYPKNIHLIRGNHESLAMNRIYGFLTECEERMGESYGFEAWLKINQVFDYLPLAALLEKKVLCVHGGIGRAVTIEEIENIERPAFPDTGSMVLKDILWSDPTMNDTVLGIVDNARGEGVVSFGPDIVKAFLERNGLEMILRAHECVIDGFERFADGRLITVFSATNYCGTAQNAGAILVIGRDMVIYPKLIHPHPPPISSSEEDYTDKAWMQELNIEMPPTPARGESSE

SEQ ID NO: 80691 - protein, 734 aa, Arabidopsis thaliana
  peptide (1)..(734): Ceres Seq. ID no. 12656844
MNRYRPFTIPDEDWPGPRCGHTLTAVFVNNSHQLILFGGSTTAVANHNSSLPEISLDGVTNSVHSFDVLTRKWTRLNPIGDVPSPRACHAAALYGTLILIQGGIGPSGPSDGDVYMLDMTNNKWIKFLVGGETPSPRYGHVMDIAAQRWLVIFSGNNGMLQVVLEKMTLGDTYGLKMDSDNVWTPVPAVAPSPRYQHTAVFGGSKLHVIGGILNRARLIDGEAVVAVLDTETGEWVDTNQPETSASGANRQNQYQLMRRCHHAAASFGSHLYVHGGIREDVLLDDLLVAETSQSSSPEPEEDNPDNYMLLDDYLMDEPKPLSSEPEASSFIMRSTSEIAMDRLAEAHNLPTIENAFYDSAIEGYVPLQHGAETVGNRGGLVRTASLDQSTQDLHKKVISTLLRPKTWTPPANRDFFLSYLEVKHLCDEVEKIFMNEPTLLQLKVPIKVFGDIHGQYGDLMRLFHEYGHPSVEGDITHIDYLFLGDYVDRGQHSLEIIMLLFALKIEYPKNIHLIRGNHESLAMNRIYGFLTECEERMGESYGFEAWLKINQVFDYLPLAALLEKKVLCVHGGIGRAVTIEEIENIERPAFPDTGSMVLKDILWSDPTMNDTVLGIVDNARGEGVVSFGPDIVKAFLERNGLEMILRAHECVIDGFERFADGRLITVFSATNYCGTAQNAGAILVIGRDMVIYPKLIHPHPPPISSSEEDYTDKAWMQELNIEMPPTPARGESSE

SEQ ID NO: 80692 - DNA, 1188 bp, Arabidopsis thaliana
  misc_feature (1)..(1188): Ceres Seq. ID no. 12656845
  misc_feature (1)..(1188): Ortholog of  Ceres SEQ ID NO 14316144 as cited in SEQ ID NO 52397
atgagatttaccaagttggtttggtgtttgatgttcctgcttcgattcggcttcttcacggaggcgattctcgacccagttgatttcttggctctgcaagctattcgtaaatccctcgatgacttgccaggttccaagttcttcgagtcttgggatttcacttctgatccatgcggcttcgctggcgtctactgcaacggagataaagtaatctctctcaatctcggcgatcctagagccggttcacccggtttatcgggtcggatcgacccagcaataggcaaactctctgcactcactgagctctccattgtccccggcagaatcatgggtgcgttaccggcaacaatctctcagctaaaagaccttcgttttctcgcaatcagccggaatttcatctccggcgagattccggcgagtctcggcgaggttcgtggtctcagaacactggatttaagctataatcaattaaccggaactatctctccgtcaatcggatcgttaccggagctctccaatttgattctctgccacaaccacttaaccggatcaataccaccgtttctctcacaaactctaacccgaatcgatctcaaacgcaacagcctcaccggctcaatctcaccggcgtctctccctccgtcgcttcaatacctctcactcgcttggaaccagttaaccggatcggtataccatgttttactccggttgaaccagcttaactaccttgatctcagcttaaaccggttcaccggtacaatccccgctcgagtcttcgccttcccgatcacaaatcttcagttacaacgcaatttcttcttcggtttaattcagccggcgaatcaagtgacgatctccaccgtcgatctcagctacaatcgattctccggtgggatatctccgcttctctcaagcgttgagaatctctacttaaacagcaatcgtttcaccggtgaagtcccggcgagtttcgtggagaggttgttatcggcgaacatacagactctgtatctacagcataatttcttgacgggaatacagattagcccggcggcggaaatcccggtgagcagctcgctgtgtctgcagtataactgtatggtgccgccgttacaaaccccgtgtccgctaaaggccggcccacaaaagactaggcccactacacaatgcaccgagtggcgagggtag

SEQ ID NO: 80693 - protein, 395 aa, Arabidopsis thaliana
  peptide (1)..(395): Ceres Seq. ID no. 12656846
MRFTKLVWCLMFLLRFGFFTEAILDPVDFLALQAIRKSLDDLPGSKFFESWDFTSDPCGFAGVYCNGDKVISLNLGDPRAGSPGLSGRIDPAIGKLSALTELSIVPGRIMGALPATISQLKDLRFLAISRNFISGEIPASLGEVRGLRTLDLSYNQLTGTISPSIGSLPELSNLILCHNHLTGSIPPFLSQTLTRIDLKRNSLTGSISPASLPPSLQYLSLAWNQLTGSVYHVLLRLNQLNYLDLSLNRFTGTIPARVFAFPITNLQLQRNFFFGLIQPANQVTISTVDLSYNRFSGGISPLLSSVENLYLNSNRFTGEVPASFVERLLSANIQTLYLQHNFLTGIQISPAAEIPVSSSLCLQYNCMVPPLQTPCPLKAGPQKTRPTTQCTEWRG

SEQ ID NO: 80694 - protein, 385 aa, Arabidopsis thaliana
  peptide (1)..(385): Ceres Seq. ID no. 12656847
MFLLRFGFFTEAILDPVDFLALQAIRKSLDDLPGSKFFESWDFTSDPCGFAGVYCNGDKVISLNLGDPRAGSPGLSGRIDPAIGKLSALTELSIVPGRIMGALPATISQLKDLRFLAISRNFISGEIPASLGEVRGLRTLDLSYNQLTGTISPSIGSLPELSNLILCHNHLTGSIPPFLSQTLTRIDLKRNSLTGSISPASLPPSLQYLSLAWNQLTGSVYHVLLRLNQLNYLDLSLNRFTGTIPARVFAFPITNLQLQRNFFFGLIQPANQVTISTVDLSYNRFSGGISPLLSSVENLYLNSNRFTGEVPASFVERLLSANIQTLYLQHNFLTGIQISPAAEIPVSSSLCLQYNCMVPPLQTPCPLKAGPQKTRPTTQCTEWRG

SEQ ID NO: 80695 - protein, 286 aa, Arabidopsis thaliana
  peptide (1)..(286): Ceres Seq. ID no. 12656848
MGALPATISQLKDLRFLAISRNFISGEIPASLGEVRGLRTLDLSYNQLTGTISPSIGSLPELSNLILCHNHLTGSIPPFLSQTLTRIDLKRNSLTGSISPASLPPSLQYLSLAWNQLTGSVYHVLLRLNQLNYLDLSLNRFTGTIPARVFAFPITNLQLQRNFFFGLIQPANQVTISTVDLSYNRFSGGISPLLSSVENLYLNSNRFTGEVPASFVERLLSANIQTLYLQHNFLTGIQISPAAEIPVSSSLCLQYNCMVPPLQTPCPLKAGPQKTRPTTQCTEWRG

SEQ ID NO: 80696 - DNA, 1698 bp, Arabidopsis thaliana
  misc_feature (1)..(1698): Ceres Seq. ID no. 12656853
  misc_feature (1)..(1698): Ortholog of  Ceres SEQ ID NO 14310419 as cited in SEQ ID NO 55050
  misc_feature (1)..(1698): Ortholog of  Ceres SEQ ID NO 13657789 as cited in SEQ ID NO 66154
gctttcgcctttggattgttgattccctagtggatgttctttatctctttaaaaaggtcctctcttttaaatcaatttttgctgaacttgcccaattcggaaactttgttgcaagtctcctcttggtctctggtaatcgttttcgcatcaatccttatattgatttgaatctgtaatcagattcgatctttgatgctaatttggtattctatagaagacaacatatctgaattgggtttcttcgttggataggataagtggttagggaatgagaaaattgtataggaagctggtttcattcagagacccatttgctagggtcaagagacatgttagttcacattcagggtttagagctttcagcgacagaaaatggttgttcccttttctagctagcttgatcatgtccattactcttctgattttgttaatttctggccaattcgacaacttctttggggaagaagatcaattaccagttgatgttgtttcagagtctaatgactactttgtagaatcagatttcaagcaatctatgaattcgacggctgatgttaatccagagcctcctagattagcttatttaatatcgggaacaaaaggcgatagtcataggatgatgaggactttacaagctgtgtaccatcctagaaaccagtatgttctgcatttggatcttgaggctccacctcgagaacggatggagctggccatgtccgtgaagactgatccgactttccgtgaaatggagaatgttcgtgtgatggctcagtctaatcttgttacttataaaggccctacaatgattgcttgtactcttcaagccgtttcaatcttgctaagagaaagcttacattgggattggtttcttaaccttagtgcctcggattatcctctagtaacacaagatgatttgttgtatgtcttctcaaatctgtctcggaatgtcaatttcatcgagaatatgcagctcaccggatggaaactgaatcagagggctaaatcaatcattgttgatcctgccctatacctatcgaagaaatccgatatcgcttggactactcaacggcgatcacttccaaattctttcaggctattcactggctcagcttggataatgttgactcggtctttcctcgagtactgcatttggggatgggataatttcccaagaacaatactaatgtactacacaaatttcgtatcttctcctgaaggatacttccacacagtaatctgcaacagcaaagagtttatcaacactgcaatcggtcacgaccttcactacattgcttgggacagtcctccaaagcaacaccctagatctctctcgttgaaggattttgacaatatggtcaagagcaaagctccatttgcacgcaagttccacaaaaacgatcctgcgttagacaagatcgataaagagctattgggacggacacaccggtttgcaccaggaggatggtgtgtcgggagttcagctaatggcaatgatcagtgctctgtgcaaggtgacgactcggtgttgaaaccaggacctggttctgagaggttgcaggagcttgttcaaacactttcctctgaagaatttaggcgaaaacagtgttcttgaagttatctactgatgacgcaaaatataacgttgtacagtatattgttttgtttgattataaatttttggttatagaaatttcttcg

SEQ ID NO: 80697 - protein, 447 aa, Arabidopsis thaliana
  peptide (1)..(447): Ceres Seq. ID no. 12656854
MRKLYRKLVSFRDPFARVKRHVSSHSGFRAFSDRKWLFPFLASLIMSITLLILLISGQFDNFFGEEDQLPVDVVSESNDYFVESDFKQSMNSTADVNPEPPRLAYLISGTKGDSHRMMRTLQAVYHPRNQYVLHLDLEAPPRERMELAMSVKTDPTFREMENVRVMAQSNLVTYKGPTMIACTLQAVSILLRESLHWDWFLNLSASDYPLVTQDDLLYVFSNLSRNVNFIENMQLTGWKLNQRAKSIIVDPALYLSKKSDIAWTTQRRSLPNSFRLFTGSAWIMLTRSFLEYCIWGWDNFPRTILMYYTNFVSSPEGYFHTVICNSKEFINTAIGHDLHYIAWDSPPKQHPRSLSLKDFDNMVKSKAPFARKFHKNDPALDKIDKELLGRTHRFAPGGWCVGSSANGNDQCSVQGDDSVLKPGPGSERLQELVQTLSSEEFRRKQCS

SEQ ID NO: 80698 - protein, 402 aa, Arabidopsis thaliana
  peptide (1)..(402): Ceres Seq. ID no. 12656855
MSITLLILLISGQFDNFFGEEDQLPVDVVSESNDYFVESDFKQSMNSTADVNPEPPRLAYLISGTKGDSHRMMRTLQAVYHPRNQYVLHLDLEAPPRERMELAMSVKTDPTFREMENVRVMAQSNLVTYKGPTMIACTLQAVSILLRESLHWDWFLNLSASDYPLVTQDDLLYVFSNLSRNVNFIENMQLTGWKLNQRAKSIIVDPALYLSKKSDIAWTTQRRSLPNSFRLFTGSAWIMLTRSFLEYCIWGWDNFPRTILMYYTNFVSSPEGYFHTVICNSKEFINTAIGHDLHYIAWDSPPKQHPRSLSLKDFDNMVKSKAPFARKFHKNDPALDKIDKELLGRTHRFAPGGWCVGSSANGNDQCSVQGDDSVLKPGPGSERLQELVQTLSSEEFRRKQCS

SEQ ID NO: 80699 - protein, 358 aa, Arabidopsis thaliana
  peptide (1)..(358): Ceres Seq. ID no. 12656856
MNSTADVNPEPPRLAYLISGTKGDSHRMMRTLQAVYHPRNQYVLHLDLEAPPRERMELAMSVKTDPTFREMENVRVMAQSNLVTYKGPTMIACTLQAVSILLRESLHWDWFLNLSASDYPLVTQDDLLYVFSNLSRNVNFIENMQLTGWKLNQRAKSIIVDPALYLSKKSDIAWTTQRRSLPNSFRLFTGSAWIMLTRSFLEYCIWGWDNFPRTILMYYTNFVSSPEGYFHTVICNSKEFINTAIGHDLHYIAWDSPPKQHPRSLSLKDFDNMVKSKAPFARKFHKNDPALDKIDKELLGRTHRFAPGGWCVGSSANGNDQCSVQGDDSVLKPGPGSERLQELVQTLSSEEFRRKQCS

SEQ ID NO: 80700 - DNA, 2746 bp, Arabidopsis thaliana
  misc_feature (1)..(2746): Ceres Seq. ID no. 12656869
  misc_feature (1)..(2746): Ortholog of  Ceres SEQ ID NO 13663060 as cited in SEQ ID NO 60964
  misc_feature (1)..(2746): Ortholog of  Ceres SEQ ID NO 13598532 as cited in SEQ ID NO 65204
  misc_feature (1)..(2746): Ortholog of  Ceres SEQ ID NO 13656849 as cited in SEQ ID NO 65764
  misc_feature (1)..(2746): Ortholog of  Ceres SEQ ID NO 13656501 as cited in SEQ ID NO 69206
attcaacgctttgcctaaagtcaatcttcatcaatttctctccattccttcactcaattccggccaaagttttgatttttccggttcgaatcactctttctggggatttcacagtgtactgtgtgtggtcttccgaagaagaagaagaattcaaaaatacgatcttgttggttttcgtgaattgggtatttcccgctgagccgttgaagttgtgtgtttgttctgagtggattgaaattagggtttagattttagggaagtgaatggattgggttgtgaataataaaggttaagtttttctgtagattggttatgtgtgtagattcatgttctagagagcatacgaatgggttgtgtgaattctaggcataggccttttagaagaaagtcaacaacactgaaagagtcatcagaggagaaacgttcctctcggattgattcgtcgaggaggattgatgattggattcaaccggaagatgggtttgatagattgagtaacagtggagatgctaaagttaggttgattgaatccgaaatgtttagtacaagtaggtgtcatgatcatcagattgggaagatattagagaatcctgcgacagttgctcatatggatagagttgtgcatgatcaggaattgagaagggcctctagtgctgttgtagactcggacttggatattgatccaaaggttgttaaggccaagctagatagatggaatagcaaagattccaaagttcggttgattgaatctgaaaagttgagttctagcatgttttctgagcatcatcagatagagaagggagtagagaaacctgaggttgaagcttcggttcgagtggttcatcgggaactgaagaggggttcaagcattgttagtccaaaggatgcagagcggaagcaagtggcagcaggatggccgtcttggctggtctctgttgctggtgagtcactagtggattgggctccacgacgagcaaatacttttgaaaagctggagaaaattggccaaggaacatatagcagcgtatacagagctcgcgatcttcttcataacaagattgttgcgctaaaaaaagtccggtttgatcttaacgatatggaaagtgttaagtttatggcaagagagatcatagtaatgcgacggcttgatcatcctaatgtcctgaaattggaaggattgatcactgcccctgtctcatcgtccctttacttagtttttgagtacatggatcatgatctcttaggactttcttcactacctggtgtcaagtttacagagcctcaggttaaatgttacatgcgacaacttctaagtgggcttgaacattgtcacagccgtggcgttcttcaccgtgatataaaaggctcaaacctactaattgacagtaagggagtcttgaagatagcagattttgggttagcaacttttttcgaccctgcaaaaagtgtttcattgactagccatgttgtcactctttggtaccggccaccagaacttttgcttggagcctctcattacggtgttggggttgatttatggagcacaggttgcatcttaggtgaattatatgccggtaaaccgatcctccctggaaaaaccgaggtagaacaattgcataaaatcttcaagctttgcggttcaccaacagaaaattactggagaaaacagaagttaccatcttcagctggattcaaaaccgcgattccttataggcggaaagtatcagagatgtttaaggactttcctgcaagtgttctttcacttttagagactttactctccatagatcctgatcaccggagctctgcagatcgtgcccttgagagtgagtacttcaaaaccaagccgtttgcttgcgatccatcgaacttaccaaaatatcctcctagtaaagagattgatgcgaaaatgcgtgatgaagcgaaaaggcaacaacctatgagggcggagaaacaagaagacaagactctatgacgagaatatcacacgagagaaaatttgtaccaccggtcaaagcaaataactctctgtcaatgacaatggagaaacaatataaagatttgaggagtaggaacgatagtttcaagtcgtttaaggaggagaggactcctcatggaccagttcctgattatcaaaatatgcagcacaacagaaacaatcaaactggtgtgagaatttcacactcaggtccattgatgagcaaccggaacatggctaagtcaacaatgcatgtgaaggagaatgcacttcctagataccctccagctagagtaaacccgaagatgttatcaggctcagtctcctccaaaacattattagaacggcaagatcaaccagtcacgaaccaaagaagaagagatcggcgagcatacaatagagctgatactatggatagtagacatatgacagcaccaattgacccatcttggtataatcctagtgatagcaagatttacatgtcaggaccattgttggctcagccaagcagagtggaccagatgcttgaagaacatgacagacagcttcaggaattcaatagacaggcactcaagacaccacaaggctgaaatcattggaagagccaaattattgagcgttctaaaaagccgaatcagttgagtcagatttgtcactataatctattggtttcataaattgagttgatgtgatcggcttaaaggcataaaccactactgttcgtatagagttcgctgtgtgtacatatatacaaaatccctttgaatt

SEQ ID NO: 80701 - protein, 542 aa, Arabidopsis thaliana
  peptide (1)..(542): Ceres Seq. ID no. 12656870
MGCVNSRHRPFRRKSTTLKESSEEKRSSRIDSSRRIDDWIQPEDGFDRLSNSGDAKVRLIESEMFSTSRCHDHQIGKILENPATVAHMDRVVHDQELRRASSAVVDSDLDIDPKVVKAKLDRWNSKDSKVRLIESEKLSSSMFSEHHQIEKGVEKPEVEASVRVVHRELKRGSSIVSPKDAERKQVAAGWPSWLVSVAGESLVDWAPRRANTFEKLEKIGQGTYSSVYRARDLLHNKIVALKKVRFDLNDMESVKFMAREIIVMRRLDHPNVLKLEGLITAPVSSSLYLVFEYMDHDLLGLSSLPGVKFTEPQVKCYMRQLLSGLEHCHSRGVLHRDIKGSNLLIDSKGVLKIADFGLATFFDPAKSVSLTSHVVTLWYRPPELLLGASHYGVGVDLWSTGCILGELYAGKPILPGKTEVEQLHKIFKLCGSPTENYWRKQKLPSSAGFKTAIPYRRKVSEMFKDFPASVLSLLETLLSIDPDHRSSADRALESEYFKTKPFACDPSNLPKYPPSKEIDAKMRDEAKRQQPMRAEKQEDKTL

SEQ ID NO: 80702 - protein, 479 aa, Arabidopsis thaliana
  peptide (1)..(479): Ceres Seq. ID no. 12656871
MFSTSRCHDHQIGKILENPATVAHMDRVVHDQELRRASSAVVDSDLDIDPKVVKAKLDRWNSKDSKVRLIESEKLSSSMFSEHHQIEKGVEKPEVEASVRVVHRELKRGSSIVSPKDAERKQVAAGWPSWLVSVAGESLVDWAPRRANTFEKLEKIGQGTYSSVYRARDLLHNKIVALKKVRFDLNDMESVKFMAREIIVMRRLDHPNVLKLEGLITAPVSSSLYLVFEYMDHDLLGLSSLPGVKFTEPQVKCYMRQLLSGLEHCHSRGVLHRDIKGSNLLIDSKGVLKIADFGLATFFDPAKSVSLTSHVVTLWYRPPELLLGASHYGVGVDLWSTGCILGELYAGKPILPGKTEVEQLHKIFKLCGSPTENYWRKQKLPSSAGFKTAIPYRRKVSEMFKDFPASVLSLLETLLSIDPDHRSSADRALESEYFKTKPFACDPSNLPKYPPSKEIDAKMRDEAKRQQPMRAEKQEDKTL

SEQ ID NO: 80703 - protein, 455 aa, Arabidopsis thaliana
  peptide (1)..(455): Ceres Seq. ID no. 12656872
MDRVVHDQELRRASSAVVDSDLDIDPKVVKAKLDRWNSKDSKVRLIESEKLSSSMFSEHHQIEKGVEKPEVEASVRVVHRELKRGSSIVSPKDAERKQVAAGWPSWLVSVAGESLVDWAPRRANTFEKLEKIGQGTYSSVYRARDLLHNKIVALKKVRFDLNDMESVKFMAREIIVMRRLDHPNVLKLEGLITAPVSSSLYLVFEYMDHDLLGLSSLPGVKFTEPQVKCYMRQLLSGLEHCHSRGVLHRDIKGSNLLIDSKGVLKIADFGLATFFDPAKSVSLTSHVVTLWYRPPELLLGASHYGVGVDLWSTGCILGELYAGKPILPGKTEVEQLHKIFKLCGSPTENYWRKQKLPSSAGFKTAIPYRRKVSEMFKDFPASVLSLLETLLSIDPDHRSSADRALESEYFKTKPFACDPSNLPKYPPSKEIDAKMRDEAKRQQPMRAEKQEDKTL

SEQ ID NO: 80704 - DNA, 1410 bp, Arabidopsis thaliana
  misc_feature (1)..(1410): Ceres Seq. ID no. 12656897
  misc_feature (1)..(1410): Ortholog of  Ceres SEQ ID NO 14313049 as cited in SEQ ID NO 54099
  misc_feature (1)..(1410): Ortholog of  Ceres SEQ ID NO 14303592 as cited in SEQ ID NO 68603
atggtggctcatcttcaacctcctaagatcatcgagacctgtcacatctctcccccaaagggcaccgttccatcaaccactcttcctctcaccttcttcgatgccccctggctctctctcccactcgccgattctctcttcttcttctcttaccaaaactcaactgaatctttcctccaagactttgtacccaacctcaaacattccctctccatcactctccaacatttcttcccttacgccggtaaactgattatcccgcctcgtcccgaccctccatatttacactacaacgatggccaagactctcttgttttcaccgtagcagagtctactgaaaccgacttcgaccaactgaagtctgattcccctaaagatatcagtgtgttgcatggcgtcttgcccaagttacctcctcctcacgtctctccggaaggaattcagatgcgaccaataatggctatgcaagtcaccatcttccctggagctggaatctgtataggcaactcagctacacatgttgtagcagatggagtcaccttcagtcatttcatgaagtattggatgtcattgaccaaatccagcggtaaagatcccgccacggttcttctaccctctctgcctattcacagctgcagaaacatgatcaaggacccaggcgaggtaggcgcaggacatttggagcggttttggagccaaaactctgcaaaacacagttcacatgttacgcctgagaacatggtcagagccacttttacattgagccggaagcagatagataatctaaaaagttgggttacagagcagtctgagaatcaatctcctgtttctaccttcgtggtgactctagctttcatttgggtaagcttgatcaagacacttgtacaagacagtgaaacaaaggccaacgaggaagacaaggatgaagtatttcacttgatgatcaatgtggattgcaggaatcgcctcaagtacacacaaccaataccacaaacatactttggcaactgtatggctcctggtatcgtatcagtcaagaaacacgatttgctaggagaaaaatgcgttttggcggcttcagatgcaatcacagcgagaatcaaagatatgttatcaagcgatctgttgaagacagcaccaagatggggacaaggagtacgtaaatgggtcatgtcccattatccaacctcaattgcaggagctccgaaattgggactgtatgacatggattttggattaggaaagccctgcaaaatggagatcgtgcacatagaaacaggtggttctatcgcattctcagagtccagagacggcagcaatggagttgagattggaatagcactagagaagaagaaaatggatgtgtttgactcaattctacaacaggggatcaagaaattcgcaacgtag

SEQ ID NO: 80705 - protein, 469 aa, Arabidopsis thaliana
  peptide (1)..(469): Ceres Seq. ID no. 12656898
MVAHLQPPKIIETCHISPPKGTVPSTTLPLTFFDAPWLSLPLADSLFFFSYQNSTESFLQDFVPNLKHSLSITLQHFFPYAGKLIIPPRPDPPYLHYNDGQDSLVFTVAESTETDFDQLKSDSPKDISVLHGVLPKLPPPHVSPEGIQMRPIMAMQVTIFPGAGICIGNSATHVVADGVTFSHFMKYWMSLTKSSGKDPATVLLPSLPIHSCRNMIKDPGEVGAGHLERFWSQNSAKHSSHVTPENMVRATFTLSRKQIDNLKSWVTEQSENQSPVSTFVVTLAFIWVSLIKTLVQDSETKANEEDKDEVFHLMINVDCRNRLKYTQPIPQTYFGNCMAPGIVSVKKHDLLGEKCVLAASDAITARIKDMLSSDLLKTAPRWGQGVRKWVMSHYPTSIAGAPKLGLYDMDFGLGKPCKMEIVHIETGGSIAFSESRDGSNGVEIGIALEKKKMDVFDSILQQGIKKFAT

SEQ ID NO: 80706 - protein, 321 aa, Arabidopsis thaliana
  peptide (1)..(321): Ceres Seq. ID no. 12656899
MRPIMAMQVTIFPGAGICIGNSATHVVADGVTFSHFMKYWMSLTKSSGKDPATVLLPSLPIHSCRNMIKDPGEVGAGHLERFWSQNSAKHSSHVTPENMVRATFTLSRKQIDNLKSWVTEQSENQSPVSTFVVTLAFIWVSLIKTLVQDSETKANEEDKDEVFHLMINVDCRNRLKYTQPIPQTYFGNCMAPGIVSVKKHDLLGEKCVLAASDAITARIKDMLSSDLLKTAPRWGQGVRKWVMSHYPTSIAGAPKLGLYDMDFGLGKPCKMEIVHIETGGSIAFSESRDGSNGVEIGIALEKKKMDVFDSILQQGIKKFAT

SEQ ID NO: 80707 - protein, 317 aa, Arabidopsis thaliana
  peptide (1)..(317): Ceres Seq. ID no. 12656900
MAMQVTIFPGAGICIGNSATHVVADGVTFSHFMKYWMSLTKSSGKDPATVLLPSLPIHSCRNMIKDPGEVGAGHLERFWSQNSAKHSSHVTPENMVRATFTLSRKQIDNLKSWVTEQSENQSPVSTFVVTLAFIWVSLIKTLVQDSETKANEEDKDEVFHLMINVDCRNRLKYTQPIPQTYFGNCMAPGIVSVKKHDLLGEKCVLAASDAITARIKDMLSSDLLKTAPRWGQGVRKWVMSHYPTSIAGAPKLGLYDMDFGLGKPCKMEIVHIETGGSIAFSESRDGSNGVEIGIALEKKKMDVFDSILQQGIKKFAT

SEQ ID NO: 80708 - DNA, 1938 bp, Arabidopsis thaliana
  misc_feature (1)..(1938): Ceres Seq. ID no. 12656939
  misc_feature (1)..(1938): Ortholog of  Ceres SEQ ID NO 14315434 as cited in SEQ ID NO 58671
atgttaaagacattgttagtccaatggcttgtcttcttcttcttcttcttaatcggttccgtcgtcaccgccgcagaagacgacggtagcttgtcgttatgcaactgcgacgacgaagacagtctctttagctacgagacaatcctcaactcgcaaaaagtcggcgactttcttatcgcaatcgcttatttctcgatcccaatcgagctggtttacttcgtgagccgcaccaatgtgccttcaccttacaattgggtggtctgcgagtttatagccttcattgttctctgcggcatgacccatttgctcgctggtttcacctacgggcctcactggccttgggtcatgacagctgtcactgtcttcaagatgctgactggtatcgtctctttcctcacggcactctcgttagtcactctcttaccattgcttcttaaggctaaggttcgtgagtttatgttgagtaagaagaccagagagcttgatcgtgaggttgggatcattatgaagcagactgagacgagtttgcatgttcgtatgctcactaccaagattaggacgtctcttgatcgacacaccattctatacactacgcttgtggagttgtccaagactctggggctcaagaactgtgcggtttggatcccgaatgagatcaagacggagatgaatcttactcatgagttaagaccgaggattgatgatgagaatgagaatgagcattttggtggttatgctgggttctcgataccgattagtgagtctgatgttgtgaggattaagagaagcgaagaggtgaatatgttgagccctggttctgtgcttgcctcagtgactagccgagggaagtcaggtcctacggttgggataagagtccctatgcttcgggtttgtaactttaaaggcgggacaccagaggcgattcacatgtgttatgcgatattggtgtgtgtgcttccattgagacagccgcaggcttggacttatcaagagcttgagattgttaaggtggtggctgatcaagtggcggttgcaatctctcacgccgtgattcttgaagaatctcagcttatgagagagaaactcgctgaacagaaccgagcgcttcaggttgcgagggagaacgcactgagagctaatcaagccaaggctgcgttcgagcagatgatgagcgatgcaatgaggtgtcctgtgcggtccattctcgggttgcttcctttgatacttcaggatgggaagttacccgagaaccagactgttatcgttgatgcaatgaggagaaccagcgagttacttgtacagcttgtaaacaatgccggagatataaacaatgggacaatccgcgctgcagagactcattatttcagtttgcattcggttgtgaaagagtcagcttgcgtggcgaggtgtttatgcatggcaaatggttttggtttctcagctgaagtttatagagcattgcctgactacgtcgtaggtgatgatagaaaggtctttcaagcgattttgcatatgcttggggttctaatgaatcgaaagatcaaagggaatgtgactttctgggtttttccggaaagcgggaactcagacgtatcagagaggaaagatattcaagaagcggtttggcgacattgctattcgaaagaatacatggaagttagattcggattcgaggtaactgctgaaggtgaagagagtagtagtagtagtagtggtagtaacctggaggaggaggaagagaatccgagtctcaacgcttgccaaaacattgtaaagtatatgcaagggaatattcgggttgttgaggacggtctaggtttggtgaaaagcgtctcagttgttttccggtttcaactccggcgatcgatgatgtcgagaggcggtggatattctggagaaacgtttagaacctcaactcctccgtctactagccactga

SEQ ID NO: 80709 - protein, 645 aa, Arabidopsis thaliana
  peptide (1)..(645): Ceres Seq. ID no. 12656940
MLKTLLVQWLVFFFFFLIGSVVTAAEDDGSLSLCNCDDEDSLFSYETILNSQKVGDFLIAIAYFSIPIELVYFVSRTNVPSPYNWVVCEFIAFIVLCGMTHLLAGFTYGPHWPWVMTAVTVFKMLTGIVSFLTALSLVTLLPLLLKAKVREFMLSKKTRELDREVGIIMKQTETSLHVRMLTTKIRTSLDRHTILYTTLVELSKTLGLKNCAVWIPNEIKTEMNLTHELRPRIDDENENEHFGGYAGFSIPISESDVVRIKRSEEVNMLSPGSVLASVTSRGKSGPTVGIRVPMLRVCNFKGGTPEAIHMCYAILVCVLPLRQPQAWTYQELEIVKVVADQVAVAISHAVILEESQLMREKLAEQNRALQVARENALRANQAKAAFEQMMSDAMRCPVRSILGLLPLILQDGKLPENQTVIVDAMRRTSELLVQLVNNAGDINNGTIRAAETHYFSLHSVVKESACVARCLCMANGFGFSAEVYRALPDYVVGDDRKVFQAILHMLGVLMNRKIKGNVTFWVFPESGNSDVSERKDIQEAVWRHCYSKEYMEVRFGFEVTAEGEESSSSSSGSNLEEEEENPSLNACQNIVKYMQGNIRVVEDGLGLVKSVSVVFRFQLRRSMMSRGGGYSGETFRTSTPPSTSH

SEQ ID NO: 80710 - protein, 547 aa, Arabidopsis thaliana
  peptide (1)..(547): Ceres Seq. ID no. 12656941
MTHLLAGFTYGPHWPWVMTAVTVFKMLTGIVSFLTALSLVTLLPLLLKAKVREFMLSKKTRELDREVGIIMKQTETSLHVRMLTTKIRTSLDRHTILYTTLVELSKTLGLKNCAVWIPNEIKTEMNLTHELRPRIDDENENEHFGGYAGFSIPISESDVVRIKRSEEVNMLSPGSVLASVTSRGKSGPTVGIRVPMLRVCNFKGGTPEAIHMCYAILVCVLPLRQPQAWTYQELEIVKVVADQVAVAISHAVILEESQLMREKLAEQNRALQVARENALRANQAKAAFEQMMSDAMRCPVRSILGLLPLILQDGKLPENQTVIVDAMRRTSELLVQLVNNAGDINNGTIRAAETHYFSLHSVVKESACVARCLCMANGFGFSAEVYRALPDYVVGDDRKVFQAILHMLGVLMNRKIKGNVTFWVFPESGNSDVSERKDIQEAVWRHCYSKEYMEVRFGFEVTAEGEESSSSSSGSNLEEEEENPSLNACQNIVKYMQGNIRVVEDGLGLVKSVSVVFRFQLRRSMMSRGGGYSGETFRTSTPPSTSH

SEQ ID NO: 80711 - protein, 530 aa, Arabidopsis thaliana
  peptide (1)..(530): Ceres Seq. ID no. 12656942
MTAVTVFKMLTGIVSFLTALSLVTLLPLLLKAKVREFMLSKKTRELDREVGIIMKQTETSLHVRMLTTKIRTSLDRHTILYTTLVELSKTLGLKNCAVWIPNEIKTEMNLTHELRPRIDDENENEHFGGYAGFSIPISESDVVRIKRSEEVNMLSPGSVLASVTSRGKSGPTVGIRVPMLRVCNFKGGTPEAIHMCYAILVCVLPLRQPQAWTYQELEIVKVVADQVAVAISHAVILEESQLMREKLAEQNRALQVARENALRANQAKAAFEQMMSDAMRCPVRSILGLLPLILQDGKLPENQTVIVDAMRRTSELLVQLVNNAGDINNGTIRAAETHYFSLHSVVKESACVARCLCMANGFGFSAEVYRALPDYVVGDDRKVFQAILHMLGVLMNRKIKGNVTFWVFPESGNSDVSERKDIQEAVWRHCYSKEYMEVRFGFEVTAEGEESSSSSSGSNLEEEEENPSLNACQNIVKYMQGNIRVVEDGLGLVKSVSVVFRFQLRRSMMSRGGGYSGETFRTSTPPSTSH

SEQ ID NO: 80712 - DNA, 1806 bp, Arabidopsis thaliana
  misc_feature (1)..(1806): Ceres Seq. ID no. 12656963
  misc_feature (1)..(1806): Ortholog of  Ceres SEQ ID NO 14310037 as cited in SEQ ID NO 20603
atgtcgatgatgttcccatcgtttcagttgctagaacttaacataatatcagctcaggacttggctcccgtcgcacgcaagacaaagacttatgcggttgcttgggttcattccgaacgtaaacttaccacccgtgtcgactataatggcggaacaaacccaacttggaacgacaaattcgtattcagagtcaacgaagaatttctctacgctgatacttcagcagtggttatcgaaatatacgccttgcattggttcagagatgttcatgtaggaacagttcgtgtcctcattagcaacctcattcctcctaatcgccgtccaggatacagaaccagcaacaatgaatatcgtcgtaccccacctccaggaatgagatttgttgcgcttcaagttcgtcgtacttcaggtcgacctcaggggattttgaacattggtgttggattaattgatggttctatgcggagtatgccgctttatacgcatatggattcatctgctgtgggatatagagatttgctcggagaagaagatcatcatctacaacatttgcatttaaatagcaacaaagggagctcaaagaatccacaatctccatcttctcgacagtaccaatccgtaatctcaaggcctgagctccgtcgtacgaagagcgatacaagttctatggttgtttcggatcttcttagcagggctgaacggagtcgtttagctaatagacaaccagcgagtgcaatagtgagcagtgaatctgaaactcttcccaccacgacagattctgatgagaaaaaatcgagtgagtatacacctcctagtaaaaaccttagagttccaaggcaacgatacaattcgattgaatcagatctcataaatccgtcgccaatggagaaccaccatgtggtagtgtcgagaagggagagacatgatgttatgccgtatagttcgtatcaacaaacaggtaagacaccgaggaagaagacaaggatcgagaaacaaagatcagtgaaagattacgatcgtggccgagcttccccgtacttatcgaagcacggaacaccattgagatcaaacattatcgcatctactccgatgagatctaacggagttggatcaactcctatgagatccaacatcatcgcaatgtcaccgatgcatcccaacatggttggatcgactccaatgcgaactcctatgcggtctaacatggttggttcgactccaatgagatcaaacatcgtcggatcaaccccgatccgatcaaactacatggctacaccgatgagaactcatcacgattttggtacaccagtgaggaatttagctggaagacgaatcttaactgaatcggagttaggaccatcgccatctgaagtggctgacaaattggcgaaagatagatcgcacgaaacggaaagttcaatactcagcgaatggagcatcgatgaatctagcatcgaaggattgcgatcaaaactcgagagatggcgaacagagcttccaccgttgtacgacataggatcaagccatataagtagcactgattacgatggcgcgagcgttccagctgcaactgccgggggaggaatgagttcaagacggaaaactccgacgacgaaaaagcataaccgccgtcacacagatggaggtaatggacttttctcgtgttttagtaagatttgtggtgtggaatgcagtttcgtatgcggtggtggtggtgggccgatggtctcagaaggatctactaagaaaggtggagccggacgtgtgcaacgcacatattccgctgacgatctgagctttgtgtga

SEQ ID NO: 80713 - protein, 601 aa, Arabidopsis thaliana
  peptide (1)..(601): Ceres Seq. ID no. 12656964
MSMMFPSFQLLELNIISAQDLAPVARKTKTYAVAWVHSERKLTTRVDYNGGTNPTWNDKFVFRVNEEFLYADTSAVVIEIYALHWFRDVHVGTVRVLISNLIPPNRRPGYRTSNNEYRRTPPPGMRFVALQVRRTSGRPQGILNIGVGLIDGSMRSMPLYTHMDSSAVGYRDLLGEEDHHLQHLHLNSNKGSSKNPQSPSSRQYQSVISRPELRRTKSDTSSMVVSDLLSRAERSRLANRQPASAIVSSESETLPTTTDSDEKKSSEYTPPSKNLRVPRQRYNSIESDLINPSPMENHHVVVSRRERHDVMPYSSYQQTGKTPRKKTRIEKQRSVKDYDRGRASPYLSKHGTPLRSNIIASTPMRSNGVGSTPMRSNIIAMSPMHPNMVGSTPMRTPMRSNMVGSTPMRSNIVGSTPIRSNYMATPMRTHHDFGTPVRNLAGRRILTESELGPSPSEVADKLAKDRSHETESSILSEWSIDESSIEGLRSKLERWRTELPPLYDIGSSHISSTDYDGASVPAATAGGGMSSRRKTPTTKKHNRRHTDGGNGLFSCFSKICGVECSFVCGGGGGPMVSEGSTKKGGAGRVQRTYSADDLSFV

SEQ ID NO: 80714 - protein, 599 aa, Arabidopsis thaliana
  peptide (1)..(599): Ceres Seq. ID no. 12656965
MMFPSFQLLELNIISAQDLAPVARKTKTYAVAWVHSERKLTTRVDYNGGTNPTWNDKFVFRVNEEFLYADTSAVVIEIYALHWFRDVHVGTVRVLISNLIPPNRRPGYRTSNNEYRRTPPPGMRFVALQVRRTSGRPQGILNIGVGLIDGSMRSMPLYTHMDSSAVGYRDLLGEEDHHLQHLHLNSNKGSSKNPQSPSSRQYQSVISRPELRRTKSDTSSMVVSDLLSRAERSRLANRQPASAIVSSESETLPTTTDSDEKKSSEYTPPSKNLRVPRQRYNSIESDLINPSPMENHHVVVSRRERHDVMPYSSYQQTGKTPRKKTRIEKQRSVKDYDRGRASPYLSKHGTPLRSNIIASTPMRSNGVGSTPMRSNIIAMSPMHPNMVGSTPMRTPMRSNMVGSTPMRSNIVGSTPIRSNYMATPMRTHHDFGTPVRNLAGRRILTESELGPSPSEVADKLAKDRSHETESSILSEWSIDESSIEGLRSKLERWRTELPPLYDIGSSHISSTDYDGASVPAATAGGGMSSRRKTPTTKKHNRRHTDGGNGLFSCFSKICGVECSFVCGGGGGPMVSEGSTKKGGAGRVQRTYSADDLSFV

SEQ ID NO: 80715 - protein, 598 aa, Arabidopsis thaliana
  peptide (1)..(598): Ceres Seq. ID no. 12656966
MFPSFQLLELNIISAQDLAPVARKTKTYAVAWVHSERKLTTRVDYNGGTNPTWNDKFVFRVNEEFLYADTSAVVIEIYALHWFRDVHVGTVRVLISNLIPPNRRPGYRTSNNEYRRTPPPGMRFVALQVRRTSGRPQGILNIGVGLIDGSMRSMPLYTHMDSSAVGYRDLLGEEDHHLQHLHLNSNKGSSKNPQSPSSRQYQSVISRPELRRTKSDTSSMVVSDLLSRAERSRLANRQPASAIVSSESETLPTTTDSDEKKSSEYTPPSKNLRVPRQRYNSIESDLINPSPMENHHVVVSRRERHDVMPYSSYQQTGKTPRKKTRIEKQRSVKDYDRGRASPYLSKHGTPLRSNIIASTPMRSNGVGSTPMRSNIIAMSPMHPNMVGSTPMRTPMRSNMVGSTPMRSNIVGSTPIRSNYMATPMRTHHDFGTPVRNLAGRRILTESELGPSPSEVADKLAKDRSHETESSILSEWSIDESSIEGLRSKLERWRTELPPLYDIGSSHISSTDYDGASVPAATAGGGMSSRRKTPTTKKHNRRHTDGGNGLFSCFSKICGVECSFVCGGGGGPMVSEGSTKKGGAGRVQRTYSADDLSFV

SEQ ID NO: 80716 - DNA, 802 bp, Arabidopsis thaliana
  misc_feature (1)..(802): Ceres Seq. ID no. 12656967
  misc_feature (1)..(802): Ortholog of  Ceres SEQ ID NO 14302536 as cited in SEQ ID NO 56675
  misc_feature (1)..(802): Ortholog of  Ceres SEQ ID NO 15172618 as cited in SEQ ID NO 61732
gttgcaaagagaagaaaggtttcgagtagcaaaagagtaaaactagatctttaggagaaggtaaaagaagcaattgatggcgacgacagtgggaagaaacatagcagcaccattgctgttcttgaatcttgttatgtacctgattgtgcttggttttgcaagttggtgtctcaataaatacatcaacggccaaactaaccacccaagttttggaggcaatggagcaacaccgttcttcttgacgttttcgatattggcggctgtggtaggagtagcgtcgaagttggccggagcaaatcatattaggttttggaggaatgatagtttagccgctgctggagcttcttccatcgttgcatgggctatcacagctcttgccatggggttggcatgcaaacaaataaacataggaggatggagaggatggagactgaagatgattgaagccttcattatcattttgacgttcacgcagcttctctacctcatgttgatccatgccggttcactcagcagcaaatatggtcctggatacagagaccaagactatgctacaggccaagctcatggtcatggtcatgtaccacacactgtgggagagcacaaggctggtgttggatctaccatggcagtctgatgaaaatctgtgtcttttaattgtgttttgacgtttggttaagaagtacttattatagtttatgttttttcaagttatgtaataatgtaattcctatccatctgacaaacgaacgaatcttgtgtgttcttttgttaattagttaaatggagatgtgtttctttg

SEQ ID NO: 80717 - protein, 186 aa, Arabidopsis thaliana
  peptide (1)..(186): Ceres Seq. ID no. 12656968
MATTVGRNIAAPLLFLNLVMYLIVLGFASWCLNKYINGQTNHPSFGGNGATPFFLTFSILAAVVGVASKLAGANHIRFWRNDSLAAAGASSIVAWAITALAMGLACKQINIGGWRGWRLKMIEAFIIILTFTQLLYLMLIHAGSLSSKYGPGYRDQDYATGQAHGHGHVPHTVGEHKAGVGSTMAV

SEQ ID NO: 80718 - protein, 167 aa, Arabidopsis thaliana
  peptide (1)..(167): Ceres Seq. ID no. 12656969
MYLIVLGFASWCLNKYINGQTNHPSFGGNGATPFFLTFSILAAVVGVASKLAGANHIRFWRNDSLAAAGASSIVAWAITALAMGLACKQINIGGWRGWRLKMIEAFIIILTFTQLLYLMLIHAGSLSSKYGPGYRDQDYATGQAHGHGHVPHTVGEHKAGVGSTMAV

SEQ ID NO: 80719 - DNA, 663 bp, Arabidopsis thaliana
  misc_feature (1)..(663): Ceres Seq. ID no. 12656974
  misc_feature (1)..(663): Ortholog of  Ceres SEQ ID NO 14301765 as cited in SEQ ID NO 61955
  misc_feature (1)..(663): Ortholog of  Ceres SEQ ID NO 12618205 as cited in SEQ ID NO 65153
  misc_feature (1)..(663): Ortholog of  Ceres SEQ ID NO 12620986 as cited in SEQ ID NO 66720
atgggacaacaatcgttgatctacagcttcgtcgctcgcggtacggtgatcctcgccgagtataccgagttcaagggcaatttcacctccgtcgccgctcagtgtctccagaaacttccgtcctcgaacaacaaatttacctacaattgcgacggtcacactttcaattatctcgctgataatggcttcacctattgtgttgttgttattgaatctgctgggaggcagataccaatggctttcttggagagagtcaaggaggatttcaacaagagatacggtggtggaaaagcttccactgctaaagccaacagcttgaacaaagaattcgggtctaaattgaaggagcacatgcagtactgtgcggatcatcctgaggagattagcaaactttccaaagttaaggctcaggtgactgaagtgaagggtgttatgatggagaatattgagaaggtccttgaccgtggagagaaaatcgagctattagtagacaaaactgagaaccttcgctcacaggcacaagattttagaacacaaggaacaaagatgaaaagaaagttgtggttcgaaaacatgaagataaagctcatagtctttggcatcattgtcgctttgattctcatcatcattttgtcggtttgccatggcttcaagtgtacttaa

SEQ ID NO: 80720 - protein, 220 aa, Arabidopsis thaliana
  peptide (1)..(220): Ceres Seq. ID no. 12656975
MGQQSLIYSFVARGTVILAEYTEFKGNFTSVAAQCLQKLPSSNNKFTYNCDGHTFNYLADNGFTYCVVVIESAGRQIPMAFLERVKEDFNKRYGGGKASTAKANSLNKEFGSKLKEHMQYCADHPEEISKLSKVKAQVTEVKGVMMENIEKVLDRGEKIELLVDKTENLRSQAQDFRTQGTKMKRKLWFENMKIKLIVFGIIVALILIIILSVCHGFKCT

SEQ ID NO: 80721 - protein, 142 aa, Arabidopsis thaliana
  peptide (1)..(142): Ceres Seq. ID no. 12656976
MAFLERVKEDFNKRYGGGKASTAKANSLNKEFGSKLKEHMQYCADHPEEISKLSKVKAQVTEVKGVMMENIEKVLDRGEKIELLVDKTENLRSQAQDFRTQGTKMKRKLWFENMKIKLIVFGIIVALILIIILSVCHGFKCT

SEQ ID NO: 80722 - DNA, 1998 bp, Arabidopsis thaliana
  misc_feature (1)..(1998): Ceres Seq. ID no. 12656981
  misc_feature (1)..(1998): Ortholog of  Ceres SEQ ID NO 12586556 as cited in SEQ ID NO 64667
  misc_feature (1)..(1998): Ortholog of  Ceres SEQ ID NO 13660894 as cited in SEQ ID NO 67475
atgaaatcgctttctgttatttttaaaccgaaatcttctcccgctaaaatctattttccggccgatcgtcaagcctcaccggacgagtctcacttcatatctctgattcacgcctgtaaagacaccgcaagtctccgccatgttcacgcccagatcctccgtcgcggcgtcctcagtagccgcgtcgctgctcagctcgtatcttgctcttcgcttctcaagtccccggattatagcctctcgattttcagaaattctgaagagaggaatccttttgttttaaatgctttgatccgtggtttgacggagaatgctcgtttcgagtcttcggttcgtcatttcattctcatgttaaggcttggtgtgaaacccgatcggctaacttttccgtttgtactcaagtctaattctaaattaggttttagatggttgggtagggctcttcatgccgcgactttgaagaatttcgttgactgtgactccttcgtcaggttatcattggttgatatgtacgccaaaaccggacaattaaaacatgccttccaagtgttcgaagaaagtcctgatagaatcaaaaaggagagtattttgatatggaatgttttgattaatgggtattgtcgagccaaggatatgcatatggctacaacactttttcgatccatgcctgagagaaattcaggatcttggagtactttgatcaagggttatgttgatagcggcgagttgaacagagcaaagcagctttttgaattaatgccagagaaaaatgtggtgtcttggacaacattaattaatgggttttctcaaactggcgactatgaaactgcgatttctacctatttcgagatgctagagaagggcttaaagcctaatgaatacacaattgctgctgtgctctctgcatgttcaaaatctggtgctcttggatcaggaataagaattcatggttatattttggacaatgggattaagttggatagagccatagggacagctctcgtagacatgtatgcaaaatgtggggaacttgactgtgcggctactgtgttcagtaatatgaaccataaggatattctttcttggactgctatgatacaaggttgggcggttcatggacgctttcatcaggctatccaatgttttagacaaatgatgtattccggagagaagccagatgaggttgtgtttctcgcggttctaactgcatgcttgaactcaagcgaagttgacctgggacttaatttctttgatagcatgaggcttgactatgcaattgaacccacgctgaaacattatgtgttagtcgttgatctgctaggtagagcagggaagttgaacgaagcacatgagcttgtagaaaatatgccgataaatcctgatcttacaacatgggctgcactctatcgtgcttgcaaagcgcacaagggttatagaagggctgaaagtgtgtcacaaaatcttttggagcttgatccagagctttgtggtagttacattttcttagacaaaacacatgcgtctaaagggaacattcaagatgtagagaaaagaagattatcattgcagaagagaatcaaagaaagatcattgggatggagttatatcgaattggacggtcaactgaacaaattttcagctggtgattattctcataagctaacacaggagattggtttgaagcttgatgagatcatatcgcttgccattcagaaaggatacaatccaggagctgattggtcaattcatgacattgaagaagaagagaaggaaaatgttacgggaatccatagtgagaaactggctcttacacttgggtttctaagaactgctcctgggaccacgataaggatcattaagaaccttagaatctgcggagattgtcattctttaatgaaatatgttagtaagatcagccaaagagatattctactgagagatgcaagacagtttcatcatttcaaagatggaagatgttcatgtggtgattattggtga

SEQ ID NO: 80723 - protein, 665 aa, Arabidopsis thaliana
  peptide (1)..(665): Ceres Seq. ID no. 12656982
MKSLSVIFKPKSSPAKIYFPADRQASPDESHFISLIHACKDTASLRHVHAQILRRGVLSSRVAAQLVSCSSLLKSPDYSLSIFRNSEERNPFVLNALIRGLTENARFESSVRHFILMLRLGVKPDRLTFPFVLKSNSKLGFRWLGRALHAATLKNFVDCDSFVRLSLVDMYAKTGQLKHAFQVFEESPDRIKKESILIWNVLINGYCRAKDMHMATTLFRSMPERNSGSWSTLIKGYVDSGELNRAKQLFELMPEKNVVSWTTLINGFSQTGDYETAISTYFEMLEKGLKPNEYTIAAVLSACSKSGALGSGIRIHGYILDNGIKLDRAIGTALVDMYAKCGELDCAATVFSNMNHKDILSWTAMIQGWAVHGRFHQAIQCFRQMMYSGEKPDEVVFLAVLTACLNSSEVDLGLNFFDSMRLDYAIEPTLKHYVLVVDLLGRAGKLNEAHELVENMPINPDLTTWAALYRACKAHKGYRRAESVSQNLLELDPELCGSYIFLDKTHASKGNIQDVEKRRLSLQKRIKERSLGWSYIELDGQLNKFSAGDYSHKLTQEIGLKLDEIISLAIQKGYNPGADWSIHDIEEEEKENVTGIHSEKLALTLGFLRTAPGTTIRIIKNLRICGDCHSLMKYVSKISQRDILLRDARQFHHFKDGRCSCGDYW

SEQ ID NO: 80724 - protein, 549 aa, Arabidopsis thaliana
  peptide (1)..(549): Ceres Seq. ID no. 12656983
MLRLGVKPDRLTFPFVLKSNSKLGFRWLGRALHAATLKNFVDCDSFVRLSLVDMYAKTGQLKHAFQVFEESPDRIKKESILIWNVLINGYCRAKDMHMATTLFRSMPERNSGSWSTLIKGYVDSGELNRAKQLFELMPEKNVVSWTTLINGFSQTGDYETAISTYFEMLEKGLKPNEYTIAAVLSACSKSGALGSGIRIHGYILDNGIKLDRAIGTALVDMYAKCGELDCAATVFSNMNHKDILSWTAMIQGWAVHGRFHQAIQCFRQMMYSGEKPDEVVFLAVLTACLNSSEVDLGLNFFDSMRLDYAIEPTLKHYVLVVDLLGRAGKLNEAHELVENMPINPDLTTWAALYRACKAHKGYRRAESVSQNLLELDPELCGSYIFLDKTHASKGNIQDVEKRRLSLQKRIKERSLGWSYIELDGQLNKFSAGDYSHKLTQEIGLKLDEIISLAIQKGYNPGADWSIHDIEEEEKENVTGIHSEKLALTLGFLRTAPGTTIRIIKNLRICGDCHSLMKYVSKISQRDILLRDARQFHHFKDGRCSCGDYW

SEQ ID NO: 80725 - protein, 496 aa, Arabidopsis thaliana
  peptide (1)..(496): Ceres Seq. ID no. 12656984
MYAKTGQLKHAFQVFEESPDRIKKESILIWNVLINGYCRAKDMHMATTLFRSMPERNSGSWSTLIKGYVDSGELNRAKQLFELMPEKNVVSWTTLINGFSQTGDYETAISTYFEMLEKGLKPNEYTIAAVLSACSKSGALGSGIRIHGYILDNGIKLDRAIGTALVDMYAKCGELDCAATVFSNMNHKDILSWTAMIQGWAVHGRFHQAIQCFRQMMYSGEKPDEVVFLAVLTACLNSSEVDLGLNFFDSMRLDYAIEPTLKHYVLVVDLLGRAGKLNEAHELVENMPINPDLTTWAALYRACKAHKGYRRAESVSQNLLELDPELCGSYIFLDKTHASKGNIQDVEKRRLSLQKRIKERSLGWSYIELDGQLNKFSAGDYSHKLTQEIGLKLDEIISLAIQKGYNPGADWSIHDIEEEEKENVTGIHSEKLALTLGFLRTAPGTTIRIIKNLRICGDCHSLMKYVSKISQRDILLRDARQFHHFKDGRCSCGDYW

SEQ ID NO: 80726 - DNA, 1108 bp, Arabidopsis thaliana
  misc_feature (1)..(1108): Ceres Seq. ID no. 12656989
  misc_feature (1)..(1108): Ortholog of  Ceres SEQ ID NO 14316404 as cited in SEQ ID NO 57641
  misc_feature (1)..(1108): Ortholog of  Ceres SEQ ID NO 12611159 as cited in SEQ ID NO 59821
  misc_feature (1)..(1108): Ortholog of  Ceres SEQ ID NO 15180029 as cited in SEQ ID NO 0
agtactgatcagggaaaatacatcaaatagtgaccaccctgctggttaatcaacaccaagagaccttgtaatatataagttaggaagatgagagagaagtgggaaatgaaaagagatgaaatgggacatcgatgttgtggaaaacacaaagtgaagagaggtctttggtctccagaggaagacgagaagcttcttcgttatatcaccactcatggtcatcctagttggagttccgttccaaagcttgccgggttgcagagatgtgggaagagttgcagattaaggtggataaactatctaaggcctgatctgaggagaggttcgtttaatgaggaagaagagcagattatcatcgacgtacatcgtattcttggtaacaaatgggctcagattgctaagcacttacctggacgcactgataatgaagtcaagaacttttggaactcatgcattaagaagaaacttctttctcaaggcttagatccttctacacataatcttatgccttcacacaaaagatcttcttcttcaaacaataataatatccccaagccaaacaaaacgacgtccatcatgaagaaccctactgatcttgatcaatcaaccactgctttttcaatcacaaacatcaatccacccacttccactaaaccaaacaaacttaaatctcctaaccagactacaatcccatctcaaaccgtgatccctatcaatgataacatgtcaagtactcaaaccatgatccctatcaatgatcccatgtcaagtcttttagatgatgagaatatgattcctcactggtcagatgttgatggaatggcgatccacgaagctccgatgttgcctagtgataaggcagtagtgggagtggatgatgatgatctcaacatggacattttgtttaacactccttcttcttctgcttttgatcctgattttgcttccattttctcctctgcaatgtctatcgatttcaatcccatggatgatcttggcagctggaccttttagcttttactctacaatattttcattttctcaagtgtatatatatgaataattgccactttctgcttttcactagttttgaaaagctgagaattttcca

SEQ ID NO: 80727 - protein, 307 aa, Arabidopsis thaliana
  peptide (1)..(307): Ceres Seq. ID no. 12656990
MREKWEMKRDEMGHRCCGKHKVKRGLWSPEEDEKLLRYITTHGHPSWSSVPKLAGLQRCGKSCRLRWINYLRPDLRRGSFNEEEEQIIIDVHRILGNKWAQIAKHLPGRTDNEVKNFWNSCIKKKLLSQGLDPSTHNLMPSHKRSSSSNNNNIPKPNKTTSIMKNPTDLDQSTTAFSITNINPPTSTKPNKLKSPNQTTIPSQTVIPINDNMSSTQTMIPINDPMSSLLDDENMIPHWSDVDGMAIHEAPMLPSDKAVVGVDDDDLNMDILFNTPSSSAFDPDFASIFSSAMSIDFNPMDDLGSWTF

SEQ ID NO: 80728 - protein, 301 aa, Arabidopsis thaliana
  peptide (1)..(301): Ceres Seq. ID no. 12656991
MKRDEMGHRCCGKHKVKRGLWSPEEDEKLLRYITTHGHPSWSSVPKLAGLQRCGKSCRLRWINYLRPDLRRGSFNEEEEQIIIDVHRILGNKWAQIAKHLPGRTDNEVKNFWNSCIKKKLLSQGLDPSTHNLMPSHKRSSSSNNNNIPKPNKTTSIMKNPTDLDQSTTAFSITNINPPTSTKPNKLKSPNQTTIPSQTVIPINDNMSSTQTMIPINDPMSSLLDDENMIPHWSDVDGMAIHEAPMLPSDKAVVGVDDDDLNMDILFNTPSSSAFDPDFASIFSSAMSIDFNPMDDLGSWTF

SEQ ID NO: 80729 - protein, 296 aa, Arabidopsis thaliana
  peptide (1)..(296): Ceres Seq. ID no. 12656992
MGHRCCGKHKVKRGLWSPEEDEKLLRYITTHGHPSWSSVPKLAGLQRCGKSCRLRWINYLRPDLRRGSFNEEEEQIIIDVHRILGNKWAQIAKHLPGRTDNEVKNFWNSCIKKKLLSQGLDPSTHNLMPSHKRSSSSNNNNIPKPNKTTSIMKNPTDLDQSTTAFSITNINPPTSTKPNKLKSPNQTTIPSQTVIPINDNMSSTQTMIPINDPMSSLLDDENMIPHWSDVDGMAIHEAPMLPSDKAVVGVDDDDLNMDILFNTPSSSAFDPDFASIFSSAMSIDFNPMDDLGSWTF

SEQ ID NO: 80730 - DNA, 6135 bp, Arabidopsis thaliana
  misc_feature (1)..(6135): Ceres Seq. ID no. 12657005
  misc_feature (1)..(6135): Ortholog of  Ceres SEQ ID NO 14313034 as cited in SEQ ID NO 54449
atggcgtctaaaggtggtaaatctaaacctgatatagtaatggcgtccaagagtgggaaatctaaacctgataatgaatccagagctaagcgtcagaagacgctcgaagctcctaaagaaccacgtcgtcctaaaactcactgggaccatgtattggaggagatggcttggctgtcaaaggactttgagtctgagaggaaatggaagctggcgcaggcgaagaaggttgctttgagagccagcaaaggaatgctagatcaggcatctagggaagaaaggaagctaaaggaagaagaacagcgacttcggaaagtagccctcaatatctcgaaagacatgaaaaagttttggatgaaagttgagaagctggtgctttacaagcatcagttggtacgcaatgagaagaagaagaaggctatggacaagcaacttgaatttctgttaggccaaactgagaggtactcaaccatgttggcagaaaatttagtggagccttataaacagggccaaaatactccttcaaaacctctactaactatcgaatcaaaaagtgatgaggagagggcagaacagatacctccagagataaattcttgtcttgaatcaggaagtcctgaactcgatgaggattatgatctaaaatctgaggatgagaccgatgaaaaacacttcaccaaacgtgaaagacaggaagagttggaagctttgcaaaatgaagtggatctaccagttgaggagctgctcagacgttatacctctggaagagttagccgagaaaccagcccagtaaaagatgaaaatgaggacaatctgacctcagttagccgagtaaccagcccagtaaaagatgaaaatcaggacaatctggcctcagtaggtcaagatcatggagaggacaagaacaatcttgcagcttctgaagaaactgaagggaacccaagtgttcgtcgttctaatgatagctatggtcatttggcaatatccgagacccattcacatgaccttgagccaggcatgacgactgcatctgtgaagtccagaaaggaagatcatacctatgattttaacgatgaacaggaagatgttgactttgttcttgccaatggtgaggaaaaggatgatgaggcgacattggctgtcgaagaggaactggcgaaagcagataatgaagatcatgtcgaagagattgccctgctgcaaaaagagagtgaaatgcctattgaagtactacttgcaaggtataaggaggatttcggtggcaaggatatatctgaggatgaatctgaatcttcatttgctgtatctgaagactctatagtagactctgacgaaaataggcagcaagctgatttagatgatgacaacgttgatttaacagaatgtaagctagatccagagccttgctcagaaaatgttgaaggcacattccatgaagtagcagaagataatgataaagatagtagtgataaaattgctgatgcagcagcagcagcaagatctgcccagccaactggatttacatactccacaacaaaagttcgaacgaaactgccgtttctacttaagcattctctgcgtgagtaccaacacattggtttggactggcttgtcacgatgtatgagaaaaagttgaacggtattctggctgatgaaatgggtcttggaaagacaattatgaccattgctcttctagctcaccttgcatgtgataagggaatatggggtccccatctgattgtggttcctacaagtgtgatgcttaattgggagactgagtttcttaaatggtgtcctgcatttaaaattctcacctactttggtagtgcaaaggagcggaaactcaagagacaaggatggatgaagcttaactcatttcatgtatgcataacaacctataggctagttattcaggacagtaaaatgttcaagcgcaagaagtggaaatacttgattcttgacgaagcccatttaattaagaattggaagtctcagagatggcagacactattgaacttcaattctaaacgcagaattttgttgactggtacacccctgcagaatgatcttatggaactgtggtcacttatgcactttctgatgccacatgtctttcagtctcaccaggaattcaaagactggttctgtaacccaatagcagggatggtcgagggacaagaaaaaatcaacaaagaagttattgatcgcttacataatgtcctccgtcctttccttctacggcgcctaaaaagggatgtggagaagcaacttccttcgaaacatgagcatgttattttctgtagactgtctaagaggcagcgcaacttgtatgaggacttcatagcaagcacagaaacacaggctacgcttaccagtggaagcttttttgggatgataagtatcataatgcagttgcggaaagtttgtaatcatcctgatctctttgagggtcgtcctattgtaagttcttttgatatggctggcattgatgtgcagttgagttcaacaatctgttcgctactattggaaagtccgttttccaaggttgatcttgaggctttgggattcttattcacccatcttgatttttctatgacttcttgggaaggagatgagatcaaagctatttcaacaccctcagaattaatcaaacagcgtgtgaacttgaaggatgatctagaagcaatccctttgagtccaaaaaaccgcaaaaatctgcaagggacaaatatttttgaagaaattcgtaaggctgtctttgaggaaaggatacaagaatctaaggatcgggcagcagccattgcatggtggaattctttgagatgccagagaaagccgacttactctacatcactaagaactcttttaaccattaagggtcctcttgatgatcttaaagctaactgttcatcttacatgtattcatcaatcctcgctgacatagtcctttcaccaatcgagcgttttcagaagatgattgagctagttgaagctttcacatttgcgattccagctgcacgagtgccttcacctacttgctggtgcagtaaaagtgactctcctgtttttcttagtccatcgtacaaggaaaaagttacagatttattgtcacctcttttatctccaattagacctgcaatcgttaggagacaagtatattttccagataggcgactgatacagtttgattgtggtaagctgcaggagcttgctatgttattgaggaaattaaaatttgggggtcacagagcgttgatattcacgcaaatgaccaagatgcttgacgtcttggaggctttcattaatttatatggttatacctacatgcgtcttgatggctctacacctccagaagagaggcagacgttaatgcagcggtttaatacaaatcccaagatctttcttttcattttgtcaacccgaagtgggggcgttggcatcaaccttgtgggtgcggacacagttatattctatgacagtgactggaatcctgctatggatcaacaagctcaagatcgctgccacaggataggtcagacacgtgaagtgcatatataccggttgataagtgagagcaccattgaggagaatatcttaaagaaagcaaaccagaagcgtgtgcttgataacctagtaattcaaaacggtgagtataacaccgaatttttcaagaagctcgatcccatggaattgttctctgggcataaggctctgactacaaaggatgaaaaggaaacaagcaagcattgtggggcggatatacctctatcaaatgcagatgttgaggctgctctaaaacaggccgaagatgaggcagattatatggctctcaaaagagtagaacaagaagaagctgtggacaatcaagagttcacagaagaacctgtagagagaccagaagacgatgagctagtaaatgaagatgacataaaggctgatgagcctgctgatcaaggtttagttgcagcagggccggccaaagaagaaatgtcattgttacatagtgatatcagggatgagagagctgttatcactacttcaagccaagaagatgacactgatgtattagatgatgtcaagcaaatggctgcagcagcggctgatgctggacaagctatctcatcttttgagaatcagctacgtcctattgatagatatgcgattagatttttagagctttgggaccccatcattgttgaggctgcaatggaaaatgaagcaggatttgaagagaaagaatgggaacttgaccacattgagaagtacaaggaggaaatggaagctgagattgatgatggggaagagcctcttgtttacgagaaatgggatgctgattttgcaactgaggcatacaggcagcaagtggaagtcttagctcagcaccagttaatggaagatttggaaaatgaagctagagagagggaagcggcagaggtggctgaaatggttttgacacagaacgaaagtgctcatgtactgaagcctaagaagaagaaaaaggcgaagaaagccaaatataaatccctgaagaaaggatcactggctgccgaatcaaaacatgtgaagtcagttgtgaaaattgaagattctactgatgatgataatgaagaattcggctatgtgagtagcagtgactcggatatggttacaccgctttcgcggatgcatatgaagggcaagaaaagagatttaattgttgacactgatgaagagaagacctcaaagaagaaagcaaagaagcacaagaagtctctcccgaattcagatatcaaatataagcaaacaagtgcactacttgatgaactggaaccatcaaagccgtctgacagtatggttgttgataatgagttgaaattgacgaacaggggtaaaactgtagggaaaaaattcatcacttccatgccaataaagcgtgttcttatgatcaagccagagaaattgaagaaaggaaatctgtggtctagagattgtgttccctcgcctgattcttggttgccgcaggaagatgctatattgtgtgccatggttcatgaatatgggcctaactggaattttgttagcggaactctttatggaatgacagctggtggggcttacagaggacggtatcggcatcctgcatattgttgtgagagatatagagagcttattcaacgacatattttgtctgcttccgacagtgcagtgaacgagaagaacctcaacacaggttctgggaaggctctccttaaagtcactgaggaaaatattcggacactcctaaatgttgcagctgagcagccagatacggagatgctcctacaaaaacatttttcttgcttgctgtcatcaatttggaggacgtctacccgcactgggaatgatcaaatgctctccttaaacagtcctattttcaacagacagtttatgggttccgtgaatcacacccaagatttagctagaaagccttggcaggggatgaaggtcaccagcttaagtagaaagttgttagaatccgctctccaggattctggcccgagtcagccagacaatactatttcccgttctaggttgcaggagactcaacctatcaataaattgggattagagttaaccttggaattcccacgtggcaatgatgattccctgaatcagtttccaccgatgattagtctgtccattgatgggtcagattcattaaattatgtgaacgagcccccaggggaagatgttctaaaaggttctagggttgctgcagagaaccgttacaggaatgctgcaaatgcttgtattgaagattcatttggatgggcttcaaacacgttcccagccaatgatctgaagtcaagaacaggcacgaaagcacagtccctggggaaacacaagctatccgcctcagactcagccaagtctacaaaaagcaaacaccgcaaactcttagcagagcaattggaaggggcatgggttaggccaaatgatccgaatctcaagtttgatttcacacctggtgatagggaggaggaggaggagcaggaggtggatgagaaagcgaattcagcagagatagagatgataagctgttcacaatggtatgatccattctttacctcaggccttgatgattgctcattagcttcggatatctcagaaatagagtag

SEQ ID NO: 80731 - protein, 2044 aa, Arabidopsis thaliana
  peptide (1)..(2044): Ceres Seq. ID no. 12657006
MASKGGKSKPDIVMASKSGKSKPDNESRAKRQKTLEAPKEPRRPKTHWDHVLEEMAWLSKDFESERKWKLAQAKKVALRASKGMLDQASREERKLKEEEQRLRKVALNISKDMKKFWMKVEKLVLYKHQLVRNEKKKKAMDKQLEFLLGQTERYSTMLAENLVEPYKQGQNTPSKPLLTIESKSDEERAEQIPPEINSCLESGSPELDEDYDLKSEDETDEKHFTKRERQEELEALQNEVDLPVEELLRRYTSGRVSRETSPVKDENEDNLTSVSRVTSPVKDENQDNLASVGQDHGEDKNNLAASEETEGNPSVRRSNDSYGHLAISETHSHDLEPGMTTASVKSRKEDHTYDFNDEQEDVDFVLANGEEKDDEATLAVEEELAKADNEDHVEEIALLQKESEMPIEVLLARYKEDFGGKDISEDESESSFAVSEDSIVDSDENRQQADLDDDNVDLTECKLDPEPCSENVEGTFHEVAEDNDKDSSDKIADAAAAARSAQPTGFTYSTTKVRTKLPFLLKHSLREYQHIGLDWLVTMYEKKLNGILADEMGLGKTIMTIALLAHLACDKGIWGPHLIVVPTSVMLNWETEFLKWCPAFKILTYFGSAKERKLKRQGWMKLNSFHVCITTYRLVIQDSKMFKRKKWKYLILDEAHLIKNWKSQRWQTLLNFNSKRRILLTGTPLQNDLMELWSLMHFLMPHVFQSHQEFKDWFCNPIAGMVEGQEKINKEVIDRLHNVLRPFLLRRLKRDVEKQLPSKHEHVIFCRLSKRQRNLYEDFIASTETQATLTSGSFFGMISIIMQLRKVCNHPDLFEGRPIVSSFDMAGIDVQLSSTICSLLLESPFSKVDLEALGFLFTHLDFSMTSWEGDEIKAISTPSELIKQRVNLKDDLEAIPLSPKNRKNLQGTNIFEEIRKAVFEERIQESKDRAAAIAWWNSLRCQRKPTYSTSLRTLLTIKGPLDDLKANCSSYMYSSILADIVLSPIERFQKMIELVEAFTFAIPAARVPSPTCWCSKSDSPVFLSPSYKEKVTDLLSPLLSPIRPAIVRRQVYFPDRRLIQFDCGKLQELAMLLRKLKFGGHRALIFTQMTKMLDVLEAFINLYGYTYMRLDGSTPPEERQTLMQRFNTNPKIFLFILSTRSGGVGINLVGADTVIFYDSDWNPAMDQQAQDRCHRIGQTREVHIYRLISESTIEENILKKANQKRVLDNLVIQNGEYNTEFFKKLDPMELFSGHKALTTKDEKETSKHCGADIPLSNADVEAALKQAEDEADYMALKRVEQEEAVDNQEFTEEPVERPEDDELVNEDDIKADEPADQGLVAAGPAKEEMSLLHSDIRDERAVITTSSQEDDTDVLDDVKQMAAAAADAGQAISSFENQLRPIDRYAIRFLELWDPIIVEAAMENEAGFEEKEWELDHIEKYKEEMEAEIDDGEEPLVYEKWDADFATEAYRQQVEVLAQHQLMEDLENEAREREAAEVAEMVLTQNESAHVLKPKKKKKAKKAKYKSLKKGSLAAESKHVKSVVKIEDSTDDDNEEFGYVSSSDSDMVTPLSRMHMKGKKRDLIVDTDEEKTSKKKAKKHKKSLPNSDIKYKQTSALLDELEPSKPSDSMVVDNELKLTNRGKTVGKKFITSMPIKRVLMIKPEKLKKGNLWSRDCVPSPDSWLPQEDAILCAMVHEYGPNWNFVSGTLYGMTAGGAYRGRYRHPAYCCERYRELIQRHILSASDSAVNEKNLNTGSGKALLKVTEENIRTLLNVAAEQPDTEMLLQKHFSCLLSSIWRTSTRTGNDQMLSLNSPIFNRQFMGSVNHTQDLARKPWQGMKVTSLSRKLLESALQDSGPSQPDNTISRSRLQETQPINKLGLELTLEFPRGNDDSLNQFPPMISLSIDGSDSLNYVNEPPGEDVLKGSRVAAENRYRNAANACIEDSFGWASNTFPANDLKSRTGTKAQSLGKHKLSASDSAKSTKSKHRKLLAEQLEGAWVRPNDPNLKFDFTPGDREEEEEQEVDEKANSAEIEMISCSQWYDPFFTSGLDDCSLASDISEIE

SEQ ID NO: 80732 - protein, 2031 aa, Arabidopsis thaliana
  peptide (1)..(2031): Ceres Seq. ID no. 12657007
MASKSGKSKPDNESRAKRQKTLEAPKEPRRPKTHWDHVLEEMAWLSKDFESERKWKLAQAKKVALRASKGMLDQASREERKLKEEEQRLRKVALNISKDMKKFWMKVEKLVLYKHQLVRNEKKKKAMDKQLEFLLGQTERYSTMLAENLVEPYKQGQNTPSKPLLTIESKSDEERAEQIPPEINSCLESGSPELDEDYDLKSEDETDEKHFTKRERQEELEALQNEVDLPVEELLRRYTSGRVSRETSPVKDENEDNLTSVSRVTSPVKDENQDNLASVGQDHGEDKNNLAASEETEGNPSVRRSNDSYGHLAISETHSHDLEPGMTTASVKSRKEDHTYDFNDEQEDVDFVLANGEEKDDEATLAVEEELAKADNEDHVEEIALLQKESEMPIEVLLARYKEDFGGKDISEDESESSFAVSEDSIVDSDENRQQADLDDDNVDLTECKLDPEPCSENVEGTFHEVAEDNDKDSSDKIADAAAAARSAQPTGFTYSTTKVRTKLPFLLKHSLREYQHIGLDWLVTMYEKKLNGILADEMGLGKTIMTIALLAHLACDKGIWGPHLIVVPTSVMLNWETEFLKWCPAFKILTYFGSAKERKLKRQGWMKLNSFHVCITTYRLVIQDSKMFKRKKWKYLILDEAHLIKNWKSQRWQTLLNFNSKRRILLTGTPLQNDLMELWSLMHFLMPHVFQSHQEFKDWFCNPIAGMVEGQEKINKEVIDRLHNVLRPFLLRRLKRDVEKQLPSKHEHVIFCRLSKRQRNLYEDFIASTETQATLTSGSFFGMISIIMQLRKVCNHPDLFEGRPIVSSFDMAGIDVQLSSTICSLLLESPFSKVDLEALGFLFTHLDFSMTSWEGDEIKAISTPSELIKQRVNLKDDLEAIPLSPKNRKNLQGTNIFEEIRKAVFEERIQESKDRAAAIAWWNSLRCQRKPTYSTSLRTLLTIKGPLDDLKANCSSYMYSSILADIVLSPIERFQKMIELVEAFTFAIPAARVPSPTCWCSKSDSPVFLSPSYKEKVTDLLSPLLSPIRPAIVRRQVYFPDRRLIQFDCGKLQELAMLLRKLKFGGHRALIFTQMTKMLDVLEAFINLYGYTYMRLDGSTPPEERQTLMQRFNTNPKIFLFILSTRSGGVGINLVGADTVIFYDSDWNPAMDQQAQDRCHRIGQTREVHIYRLISESTIEENILKKANQKRVLDNLVIQNGEYNTEFFKKLDPMELFSGHKALTTKDEKETSKHCGADIPLSNADVEAALKQAEDEADYMALKRVEQEEAVDNQEFTEEPVERPEDDELVNEDDIKADEPADQGLVAAGPAKEEMSLLHSDIRDERAVITTSSQEDDTDVLDDVKQMAAAAADAGQAISSFENQLRPIDRYAIRFLELWDPIIVEAAMENEAGFEEKEWELDHIEKYKEEMEAEIDDGEEPLVYEKWDADFATEAYRQQVEVLAQHQLMEDLENEAREREAAEVAEMVLTQNESAHVLKPKKKKKAKKAKYKSLKKGSLAAESKHVKSVVKIEDSTDDDNEEFGYVSSSDSDMVTPLSRMHMKGKKRDLIVDTDEEKTSKKKAKKHKKSLPNSDIKYKQTSALLDELEPSKPSDSMVVDNELKLTNRGKTVGKKFITSMPIKRVLMIKPEKLKKGNLWSRDCVPSPDSWLPQEDAILCAMVHEYGPNWNFVSGTLYGMTAGGAYRGRYRHPAYCCERYRELIQRHILSASDSAVNEKNLNTGSGKALLKVTEENIRTLLNVAAEQPDTEMLLQKHFSCLLSSIWRTSTRTGNDQMLSLNSPIFNRQFMGSVNHTQDLARKPWQGMKVTSLSRKLLESALQDSGPSQPDNTISRSRLQETQPINKLGLELTLEFPRGNDDSLNQFPPMISLSIDGSDSLNYVNEPPGEDVLKGSRVAAENRYRNAANACIEDSFGWASNTFPANDLKSRTGTKAQSLGKHKLSASDSAKSTKSKHRKLLAEQLEGAWVRPNDPNLKFDFTPGDREEEEEQEVDEKANSAEIEMISCSQWYDPFFTSGLDDCSLASDISEIE

SEQ ID NO: 80733 - protein, 1990 aa, Arabidopsis thaliana
  peptide (1)..(1990): Ceres Seq. ID no. 12657008
MAWLSKDFESERKWKLAQAKKVALRASKGMLDQASREERKLKEEEQRLRKVALNISKDMKKFWMKVEKLVLYKHQLVRNEKKKKAMDKQLEFLLGQTERYSTMLAENLVEPYKQGQNTPSKPLLTIESKSDEERAEQIPPEINSCLESGSPELDEDYDLKSEDETDEKHFTKRERQEELEALQNEVDLPVEELLRRYTSGRVSRETSPVKDENEDNLTSVSRVTSPVKDENQDNLASVGQDHGEDKNNLAASEETEGNPSVRRSNDSYGHLAISETHSHDLEPGMTTASVKSRKEDHTYDFNDEQEDVDFVLANGEEKDDEATLAVEEELAKADNEDHVEEIALLQKESEMPIEVLLARYKEDFGGKDISEDESESSFAVSEDSIVDSDENRQQADLDDDNVDLTECKLDPEPCSENVEGTFHEVAEDNDKDSSDKIADAAAAARSAQPTGFTYSTTKVRTKLPFLLKHSLREYQHIGLDWLVTMYEKKLNGILADEMGLGKTIMTIALLAHLACDKGIWGPHLIVVPTSVMLNWETEFLKWCPAFKILTYFGSAKERKLKRQGWMKLNSFHVCITTYRLVIQDSKMFKRKKWKYLILDEAHLIKNWKSQRWQTLLNFNSKRRILLTGTPLQNDLMELWSLMHFLMPHVFQSHQEFKDWFCNPIAGMVEGQEKINKEVIDRLHNVLRPFLLRRLKRDVEKQLPSKHEHVIFCRLSKRQRNLYEDFIASTETQATLTSGSFFGMISIIMQLRKVCNHPDLFEGRPIVSSFDMAGIDVQLSSTICSLLLESPFSKVDLEALGFLFTHLDFSMTSWEGDEIKAISTPSELIKQRVNLKDDLEAIPLSPKNRKNLQGTNIFEEIRKAVFEERIQESKDRAAAIAWWNSLRCQRKPTYSTSLRTLLTIKGPLDDLKANCSSYMYSSILADIVLSPIERFQKMIELVEAFTFAIPAARVPSPTCWCSKSDSPVFLSPSYKEKVTDLLSPLLSPIRPAIVRRQVYFPDRRLIQFDCGKLQELAMLLRKLKFGGHRALIFTQMTKMLDVLEAFINLYGYTYMRLDGSTPPEERQTLMQRFNTNPKIFLFILSTRSGGVGINLVGADTVIFYDSDWNPAMDQQAQDRCHRIGQTREVHIYRLISESTIEENILKKANQKRVLDNLVIQNGEYNTEFFKKLDPMELFSGHKALTTKDEKETSKHCGADIPLSNADVEAALKQAEDEADYMALKRVEQEEAVDNQEFTEEPVERPEDDELVNEDDIKADEPADQGLVAAGPAKEEMSLLHSDIRDERAVITTSSQEDDTDVLDDVKQMAAAAADAGQAISSFENQLRPIDRYAIRFLELWDPIIVEAAMENEAGFEEKEWELDHIEKYKEEMEAEIDDGEEPLVYEKWDADFATEAYRQQVEVLAQHQLMEDLENEAREREAAEVAEMVLTQNESAHVLKPKKKKKAKKAKYKSLKKGSLAAESKHVKSVVKIEDSTDDDNEEFGYVSSSDSDMVTPLSRMHMKGKKRDLIVDTDEEKTSKKKAKKHKKSLPNSDIKYKQTSALLDELEPSKPSDSMVVDNELKLTNRGKTVGKKFITSMPIKRVLMIKPEKLKKGNLWSRDCVPSPDSWLPQEDAILCAMVHEYGPNWNFVSGTLYGMTAGGAYRGRYRHPAYCCERYRELIQRHILSASDSAVNEKNLNTGSGKALLKVTEENIRTLLNVAAEQPDTEMLLQKHFSCLLSSIWRTSTRTGNDQMLSLNSPIFNRQFMGSVNHTQDLARKPWQGMKVTSLSRKLLESALQDSGPSQPDNTISRSRLQETQPINKLGLELTLEFPRGNDDSLNQFPPMISLSIDGSDSLNYVNEPPGEDVLKGSRVAAENRYRNAANACIEDSFGWASNTFPANDLKSRTGTKAQSLGKHKLSASDSAKSTKSKHRKLLAEQLEGAWVRPNDPNLKFDFTPGDREEEEEQEVDEKANSAEIEMISCSQWYDPFFTSGLDDCSLASDISEIE

SEQ ID NO: 80734 - DNA, 399 bp, Arabidopsis thaliana
  misc_feature (1)..(399): Ceres Seq. ID no. 12657009
  misc_feature (1)..(399): Ortholog of  Ceres SEQ ID NO 13504224 as cited in SEQ ID NO 137
  misc_feature (1)..(399): Ortholog of  Ceres SEQ ID NO 12635820 as cited in SEQ ID NO 0
atgaagcaactaatccgtcgtctctctcgcgtcgctgattccgctcaatacagtctcctccgttccgattcacagcgacctagccgccgttccgaatccttcctccgttcttcggtgactcgccgctcaaagaagcaaacctcctctgttcccgaaggacacgtaccggtctacgtaggtgacgagatggagaggttcgtcgttagcgcggagctacttaaccatccggttttcatcggtttactaaaccgatctgctcaagagtatggttacgagcaaaaaggagttctacaaatcccttgccatgtccttgtcttcgaacgaatcatggaatcgcttcgtcttggacttccggtaccgattgatgttcaggatctaatcggtgacgggactatttga

SEQ ID NO: 80735 - protein, 132 aa, Arabidopsis thaliana
  peptide (1)..(132): Ceres Seq. ID no. 12657010
MKQLIRRLSRVADSAQYSLLRSDSQRPSRRSESFLRSSVTRRSKKQTSSVPEGHVPVYVGDEMERFVVSAELLNHPVFIGLLNRSAQEYGYEQKGVLQIPCHVLVFERIMESLRLGLPVPIDVQDLIGDGTI

SEQ ID NO: 80736 - protein, 70 aa, Arabidopsis thaliana
  peptide (1)..(70): Ceres Seq. ID no. 12657011
MERFVVSAELLNHPVFIGLLNRSAQEYGYEQKGVLQIPCHVLVFERIMESLRLGLPVPIDVQDLIGDGTI

SEQ ID NO: 80737 - DNA, 1074 bp, Arabidopsis thaliana
  misc_feature (1)..(1074): Ceres Seq. ID no. 12657019
  misc_feature (1)..(1074): Ortholog of  Ceres SEQ ID NO 12578315 as cited in SEQ ID NO 62451
  misc_feature (1)..(1074): Ortholog of  Ceres SEQ ID NO 13597295 as cited in SEQ ID NO 63743
  misc_feature (1)..(1074): Ortholog of  Ceres SEQ ID NO 12617090 as cited in SEQ ID NO 64005
  misc_feature (1)..(1074): Ortholog of  Ceres SEQ ID NO 13597439 as cited in SEQ ID NO 64081
  misc_feature (1)..(1074): Ortholog of  Ceres SEQ ID NO 13597233 as cited in SEQ ID NO 64370
  misc_feature (1)..(1074): Ortholog of  Ceres SEQ ID NO 13584577 as cited in SEQ ID NO 65298
atgggtatcaatttcgaggaccaaaccacattgttcaatttcgtggtcagagaaggtaacggcgtgaaaggaatgatagactcgggcctctctagtgttccacggcccttcgtccagcctctctctgagcgaatcccgacccaaaaagcccttacgtgtgaggctacccagccaatcgatctttccaacctagacggcccacaacacaaggaggtggccaagcagattgtcgaagctgccgagacacttggcttcttccaggtggtgaaccatggtgtttcggtggagctgctggagttgctaaaatcgtcggctcatgagttttttgcacaagctcctgaggaaaaatcgatgtacctgaaggaagtgagtccaagcaagctggttaagtacggaacgagctttgtgccagataaggagaaggcgattgagtggaaggattatgtgagcatgctttacaccaatgacagtgaggctcttcaacactggcctcaaccatgcagggaggtggcacttgagttcctaaattcatcgatggaaatggtgaaaaatgtagttaacattctgatggagaatgttggagtgacactagaagaagagaaaatgaatggtttgatgggaaccaagatggtcaacatgaactactaccctacttgtccgagccccgagctgaccgtcggcgtcggccgtcactcagacatgggaatgttgaccgttttattacaagacggcattggtggtctctacgttaaactagacaacggtgaatgggccgagatccctcctgtccatggagctttggtcatcaacatcggcgacactttgcagattttgagcaatgggaagtacaaaagtgcggagcatagggttcgaaccacaaacatcggatcaagagtctctgtgcccattttcacggcaccaaatccctcccagaaggtcggtcccttgccggaagttgtgaaacgcgacggagtggctcgttacaaggagtttttgtttcaagactacatgaataacttcttcggccaaccacacgacggcaaaaaatctctcgacttcgcacgtgccgagtga

SEQ ID NO: 80738 - protein, 357 aa, Arabidopsis thaliana
  peptide (1)..(357): Ceres Seq. ID no. 12657020
MGINFEDQTTLFNFVVREGNGVKGMIDSGLSSVPRPFVQPLSERIPTQKALTCEATQPIDLSNLDGPQHKEVAKQIVEAAETLGFFQVVNHGVSVELLELLKSSAHEFFAQAPEEKSMYLKEVSPSKLVKYGTSFVPDKEKAIEWKDYVSMLYTNDSEALQHWPQPCREVALEFLNSSMEMVKNVVNILMENVGVTLEEEKMNGLMGTKMVNMNYYPTCPSPELTVGVGRHSDMGMLTVLLQDGIGGLYVKLDNGEWAEIPPVHGALVINIGDTLQILSNGKYKSAEHRVRTTNIGSRVSVPIFTAPNPSQKVGPLPEVVKRDGVARYKEFLFQDYMNNFFGQPHDGKKSLDFARAE

SEQ ID NO: 80739 - protein, 333 aa, Arabidopsis thaliana
  peptide (1)..(333): Ceres Seq. ID no. 12657021
MIDSGLSSVPRPFVQPLSERIPTQKALTCEATQPIDLSNLDGPQHKEVAKQIVEAAETLGFFQVVNHGVSVELLELLKSSAHEFFAQAPEEKSMYLKEVSPSKLVKYGTSFVPDKEKAIEWKDYVSMLYTNDSEALQHWPQPCREVALEFLNSSMEMVKNVVNILMENVGVTLEEEKMNGLMGTKMVNMNYYPTCPSPELTVGVGRHSDMGMLTVLLQDGIGGLYVKLDNGEWAEIPPVHGALVINIGDTLQILSNGKYKSAEHRVRTTNIGSRVSVPIFTAPNPSQKVGPLPEVVKRDGVARYKEFLFQDYMNNFFGQPHDGKKSLDFARAE

SEQ ID NO: 80740 - protein, 240 aa, Arabidopsis thaliana
  peptide (1)..(240): Ceres Seq. ID no. 12657022
MYLKEVSPSKLVKYGTSFVPDKEKAIEWKDYVSMLYTNDSEALQHWPQPCREVALEFLNSSMEMVKNVVNILMENVGVTLEEEKMNGLMGTKMVNMNYYPTCPSPELTVGVGRHSDMGMLTVLLQDGIGGLYVKLDNGEWAEIPPVHGALVINIGDTLQILSNGKYKSAEHRVRTTNIGSRVSVPIFTAPNPSQKVGPLPEVVKRDGVARYKEFLFQDYMNNFFGQPHDGKKSLDFARAE

SEQ ID NO: 80741 - DNA, 2115 bp, Arabidopsis thaliana
  misc_feature (1)..(2115): Ceres Seq. ID no. 12657034
  misc_feature (1)..(2115): Ortholog of  Ceres SEQ ID NO 12607856 as cited in SEQ ID NO 55419
atagtattaataactgccaaactccagagctttaagatgtatgactctcaagttttgaaatctaagtaaggcttaccatttcttcctctcttttcaacttctggattttgattcagcaactccttactagttgactgaattttgatcagatacaacccatttctcagacgttcgcattctggaaagaaatttcagggcacagttaccatgtcagagggcagagaaacttgcgaagaatctacgagtggtgaatcttttccatatagatttcaacttgaagaggatgtaaaaagattgcaactgcaactccaacaagaaatagatttgcatacatttctagagagtgtcatggagaaagatccttgggagctatcttattcttctagtgttccacatcctgctcaggaacttctctccaatatagtgacgctagagactgcagtcactaagctcgagcaagaaatgatgtcactgaatttccaacttagccaagagagaaacgagaggagactcgcggaataccagttgacacattcggcttctccactaaattcttcttcttccctaagatatttgaatcagtcagattctgaattacatcaatcagcagaagacagtccatctcaagaccaaatagtccattaccaagaatcttcatctgaatcatctccagcagagtcaactgttgagcaaacactggacccaagtaatgactttcttgaaaagaggctaatgagaaagacaaatgcgaggaagctacctcgaggaatgccacctaagtacctgtgggatcaacctaatctattatctgaagaaatggtgagatgtatgaagaatatcttcatgtctcttgctgatccaacagcaacttcaaaagcttcctcaaacgaaagccacctctcaccagtatcacctcgcgggcatctatcaagctcagcatcctggtggccttcaacagaacggtcaatgatctcctcatgggtgcaaagcccacaaatagatatccaaaataacgccaatgttttggccacaggagatgtctttgatccttatagagttcgtgggaagttaagctgggcggagattgggaactacagtttggcatccgaggtttcttggatgtctgtagggaagaaacagctggagtatgcttccggggcattgaagaagttcaggacactggttgagcaattggctagagtaaatcctattcatttaagctgcaacgagaagcttgctttctggattaacctttataacgcgttgataatgcatgcttatttggcttatggcgtcccaaaaagcgacctgaagcttttctcgttgatgcaaaaggcagcctatacagttggagggcactcatatactgcggcgacaatggaatatgtgatactgaagatgaaaccgcctatgcacaggccacaaattgctttgcttcttgccatccacaagatgaaagtatcagaagaacagcgcagggcaagcattgatacacatgaacctcttctcggctttgctctaagctgtggaatgtactcttcacctgcggtgaggatctactctgcgaaaggagtgaaggaagagatgctagaagcacaaagggacttcatacaagcatcggtagggctgagcagcaaagggaagctcttactacccaaaatgctccattgttatgccaagagtttggtggaggattcgaacttgggggtctggatatcaaggtaccttcctccacatcaagctgcttttgtggagcaatgcatctctcagagaagacaaagccttctcgcttcacggaactgcggaatactccccttcgattctcgtttcagatacctgtttctccccgacgacaacacctcgttgtaataacagttcaaagactctcttctgttgtaaaaaaagctttaaccgacctcataagaacgaacagtgagaggaggctgtttcatgatcatggttactactattattccaacatagcttttggcttatagtgtacatgttattcaggatatgcatattaattctgagaagtctcaatatgttgtgtttcaactttctttcagaaagacataaatggaagagttgagactagtcatctatttaagtgcg

SEQ ID NO: 80742 - protein, 553 aa, Arabidopsis thaliana
  peptide (1)..(553): Ceres Seq. ID no. 12657035
MSEGRETCEESTSGESFPYRFQLEEDVKRLQLQLQQEIDLHTFLESVMEKDPWELSYSSSVPHPAQELLSNIVTLETAVTKLEQEMMSLNFQLSQERNERRLAEYQLTHSASPLNSSSSLRYLNQSDSELHQSAEDSPSQDQIVHYQESSSESSPAESTVEQTLDPSNDFLEKRLMRKTNARKLPRGMPPKYLWDQPNLLSEEMVRCMKNIFMSLADPTATSKASSNESHLSPVSPRGHLSSSASWWPSTERSMISSWVQSPQIDIQNNANVLATGDVFDPYRVRGKLSWAEIGNYSLASEVSWMSVGKKQLEYASGALKKFRTLVEQLARVNPIHLSCNEKLAFWINLYNALIMHAYLAYGVPKSDLKLFSLMQKAAYTVGGHSYTAATMEYVILKMKPPMHRPQIALLLAIHKMKVSEEQRRASIDTHEPLLGFALSCGMYSSPAVRIYSAKGVKEEMLEAQRDFIQASVGLSSKGKLLLPKMLHCYAKSLVEDSNLGVWISRYLPPHQAAFVEQCISQRRQSLLASRNCGILPFDSRFRYLFLPDDNTSL

SEQ ID NO: 80743 - protein, 506 aa, Arabidopsis thaliana
  peptide (1)..(506): Ceres Seq. ID no. 12657036
MEKDPWELSYSSSVPHPAQELLSNIVTLETAVTKLEQEMMSLNFQLSQERNERRLAEYQLTHSASPLNSSSSLRYLNQSDSELHQSAEDSPSQDQIVHYQESSSESSPAESTVEQTLDPSNDFLEKRLMRKTNARKLPRGMPPKYLWDQPNLLSEEMVRCMKNIFMSLADPTATSKASSNESHLSPVSPRGHLSSSASWWPSTERSMISSWVQSPQIDIQNNANVLATGDVFDPYRVRGKLSWAEIGNYSLASEVSWMSVGKKQLEYASGALKKFRTLVEQLARVNPIHLSCNEKLAFWINLYNALIMHAYLAYGVPKSDLKLFSLMQKAAYTVGGHSYTAATMEYVILKMKPPMHRPQIALLLAIHKMKVSEEQRRASIDTHEPLLGFALSCGMYSSPAVRIYSAKGVKEEMLEAQRDFIQASVGLSSKGKLLLPKMLHCYAKSLVEDSNLGVWISRYLPPHQAAFVEQCISQRRQSLLASRNCGILPFDSRFRYLFLPDDNTSL

SEQ ID NO: 80744 - protein, 468 aa, Arabidopsis thaliana
  peptide (1)..(468): Ceres Seq. ID no. 12657037
MMSLNFQLSQERNERRLAEYQLTHSASPLNSSSSLRYLNQSDSELHQSAEDSPSQDQIVHYQESSSESSPAESTVEQTLDPSNDFLEKRLMRKTNARKLPRGMPPKYLWDQPNLLSEEMVRCMKNIFMSLADPTATSKASSNESHLSPVSPRGHLSSSASWWPSTERSMISSWVQSPQIDIQNNANVLATGDVFDPYRVRGKLSWAEIGNYSLASEVSWMSVGKKQLEYASGALKKFRTLVEQLARVNPIHLSCNEKLAFWINLYNALIMHAYLAYGVPKSDLKLFSLMQKAAYTVGGHSYTAATMEYVILKMKPPMHRPQIALLLAIHKMKVSEEQRRASIDTHEPLLGFALSCGMYSSPAVRIYSAKGVKEEMLEAQRDFIQASVGLSSKGKLLLPKMLHCYAKSLVEDSNLGVWISRYLPPHQAAFVEQCISQRRQSLLASRNCGILPFDSRFRYLFLPDDNTSL

SEQ ID NO: 80745 - DNA, 1941 bp, Arabidopsis thaliana
  misc_feature (1)..(1941): Ceres Seq. ID no. 12657042
  misc_feature (1)..(1941): Ortholog of  Ceres SEQ ID NO 13584744 as cited in SEQ ID NO 69137
atgaactctccatcaaaactcaaaggctggtcttcaagcggaggcgatccttgtggcgattcgtgggatggcattacttgcaaaggctcttctgttactgaaataaaagtatctggacgtggactcagtggatctttaggttaccagcttggaaacttgaaatcgctcacttaccttgatgtaagcaagaacaatcttaacggaaacttaccctaccagcttcctgacaagcttacttatctagatggctctgagaatgacttcaacggtaatgtgccatattcggtgtctctcatgaacgacctcagttacctaaaccttggccgtaacaacctcaatggtgaactcagtgacatgtttcaaaagcttccaaaacttgaaacaattgatctttcttccaatcaactcacgggaaaactaccgcagagttttgccaatctaacaggtcttaaaacactgcatttgcaagaaaaccaattcaaaggctctataaatgctctcagggacctccctcagattgatgatgtaaacgtagcaaacaatcaatttactggttggatcccaaacgagttgaagaatattggaaaccttgaaactggaggaaacaagtggtcaagcggtagagctccttcaccacctccgggaacccgtcacatagacagaaactcatcaggaggcggtggaggaagcagcaaggctctgacactaggagttataatagcggtgtcttctataggtggactcattttatttgcagggttgattgcattgatttctcgaagaaagaactctaatgattcttctcactttttcgacgacgagaaaggaaccaaccgaagcaagccactcttcacaccacaatcctctcagatgcttcaattcgataatatggaagaattcaaaaaccagaagacagttgattctaatacttcacttgaaacaaagccttctgttaaaagaacttcttctgtcagtttcaagaactctcctacttttcatctcataccttctacccaagtggctgctacccctgaccgttcctccacctcccaagactctcctgatacacgcggtgtgaaagcgttttcactagcggatttgcagaataccgcgtcttgtttctcgccgaatcgccttcttggtgaaggaaccattggacgtgtttataaagctaaatttcaggatggaaggaaatttgcagtcaaagagattgattcttctctgttaggaaaaggcaatccggaagagttttcacacatagtgtcgagtatctcgagtattcaccacaagaatatggcagaactcgtgggttattgttcagaacaaggaagaaatatgcttgtttatgagtatttcacaagtggatcacttcacagatttcttcacctgtctgatgatttcagcaaaccattgacgtggaacaccagaatccgaatcgctctcggaactgctaaagctatagagtaccttcatgaaacatgttcgcctccgctagttcacaagaacatcaagtcatcaaacattttacttgataatgagctaaatccccgcctctcagactatggcttggcaaactttcaccaccgcacaagtcagaatcttggagttggatacaatgccccagaatgcacagatccctccgcttacacacaaaagagcgacgtgtacagctttggtgtggtgatgcttgagctgctaactggtcgaaagccttatgacagtgggaggccaaaagcagaacagtctttagttcgttgggcaaagccgcagcttaaagacatggatactctggatgaaatggtggatcccgcgttgtgcggactctacgctccagaatctgtatcatcattcgcggatatagtttccatctgcgtaatgacggagcctggacttaggcctccagtgtcaaatgtggtggaggcattgaagaggctagtgtag

SEQ ID NO: 80746 - protein, 646 aa, Arabidopsis thaliana
  peptide (1)..(646): Ceres Seq. ID no. 12657043
MNSPSKLKGWSSSGGDPCGDSWDGITCKGSSVTEIKVSGRGLSGSLGYQLGNLKSLTYLDVSKNNLNGNLPYQLPDKLTYLDGSENDFNGNVPYSVSLMNDLSYLNLGRNNLNGELSDMFQKLPKLETIDLSSNQLTGKLPQSFANLTGLKTLHLQENQFKGSINALRDLPQIDDVNVANNQFTGWIPNELKNIGNLETGGNKWSSGRAPSPPPGTRHIDRNSSGGGGGSSKALTLGVIIAVSSIGGLILFAGLIALISRRKNSNDSSHFFDDEKGTNRSKPLFTPQSSQMLQFDNMEEFKNQKTVDSNTSLETKPSVKRTSSVSFKNSPTFHLIPSTQVAATPDRSSTSQDSPDTRGVKAFSLADLQNTASCFSPNRLLGEGTIGRVYKAKFQDGRKFAVKEIDSSLLGKGNPEEFSHIVSSISSIHHKNMAELVGYCSEQGRNMLVYEYFTSGSLHRFLHLSDDFSKPLTWNTRIRIALGTAKAIEYLHETCSPPLVHKNIKSSNILLDNELNPRLSDYGLANFHHRTSQNLGVGYNAPECTDPSAYTQKSDVYSFGVVMLELLTGRKPYDSGRPKAEQSLVRWAKPQLKDMDTLDEMVDPALCGLYAPESVSSFADIVSICVMTEPGLRPPVSNVVEALKRLV

SEQ ID NO: 80747 - protein, 548 aa, Arabidopsis thaliana
  peptide (1)..(548): Ceres Seq. ID no. 12657044
MNDLSYLNLGRNNLNGELSDMFQKLPKLETIDLSSNQLTGKLPQSFANLTGLKTLHLQENQFKGSINALRDLPQIDDVNVANNQFTGWIPNELKNIGNLETGGNKWSSGRAPSPPPGTRHIDRNSSGGGGGSSKALTLGVIIAVSSIGGLILFAGLIALISRRKNSNDSSHFFDDEKGTNRSKPLFTPQSSQMLQFDNMEEFKNQKTVDSNTSLETKPSVKRTSSVSFKNSPTFHLIPSTQVAATPDRSSTSQDSPDTRGVKAFSLADLQNTASCFSPNRLLGEGTIGRVYKAKFQDGRKFAVKEIDSSLLGKGNPEEFSHIVSSISSIHHKNMAELVGYCSEQGRNMLVYEYFTSGSLHRFLHLSDDFSKPLTWNTRIRIALGTAKAIEYLHETCSPPLVHKNIKSSNILLDNELNPRLSDYGLANFHHRTSQNLGVGYNAPECTDPSAYTQKSDVYSFGVVMLELLTGRKPYDSGRPKAEQSLVRWAKPQLKDMDTLDEMVDPALCGLYAPESVSSFADIVSICVMTEPGLRPPVSNVVEALKRLV

SEQ ID NO: 80748 - protein, 528 aa, Arabidopsis thaliana
  peptide (1)..(528): Ceres Seq. ID no. 12657045
MFQKLPKLETIDLSSNQLTGKLPQSFANLTGLKTLHLQENQFKGSINALRDLPQIDDVNVANNQFTGWIPNELKNIGNLETGGNKWSSGRAPSPPPGTRHIDRNSSGGGGGSSKALTLGVIIAVSSIGGLILFAGLIALISRRKNSNDSSHFFDDEKGTNRSKPLFTPQSSQMLQFDNMEEFKNQKTVDSNTSLETKPSVKRTSSVSFKNSPTFHLIPSTQVAATPDRSSTSQDSPDTRGVKAFSLADLQNTASCFSPNRLLGEGTIGRVYKAKFQDGRKFAVKEIDSSLLGKGNPEEFSHIVSSISSIHHKNMAELVGYCSEQGRNMLVYEYFTSGSLHRFLHLSDDFSKPLTWNTRIRIALGTAKAIEYLHETCSPPLVHKNIKSSNILLDNELNPRLSDYGLANFHHRTSQNLGVGYNAPECTDPSAYTQKSDVYSFGVVMLELLTGRKPYDSGRPKAEQSLVRWAKPQLKDMDTLDEMVDPALCGLYAPESVSSFADIVSICVMTEPGLRPPVSNVVEALKRLV

SEQ ID NO: 80749 - DNA, 4793 bp, Arabidopsis thaliana
  misc_feature (1)..(4793): Ceres Seq. ID no. 12657046
  misc_feature (1)..(4793): Ortholog of  Ceres SEQ ID NO 13660487 as cited in SEQ ID NO 60849
agagagctcaaagccatggactttctcggttccacgacgggtagcggtacgttagcaatgttgttctcgttttcggaatctattttgcctctggattctaggtctttccttctgaaacctcttttcctgagatggctttctggtttcttacactcggttttgttgctggtcctgtttttctcatgggttcgtaagaaaattaggggggatagtggtgttacggagagtttgaaagataggagggattttgggtttaagtcagctctgttttgtagtttagctctgtctctgcttaatctcgtgttgatgtcgttgagtggtttctattggtacgagagtggctggttagataatgaacagctagtttcctcccttgggtttcttttgggaatggtttcttggggggttttgtcgatttgtttgcatcgctgcagagattgtgagcataaaaaggctccctttttacttaggctatggttggttttctatctagtggtctcttgctactctcttgtggtagattttgtgatgtacgagagacgtgaaaccgtacctgttcaccttctagtgttcgatatagtcgcttttattgctgctgtgtttctcggttacgtggctgtcctcaagaaagatagaagcaacagcaatggagttttggaagagcctctgttgaacggtggtgattctcgtgttggtggtgatgacagcgttgagttaaataaaaccaatgggagtggtgaggctactccttactcgagagctggcattctcagtcttttgactttctcatggatgagtccattaatagacattggaaacaagaaaacccttgatctagaagatgttccgcagcttcatgatactgacagcgtagtcgggttagctcctaagtttcggagtatgcttgaatcaccagatgggggcgagagaagtggcgttaccacgttcaagcttataaaagccttgtattttacggctcagtgggagattctagtgacagccttctttgctttcatctacacggttgcatcatatgttgggccagcactcattgatactttcgtgcaataccttaatggacgtaggcagtataaccatgaaggatatgtgctagtcattactttctttgctgctaagattgtggagtgcctttcacagagacattggttctttaggctacagaaggttggtattaggatgagatcagccttggttgcgatgatatatgaaaagggtctgaccctttcatgtcagtcaaagcaaggacgcacaagtggggagattataaatttcatgactgtggatgcggagaggattggtaatttcagttggtacatgcatgacccctggatggtcttgttacaagtcggtctagctctgtggatcttgtatagaaatcttggactagcatcaatagcggctttagttgctaccattatagtaatgcttataaattttccattcgggagaatgcaagagaggtttcaggagaagttaatggaagctaaggatagccggatgaaatcaacatctgagatcttaagaaacatgaggattctcaagcttcagggatgggaaatgaagtttctctccaagatttttgatcttcggaaatctgaggaaggatggctgaaaaagtatgtgtataactcggctgttattagttttgttttctggggggctcctactctggtgtcagtctccacttttggtgcttgtatacttcttggaatcccccttgaatcaggaaagatactctctgcacttgcaaccttcaggattctacaagagccgatctacaatcttcccgacactatctccatgattgtgcagactaaagtctctcttgatagacttgcatcctacctttgcctggacaatttgcagcctgacattgtagagaggcttcctaagggaagttcagacgtggcagtagaagtgatcaacagcactttatcttgggatgtctcatcctctaacccgactctcaaagacataaatttcaaggtctttcctgggatgaaggttgcagtttgtggtaccgttggctctgggaaatcgagcttactttcatctttactaggagaagtacccaaggtatctggaagtcttaaggtttgtgggacaaaagcgtatgttgcgcaatctccttggattcagagtggtaaaattgaggataacatcttgtttggcaaacctatggaaagagaacgatatgataaggtgcttgaagcatgttcgttgagtaaggatctggagatactttcattcggtgatcagaccgttattggagaacgcggcattaatttgagtggtgggcaaaagcaaaggatacagattgcacgtgctctctaccaagatgctgatatctatctgttcgatgatccttttagcgctgtggatgcacacacagggtcacatctctttaaggaagttctactggggcttttgtgttccaaatcggttatatatgttactcatcaagttgagttcttacctgctgctgatcttatactggtcatgaaagatgggagaatcagccaagctggaaaatacaatgatatcctcaactctggaactgatttcatggagcttataggtgcgcatcaggaggctcttgcagtagttgattctgttgatgccaattctgtttctgagaaatcagctttaggccaagaaaatgtaattgtgaaagatgctatcgctgttgatgagaaactagaaagtcaggatctgaagaatgataaattagaatctgtggagccccaaagacaaattattcaagaggaagagagggagaaaggtagtgtcgctttggatgtgtactggaaatatatcacactggcatatggaggagctcttgtgcctttcatattgttggggcaagttctctttcagcttctacagattggaagcaactactggatggcttgggctactcctgtttctgaggatgtgcaagctcctgtgaaactttccacgttaatgattgtgtatgtggctttggcctttggaagttccctctgcattcttcttagagccacgcttcttgtcactgctggttacaagactgctactgaactgtttcataaaatgcatcactgcatattccgttctcctatgtctttctttgattccactccaagtggaagaatcatgagtagagcttctaccgaccaatccgcagtagatttggaactaccgtatcaatttggatcagttgctatcacagtgattcagcttattggaatcattggagtaatgtctcaagtttcttggctggtttttctcgtcttcatccctgtggttgctgcctccatatggtatcagcggtattacatagctgcagcacgagaactttcgcggttagttggagtatgcaaagctcctctaattcagcatttttctgaaacgatttcaggggcgacaaccattaggagtttcagccaagaatttagattccgttctgacaacatgaggctaagtgatggttactctaggcccaaattctatacagctggagcaatggaatggctttgctttcgccttgatatgttgtcatcacttacatttgtcttttcattggttttcttggtctccatacctactggagtgattgatccaagtctcgcgggattagccgtgacttatggactcagtttgaatactctgcaagcttggctgatttggactctctgtaatcttgagaacaaaatcatatcggtagagaggattcttcaatatgcaagtgttcccagtgaaccacctcttgtgatagaatcaaaccgacctgagcaatcatggccttcacgtggtgaagttgaaatccgtgatcttcaggtccgatatgctccacatatgcctcttgtgttgcgaggaataacatgcacattcaaaggaggtttaagaacaggaattgttggaaggacaggaagcgggaaatcgactttgatacaaactcttttccgcattgtagaaccttcagctggagaaatcaggattgatggagtgaatattttgaccattgggttgcatgacttgcgtttaagactaagcatcataccccaagatccaaccatgtttgaaggaacaatgagaagtaacttggaccctcttgaagagtacacagatgatcaaatctgggaggctcttgacaagtgccaactaggagacgaggtgaggaaaaaagagcaaaagctcgattccagtgtgagcgagaatggagacaattggagtatgggtcagagacaactagtgtgtctcgggagagttcttctcaagagaagcaaaatcttggtgcttgatgaagccactgcttctgttgacactgcaactgacaatctgattcagaaaacgctaagagaacacttctcagactgtacagtgataaccattgcacacaggatatcttcagttattgacagcgacatggttctgcttctaagcaatgggatcattgaggagtatgatacgccagtgagattactggaggataagtcttcctctttttctaagcttgtggctgagtacacctcaagatctagttccagtttcgattgaagcaaagactctgctattttcctgctgatgatgacgatgaagaaaaacttaggatgtctgaatctggtttagccacaacactagctggattatgattcacacaagaagaaacactatcttttgttaaaagcttttgttcttagtttatagcttctactactgttgaacccctaaaaacgattattctacatcgctagtttcaaatcaatgcaataaaagattgttcacttctg

SEQ ID NO: 80750 - protein, 1519 aa, Arabidopsis thaliana
  peptide (1)..(1519): Ceres Seq. ID no. 12657047
RELKAMDFLGSTTGSGTLAMLFSFSESILPLDSRSFLLKPLFLRWLSGFLHSVLLLVLFFSWVRKKIRGDSGVTESLKDRRDFGFKSALFCSLALSLLNLVLMSLSGFYWYESGWLDNEQLVSSLGFLLGMVSWGVLSICLHRCRDCEHKKAPFLLRLWLVFYLVVSCYSLVVDFVMYERRETVPVHLLVFDIVAFIAAVFLGYVAVLKKDRSNSNGVLEEPLLNGGDSRVGGDDSVELNKTNGSGEATPYSRAGILSLLTFSWMSPLIDIGNKKTLDLEDVPQLHDTDSVVGLAPKFRSMLESPDGGERSGVTTFKLIKALYFTAQWEILVTAFFAFIYTVASYVGPALIDTFVQYLNGRRQYNHEGYVLVITFFAAKIVECLSQRHWFFRLQKVGIRMRSALVAMIYEKGLTLSCQSKQGRTSGEIINFMTVDAERIGNFSWYMHDPWMVLLQVGLALWILYRNLGLASIAALVATIIVMLINFPFGRMQERFQEKLMEAKDSRMKSTSEILRNMRILKLQGWEMKFLSKIFDLRKSEEGWLKKYVYNSAVISFVFWGAPTLVSVSTFGACILLGIPLESGKILSALATFRILQEPIYNLPDTISMIVQTKVSLDRLASYLCLDNLQPDIVERLPKGSSDVAVEVINSTLSWDVSSSNPTLKDINFKVFPGMKVAVCGTVGSGKSSLLSSLLGEVPKVSGSLKVCGTKAYVAQSPWIQSGKIEDNILFGKPMERERYDKVLEACSLSKDLEILSFGDQTVIGERGINLSGGQKQRIQIARALYQDADIYLFDDPFSAVDAHTGSHLFKEVLLGLLCSKSVIYVTHQVEFLPAADLILVMKDGRISQAGKYNDILNSGTDFMELIGAHQEALAVVDSVDANSVSEKSALGQENVIVKDAIAVDEKLESQDLKNDKLESVEPQRQIIQEEEREKGSVALDVYWKYITLAYGGALVPFILLGQVLFQLLQIGSNYWMAWATPVSEDVQAPVKLSTLMIVYVALAFGSSLCILLRATLLVTAGYKTATELFHKMHHCIFRSPMSFFDSTPSGRIMSRASTDQSAVDLELPYQFGSVAITVIQLIGIIGVMSQVSWLVFLVFIPVVAASIWYQRYYIAAARELSRLVGVCKAPLIQHFSETISGATTIRSFSQEFRFRSDNMRLSDGYSRPKFYTAGAMEWLCFRLDMLSSLTFVFSLVFLVSIPTGVIDPSLAGLAVTYGLSLNTLQAWLIWTLCNLENKIISVERILQYASVPSEPPLVIESNRPEQSWPSRGEVEIRDLQVRYAPHMPLVLRGITCTFKGGLRTGIVGRTGSGKSTLIQTLFRIVEPSAGEIRIDGVNILTIGLHDLRLRLSIIPQDPTMFEGTMRSNLDPLEEYTDDQIWEALDKCQLGDEVRKKEQKLDSSVSENGDNWSMGQRQLVCLGRVLLKRSKILVLDEATASVDTATDNLIQKTLREHFSDCTVITIAHRISSVIDSDMVLLLSNGIIEEYDTPVRLLEDKSSSFSKLVAEYTSRSSSSFD

SEQ ID NO: 80751 - protein, 1514 aa, Arabidopsis thaliana
  peptide (1)..(1514): Ceres Seq. ID no. 12657048
MDFLGSTTGSGTLAMLFSFSESILPLDSRSFLLKPLFLRWLSGFLHSVLLLVLFFSWVRKKIRGDSGVTESLKDRRDFGFKSALFCSLALSLLNLVLMSLSGFYWYESGWLDNEQLVSSLGFLLGMVSWGVLSICLHRCRDCEHKKAPFLLRLWLVFYLVVSCYSLVVDFVMYERRETVPVHLLVFDIVAFIAAVFLGYVAVLKKDRSNSNGVLEEPLLNGGDSRVGGDDSVELNKTNGSGEATPYSRAGILSLLTFSWMSPLIDIGNKKTLDLEDVPQLHDTDSVVGLAPKFRSMLESPDGGERSGVTTFKLIKALYFTAQWEILVTAFFAFIYTVASYVGPALIDTFVQYLNGRRQYNHEGYVLVITFFAAKIVECLSQRHWFFRLQKVGIRMRSALVAMIYEKGLTLSCQSKQGRTSGEIINFMTVDAERIGNFSWYMHDPWMVLLQVGLALWILYRNLGLASIAALVATIIVMLINFPFGRMQERFQEKLMEAKDSRMKSTSEILRNMRILKLQGWEMKFLSKIFDLRKSEEGWLKKYVYNSAVISFVFWGAPTLVSVSTFGACILLGIPLESGKILSALATFRILQEPIYNLPDTISMIVQTKVSLDRLASYLCLDNLQPDIVERLPKGSSDVAVEVINSTLSWDVSSSNPTLKDINFKVFPGMKVAVCGTVGSGKSSLLSSLLGEVPKVSGSLKVCGTKAYVAQSPWIQSGKIEDNILFGKPMERERYDKVLEACSLSKDLEILSFGDQTVIGERGINLSGGQKQRIQIARALYQDADIYLFDDPFSAVDAHTGSHLFKEVLLGLLCSKSVIYVTHQVEFLPAADLILVMKDGRISQAGKYNDILNSGTDFMELIGAHQEALAVVDSVDANSVSEKSALGQENVIVKDAIAVDEKLESQDLKNDKLESVEPQRQIIQEEEREKGSVALDVYWKYITLAYGGALVPFILLGQVLFQLLQIGSNYWMAWATPVSEDVQAPVKLSTLMIVYVALAFGSSLCILLRATLLVTAGYKTATELFHKMHHCIFRSPMSFFDSTPSGRIMSRASTDQSAVDLELPYQFGSVAITVIQLIGIIGVMSQVSWLVFLVFIPVVAASIWYQRYYIAAARELSRLVGVCKAPLIQHFSETISGATTIRSFSQEFRFRSDNMRLSDGYSRPKFYTAGAMEWLCFRLDMLSSLTFVFSLVFLVSIPTGVIDPSLAGLAVTYGLSLNTLQAWLIWTLCNLENKIISVERILQYASVPSEPPLVIESNRPEQSWPSRGEVEIRDLQVRYAPHMPLVLRGITCTFKGGLRTGIVGRTGSGKSTLIQTLFRIVEPSAGEIRIDGVNILTIGLHDLRLRLSIIPQDPTMFEGTMRSNLDPLEEYTDDQIWEALDKCQLGDEVRKKEQKLDSSVSENGDNWSMGQRQLVCLGRVLLKRSKILVLDEATASVDTATDNLIQKTLREHFSDCTVITIAHRISSVIDSDMVLLLSNGIIEEYDTPVRLLEDKSSSFSKLVAEYTSRSSSSFD

SEQ ID NO: 80752 - protein, 1500 aa, Arabidopsis thaliana
  peptide (1)..(1500): Ceres Seq. ID no. 12657049
MLFSFSESILPLDSRSFLLKPLFLRWLSGFLHSVLLLVLFFSWVRKKIRGDSGVTESLKDRRDFGFKSALFCSLALSLLNLVLMSLSGFYWYESGWLDNEQLVSSLGFLLGMVSWGVLSICLHRCRDCEHKKAPFLLRLWLVFYLVVSCYSLVVDFVMYERRETVPVHLLVFDIVAFIAAVFLGYVAVLKKDRSNSNGVLEEPLLNGGDSRVGGDDSVELNKTNGSGEATPYSRAGILSLLTFSWMSPLIDIGNKKTLDLEDVPQLHDTDSVVGLAPKFRSMLESPDGGERSGVTTFKLIKALYFTAQWEILVTAFFAFIYTVASYVGPALIDTFVQYLNGRRQYNHEGYVLVITFFAAKIVECLSQRHWFFRLQKVGIRMRSALVAMIYEKGLTLSCQSKQGRTSGEIINFMTVDAERIGNFSWYMHDPWMVLLQVGLALWILYRNLGLASIAALVATIIVMLINFPFGRMQERFQEKLMEAKDSRMKSTSEILRNMRILKLQGWEMKFLSKIFDLRKSEEGWLKKYVYNSAVISFVFWGAPTLVSVSTFGACILLGIPLESGKILSALATFRILQEPIYNLPDTISMIVQTKVSLDRLASYLCLDNLQPDIVERLPKGSSDVAVEVINSTLSWDVSSSNPTLKDINFKVFPGMKVAVCGTVGSGKSSLLSSLLGEVPKVSGSLKVCGTKAYVAQSPWIQSGKIEDNILFGKPMERERYDKVLEACSLSKDLEILSFGDQTVIGERGINLSGGQKQRIQIARALYQDADIYLFDDPFSAVDAHTGSHLFKEVLLGLLCSKSVIYVTHQVEFLPAADLILVMKDGRISQAGKYNDILNSGTDFMELIGAHQEALAVVDSVDANSVSEKSALGQENVIVKDAIAVDEKLESQDLKNDKLESVEPQRQIIQEEEREKGSVALDVYWKYITLAYGGALVPFILLGQVLFQLLQIGSNYWMAWATPVSEDVQAPVKLSTLMIVYVALAFGSSLCILLRATLLVTAGYKTATELFHKMHHCIFRSPMSFFDSTPSGRIMSRASTDQSAVDLELPYQFGSVAITVIQLIGIIGVMSQVSWLVFLVFIPVVAASIWYQRYYIAAARELSRLVGVCKAPLIQHFSETISGATTIRSFSQEFRFRSDNMRLSDGYSRPKFYTAGAMEWLCFRLDMLSSLTFVFSLVFLVSIPTGVIDPSLAGLAVTYGLSLNTLQAWLIWTLCNLENKIISVERILQYASVPSEPPLVIESNRPEQSWPSRGEVEIRDLQVRYAPHMPLVLRGITCTFKGGLRTGIVGRTGSGKSTLIQTLFRIVEPSAGEIRIDGVNILTIGLHDLRLRLSIIPQDPTMFEGTMRSNLDPLEEYTDDQIWEALDKCQLGDEVRKKEQKLDSSVSENGDNWSMGQRQLVCLGRVLLKRSKILVLDEATASVDTATDNLIQKTLREHFSDCTVITIAHRISSVIDSDMVLLLSNGIIEEYDTPVRLLEDKSSSFSKLVAEYTSRSSSSFD

SEQ ID NO: 80753 - DNA, 4377 bp, Arabidopsis thaliana
  misc_feature (1)..(4377): Ceres Seq. ID no. 12657050
  misc_feature (1)..(4377): Ortholog of  Ceres SEQ ID NO 13660487 as cited in SEQ ID NO 60849
atgtttggttcctgtgtttacaagaaaaggttgggttgggaaaatagtgatgctttcacgaatgagaggtttaaggatatgtctttaacatacaataaactggtcgttatatgttgtgagactttgtctgccttgaattctgtgttgttgctgttaagttgcttcaacctgcataaaaatggttgggatcgcagcgaactgatgattctcttagatcttttatttacagccctttcttggggtgccatctctttctacatacgtagtcaatttacctattctcatgatcaaaagtttcctattttgcttagagtctggtgggttttgtattttatgttttcttgctaccgtcttttggtagacattgctctatacaagaagcaagaactggtgtcagttcaccttttattgtctgatgtactggccgtaagcgtggggttgtttctctgctattcatgtttgcagaagcaaggacaaggtgaaaggatcaacttattactcgaagaacccctcttgaatggagctgaatctagtgcggctactagtgtgcagttggataaggccgaagatgatgaggttgttacacctttttcgaacgctgggtttctaagccatgtgagtttctcttggatgagtcctttaattgtcttaggaaacgagaaaattatagacagcgaggatgttcctcaagttgacaatagtgacagagccgagaaactattttggatatttaggagtaagcttgaatgggacgatggtgaaagaaggatcaccacgtataagcttattaaggcactcttcttttcagtgtggcgagatattctattgtcaactctgtttgcttttgtctatacagtgtcttgctacgttgcaccgtatctcatggatactttcgttcagtacctgaacggtcaacgacagtattcaaatcaaggggttgttttagtgacaactttttttgttgctaagcttgtagaatgccaagcgcggaggaattggtatttcaggttgcagaaagctgggattggaatgagatcagtcctggtttcaatgatctacgaaaagggcttgacccttccctgttattcaaagcaaggacacaccagtggtgagatcataaatctcatgacagtagatgctgagagaatcagtgcttttagttggtatatgcatgatccatggatacttgtcttacaaatcagtttagcgttattgatcttgtacagaagccttgggctaggatcaattgcagcttttgctgcaacgtttttagttatgctgggaaatattcccttggcaaagttggaagagaagtttcagggaaatttaatggagtctaaagataacaggatgaagaaaacatcggaggccttactgaacatgaggattcttaaacttcaaggatgggagatgaagttccttcataagattcttgaccttagaggcattgaagcaggctggcttaagaaattcgtgtataactctgcggctatcagctctgttctctgggctgcaccttcgttcgtttctgcaacagcttttggagcttgtatgcttctgaagattcctcttgaatcgggaaagataatagctgctcttgcaacttttcgaattctgcaaactccgatatacaaacttcctgatacgatctccatgattgttcagacaaaggtatctcttgataggattgcaacttttctttgccttgatgatttgcagcaagatggtatggagagacttcctagtggaagttcaaaaatggatgtggaagtcagcaatggtgctttctcttgggatgactcttcacccatcccgacgctgaaagacataaggttcaaaatccctcatgggatgaacatcgctatatgtggtactgttggttcagggaaatcaagcttactctcgtccatactaggtgaagttcccaaaatatctggaaatcttaaggtttgtggaagaaaggcatacattgcacagtcgccttggatccagagtggcaaagtcgaagagaacattctgtttggtaagcccatgcaaagagaatggtaccaaagggtgcttgaagcgtgttctttgaataaggacttggaggtatttccgttccgtgatcagacagttattggagaaaggggtatcaatcttagcggtggacagaagcaacggatacagattgcacgtgctctttaccaagacgcagatatctatctgtttgatgacccttttagtgcagtagacgctcatactggatcacatctcttcaaggaagtcctgctggggcttctgagaaacaagacagtcatatatgtcactcatcaacttgaattcctgcctgaagctgatcttatactggtcatgaaagatgggaggatcacgcaagcagggaagtacaatgaaattcttgaatcaggaacagatttcatggaacttgtaggagctcacactgatgccttagctgcagttgattcatatgaaaaaggatctgcttcagcacaatcaacaacaagcaaagaaagcaaagtttccaacgatgaagaaaaacaagaggaagatttgcctagcccgaaaggacaactagttcaagaagaagagcgggagaaaggcaaagttgggttcactgtataccaaaagtatatgaaattggcgtatggaggagcacttgtgcctattatattggttgtacagattctctttcaggttctaaacatcgggagcaactattggatggcttgggtaactcctgtttctaaggatgtgaaacctctagtgagtggctctacattgattctagtctatgtatttctagccactgcgagctccttctgtatacttgtcagagcaatgctgtccgcgatgactggtttcaagatagctactgaactcttcaatcaaatgcattttcgcatttttcgtgcctccatgtcattctttgatgccaccccaattggccgaattttgaatagagcttctacagaccaaagtgccgtggatttgagattaccaagtcaattttcaaatcttgcaattgctgctgtaaacatcttggggattattggagtgatgggacaggttgcttggcaggtccttatcgtcttcatccctgtcatcgctgcatgcacctggtatcggcaatattacatatctgcggctcgggaactagcaagattatctggaataagcagatcgcctttggtgcagcatttttctgaaacactttcagggataacaactataaggagctttgatcaagaaccaagattccgcactgatatcatgagacttaacgattgttattctcggctgaggttccatgccatttctgcaatggagtggctctgcttccgtcttgatctcttatccactgtggcatttgcgctttcgcttgttatcttagtttctgtgcctgaaggagtcattaatccaagctttgcaggattggcggttacatatgcactcaatctaaatagcctgcaagcaactttaatatggacactttgcgatcttgagaacaaaatgatatccgtggagagaatgcttcaatacatagacatccccagtgaaccatctctcgttattgaatcaactaggcctgagaaatcttggccctgtcgcggagagattactatctgtaatctgcaagtacgatatgggccacatctgcctatggtgctgcgtgggctgacatgcacttttcgaggaggcctgaaaacgggaatcgttggaagaacaggatgtggcaaatccactctaattcaaaccctttttaggattgtggaacctgcagctggagaaatcaggatagatggaataaacatcttgaccattgggctgcatgacctgcgttccagactaagtatcatacctcaagaaccaaccatgtttgaaggcacggttcgcagtaacttggaccctcttgaggaatacgctgatgaccaaatctgggaggcactcgacaagtgtcaacttggggatgaaataaggaagaaagaactaaagctagattcccctgtaagtgagaatggacagaactggagtgttggtcagagacaactggtgtgtcttggacgagtcttgctaaagagaagcaaagtattgattcttgatgaagccacagcttctgtagatacagcgactgatactctgatacaggaaacactgagacaacatttctcgggctgtacagtaataacaatcgcacacagaatatcatctgttatagacagtgatatggtactgctcctagaccaagggttaatagaagaacacgattcaccggcgagattgctggaagacaagtcctcgtcattttcaaagcttgtggcagagtacacagcaagttcggattcaagattcaaaagaagttcaatgaaaacaaactag

SEQ ID NO: 80754 - protein, 1458 aa, Arabidopsis thaliana
  peptide (1)..(1458): Ceres Seq. ID no. 12657051
MFGSCVYKKRLGWENSDAFTNERFKDMSLTYNKLVVICCETLSALNSVLLLLSCFNLHKNGWDRSELMILLDLLFTALSWGAISFYIRSQFTYSHDQKFPILLRVWWVLYFMFSCYRLLVDIALYKKQELVSVHLLLSDVLAVSVGLFLCYSCLQKQGQGERINLLLEEPLLNGAESSAATSVQLDKAEDDEVVTPFSNAGFLSHVSFSWMSPLIVLGNEKIIDSEDVPQVDNSDRAEKLFWIFRSKLEWDDGERRITTYKLIKALFFSVWRDILLSTLFAFVYTVSCYVAPYLMDTFVQYLNGQRQYSNQGVVLVTTFFVAKLVECQARRNWYFRLQKAGIGMRSVLVSMIYEKGLTLPCYSKQGHTSGEIINLMTVDAERISAFSWYMHDPWILVLQISLALLILYRSLGLGSIAAFAATFLVMLGNIPLAKLEEKFQGNLMESKDNRMKKTSEALLNMRILKLQGWEMKFLHKILDLRGIEAGWLKKFVYNSAAISSVLWAAPSFVSATAFGACMLLKIPLESGKIIAALATFRILQTPIYKLPDTISMIVQTKVSLDRIATFLCLDDLQQDGMERLPSGSSKMDVEVSNGAFSWDDSSPIPTLKDIRFKIPHGMNIAICGTVGSGKSSLLSSILGEVPKISGNLKVCGRKAYIAQSPWIQSGKVEENILFGKPMQREWYQRVLEACSLNKDLEVFPFRDQTVIGERGINLSGGQKQRIQIARALYQDADIYLFDDPFSAVDAHTGSHLFKEVLLGLLRNKTVIYVTHQLEFLPEADLILVMKDGRITQAGKYNEILESGTDFMELVGAHTDALAAVDSYEKGSASAQSTTSKESKVSNDEEKQEEDLPSPKGQLVQEEEREKGKVGFTVYQKYMKLAYGGALVPIILVVQILFQVLNIGSNYWMAWVTPVSKDVKPLVSGSTLILVYVFLATASSFCILVRAMLSAMTGFKIATELFNQMHFRIFRASMSFFDATPIGRILNRASTDQSAVDLRLPSQFSNLAIAAVNILGIIGVMGQVAWQVLIVFIPVIAACTWYRQYYISAARELARLSGISRSPLVQHFSETLSGITTIRSFDQEPRFRTDIMRLNDCYSRLRFHAISAMEWLCFRLDLLSTVAFALSLVILVSVPEGVINPSFAGLAVTYALNLNSLQATLIWTLCDLENKMISVERMLQYIDIPSEPSLVIESTRPEKSWPCRGEITICNLQVRYGPHLPMVLRGLTCTFRGGLKTGIVGRTGCGKSTLIQTLFRIVEPAAGEIRIDGINILTIGLHDLRSRLSIIPQEPTMFEGTVRSNLDPLEEYADDQIWEALDKCQLGDEIRKKELKLDSPVSENGQNWSVGQRQLVCLGRVLLKRSKVLILDEATASVDTATDTLIQETLRQHFSGCTVITIAHRISSVIDSDMVLLLDQGLIEEHDSPARLLEDKSSSFSKLVAEYTASSDSRFKRSSMKTN

SEQ ID NO: 80755 - protein, 1432 aa, Arabidopsis thaliana
  peptide (1)..(1432): Ceres Seq. ID no. 12657052
MSLTYNKLVVICCETLSALNSVLLLLSCFNLHKNGWDRSELMILLDLLFTALSWGAISFYIRSQFTYSHDQKFPILLRVWWVLYFMFSCYRLLVDIALYKKQELVSVHLLLSDVLAVSVGLFLCYSCLQKQGQGERINLLLEEPLLNGAESSAATSVQLDKAEDDEVVTPFSNAGFLSHVSFSWMSPLIVLGNEKIIDSEDVPQVDNSDRAEKLFWIFRSKLEWDDGERRITTYKLIKALFFSVWRDILLSTLFAFVYTVSCYVAPYLMDTFVQYLNGQRQYSNQGVVLVTTFFVAKLVECQARRNWYFRLQKAGIGMRSVLVSMIYEKGLTLPCYSKQGHTSGEIINLMTVDAERISAFSWYMHDPWILVLQISLALLILYRSLGLGSIAAFAATFLVMLGNIPLAKLEEKFQGNLMESKDNRMKKTSEALLNMRILKLQGWEMKFLHKILDLRGIEAGWLKKFVYNSAAISSVLWAAPSFVSATAFGACMLLKIPLESGKIIAALATFRILQTPIYKLPDTISMIVQTKVSLDRIATFLCLDDLQQDGMERLPSGSSKMDVEVSNGAFSWDDSSPIPTLKDIRFKIPHGMNIAICGTVGSGKSSLLSSILGEVPKISGNLKVCGRKAYIAQSPWIQSGKVEENILFGKPMQREWYQRVLEACSLNKDLEVFPFRDQTVIGERGINLSGGQKQRIQIARALYQDADIYLFDDPFSAVDAHTGSHLFKEVLLGLLRNKTVIYVTHQLEFLPEADLILVMKDGRITQAGKYNEILESGTDFMELVGAHTDALAAVDSYEKGSASAQSTTSKESKVSNDEEKQEEDLPSPKGQLVQEEEREKGKVGFTVYQKYMKLAYGGALVPIILVVQILFQVLNIGSNYWMAWVTPVSKDVKPLVSGSTLILVYVFLATASSFCILVRAMLSAMTGFKIATELFNQMHFRIFRASMSFFDATPIGRILNRASTDQSAVDLRLPSQFSNLAIAAVNILGIIGVMGQVAWQVLIVFIPVIAACTWYRQYYISAARELARLSGISRSPLVQHFSETLSGITTIRSFDQEPRFRTDIMRLNDCYSRLRFHAISAMEWLCFRLDLLSTVAFALSLVILVSVPEGVINPSFAGLAVTYALNLNSLQATLIWTLCDLENKMISVERMLQYIDIPSEPSLVIESTRPEKSWPCRGEITICNLQVRYGPHLPMVLRGLTCTFRGGLKTGIVGRTGCGKSTLIQTLFRIVEPAAGEIRIDGINILTIGLHDLRSRLSIIPQEPTMFEGTVRSNLDPLEEYADDQIWEALDKCQLGDEIRKKELKLDSPVSENGQNWSVGQRQLVCLGRVLLKRSKVLILDEATASVDTATDTLIQETLRQHFSGCTVITIAHRISSVIDSDMVLLLDQGLIEEHDSPARLLEDKSSSFSKLVAEYTASSDSRFKRSSMKTN

SEQ ID NO: 80756 - protein, 1391 aa, Arabidopsis thaliana
  peptide (1)..(1391): Ceres Seq. ID no. 12657053
MILLDLLFTALSWGAISFYIRSQFTYSHDQKFPILLRVWWVLYFMFSCYRLLVDIALYKKQELVSVHLLLSDVLAVSVGLFLCYSCLQKQGQGERINLLLEEPLLNGAESSAATSVQLDKAEDDEVVTPFSNAGFLSHVSFSWMSPLIVLGNEKIIDSEDVPQVDNSDRAEKLFWIFRSKLEWDDGERRITTYKLIKALFFSVWRDILLSTLFAFVYTVSCYVAPYLMDTFVQYLNGQRQYSNQGVVLVTTFFVAKLVECQARRNWYFRLQKAGIGMRSVLVSMIYEKGLTLPCYSKQGHTSGEIINLMTVDAERISAFSWYMHDPWILVLQISLALLILYRSLGLGSIAAFAATFLVMLGNIPLAKLEEKFQGNLMESKDNRMKKTSEALLNMRILKLQGWEMKFLHKILDLRGIEAGWLKKFVYNSAAISSVLWAAPSFVSATAFGACMLLKIPLESGKIIAALATFRILQTPIYKLPDTISMIVQTKVSLDRIATFLCLDDLQQDGMERLPSGSSKMDVEVSNGAFSWDDSSPIPTLKDIRFKIPHGMNIAICGTVGSGKSSLLSSILGEVPKISGNLKVCGRKAYIAQSPWIQSGKVEENILFGKPMQREWYQRVLEACSLNKDLEVFPFRDQTVIGERGINLSGGQKQRIQIARALYQDADIYLFDDPFSAVDAHTGSHLFKEVLLGLLRNKTVIYVTHQLEFLPEADLILVMKDGRITQAGKYNEILESGTDFMELVGAHTDALAAVDSYEKGSASAQSTTSKESKVSNDEEKQEEDLPSPKGQLVQEEEREKGKVGFTVYQKYMKLAYGGALVPIILVVQILFQVLNIGSNYWMAWVTPVSKDVKPLVSGSTLILVYVFLATASSFCILVRAMLSAMTGFKIATELFNQMHFRIFRASMSFFDATPIGRILNRASTDQSAVDLRLPSQFSNLAIAAVNILGIIGVMGQVAWQVLIVFIPVIAACTWYRQYYISAARELARLSGISRSPLVQHFSETLSGITTIRSFDQEPRFRTDIMRLNDCYSRLRFHAISAMEWLCFRLDLLSTVAFALSLVILVSVPEGVINPSFAGLAVTYALNLNSLQATLIWTLCDLENKMISVERMLQYIDIPSEPSLVIESTRPEKSWPCRGEITICNLQVRYGPHLPMVLRGLTCTFRGGLKTGIVGRTGCGKSTLIQTLFRIVEPAAGEIRIDGINILTIGLHDLRSRLSIIPQEPTMFEGTVRSNLDPLEEYADDQIWEALDKCQLGDEIRKKELKLDSPVSENGQNWSVGQRQLVCLGRVLLKRSKVLILDEATASVDTATDTLIQETLRQHFSGCTVITIAHRISSVIDSDMVLLLDQGLIEEHDSPARLLEDKSSSFSKLVAEYTASSDSRFKRSSMKTN

SEQ ID NO: 80757 - DNA, 1656 bp, Arabidopsis thaliana
  misc_feature (1)..(1656): Ceres Seq. ID no. 12657054
  misc_feature (1)..(1656): Ortholog of  Ceres SEQ ID NO 13655660 as cited in SEQ ID NO 63727
atgagcaaggtaggctcgtcgctgtacagtcgcctccatggaatcttcaaagaatcttcaatcgccactgctaagtccgcaaaacccagaagccaaaccaaatccaccaaattccctagtaaattgaaggcatccaccgcctctgtaggagacggaggtcaatcgtcgaatgacgccaaggattctaaaaattcgaaattgacgcagaaagtagagaagttcaagagatcctgcgagtctgagagtttccggcaagtccatggactctacagtgcgtttatccgccgtctcagggaagcaaagaagttctcaacgatcgacgaagttcttcaataccagaagaagttcgatgacataaagtcggaggatttcgttatccgtataatgcttctttatggatactcaggaatggcggaacatgcgcacaaactgttcgatgaaatgcctgagctaaactgtgaaagaactgtgaagtcgttcaatgcgcttctatcggcttatgttaattcaaagaagcttgacgaggctatgaagaccttcaaggagttaccagagaagctaggtattactcctgatttggttacttataataccatgatcaaggcactttgccgtaaaggctctatggatgatatattatctatctttgaggaactggagaagaacgggttcgagcctgacttgatctctttcaacactctgttagaagagttttataggagggagttgtttgttgaaggtgataggatttgggatttgatgaaatccaagaatctttctcctaacattaggagttataactcgagagtgagaggtcttactcggaacaagaagttcactgatgcacttaacttgattgatgttatgaaaactgaagggatttccccagatgttcatacatacaatgctttaatcacggcttaccgtgttgataacaacctcgaggaggttatgaaatgttacaatgagatgaaggagaagggtctgactcctgatacagtgacttactgtatgttaatccctcttctctgcaagaaaggtgatcttgatagagcggttgaggtatccgaagaggccatcaaacacaagctcctgtctcgcccgaacatgtacaaacccgtggttgagcgtttgatgggtgcaggcaagattgatgaagcaacacagctagtgaagaatggcaagctacagagttactttcggtacctgccagacttgtccgctggtaagaaaaagaccacttccagtccagtctcttcaagtgcgaagaccacttccactccggtctcttcaagtccggatacctcttcctttctgctctctttaagtctggcggcggactcttccagctccgactccgactcttcgagtccagactcttccagctccgtctcttcgagtccagactcttccagctccgtctcttcgagtccagactcttacagctcgttctcttcgagtccagactcttccagctctgtctcttcgagtctgttctcttcaagtcgggagaactcttcaagtccggactattccaactcggtctcttcgagtttggactattccggctcggtctcttcgagttcggactattccagctcggtctttccgagtgcgaactcttccagctcttcctctgggttgttggacgattaa

SEQ ID NO: 80758 - protein, 551 aa, Arabidopsis thaliana
  peptide (1)..(551): Ceres Seq. ID no. 12657055
MSKVGSSLYSRLHGIFKESSIATAKSAKPRSQTKSTKFPSKLKASTASVGDGGQSSNDAKDSKNSKLTQKVEKFKRSCESESFRQVHGLYSAFIRRLREAKKFSTIDEVLQYQKKFDDIKSEDFVIRIMLLYGYSGMAEHAHKLFDEMPELNCERTVKSFNALLSAYVNSKKLDEAMKTFKELPEKLGITPDLVTYNTMIKALCRKGSMDDILSIFEELEKNGFEPDLISFNTLLEEFYRRELFVEGDRIWDLMKSKNLSPNIRSYNSRVRGLTRNKKFTDALNLIDVMKTEGISPDVHTYNALITAYRVDNNLEEVMKCYNEMKEKGLTPDTVTYCMLIPLLCKKGDLDRAVEVSEEAIKHKLLSRPNMYKPVVERLMGAGKIDEATQLVKNGKLQSYFRYLPDLSAGKKKTTSSPVSSSAKTTSTPVSSSPDTSSFLLSLSLAADSSSSDSDSSSPDSSSSVSSSPDSSSSVSSSPDSYSSFSSSPDSSSSVSSSLFSSSRENSSSPDYSNSVSSSLDYSGSVSSSSDYSSSVFPSANSSSSSSGLLDD

SEQ ID NO: 80759 - protein, 423 aa, Arabidopsis thaliana
  peptide (1)..(423): Ceres Seq. ID no. 12657056
MLLYGYSGMAEHAHKLFDEMPELNCERTVKSFNALLSAYVNSKKLDEAMKTFKELPEKLGITPDLVTYNTMIKALCRKGSMDDILSIFEELEKNGFEPDLISFNTLLEEFYRRELFVEGDRIWDLMKSKNLSPNIRSYNSRVRGLTRNKKFTDALNLIDVMKTEGISPDVHTYNALITAYRVDNNLEEVMKCYNEMKEKGLTPDTVTYCMLIPLLCKKGDLDRAVEVSEEAIKHKLLSRPNMYKPVVERLMGAGKIDEATQLVKNGKLQSYFRYLPDLSAGKKKTTSSPVSSSAKTTSTPVSSSPDTSSFLLSLSLAADSSSSDSDSSSPDSSSSVSSSPDSSSSVSSSPDSYSSFSSSPDSSSSVSSSLFSSSRENSSSPDYSNSVSSSLDYSGSVSSSSDYSSSVFPSANSSSSSSGLLDD

SEQ ID NO: 80760 - protein, 415 aa, Arabidopsis thaliana
  peptide (1)..(415): Ceres Seq. ID no. 12657057
MAEHAHKLFDEMPELNCERTVKSFNALLSAYVNSKKLDEAMKTFKELPEKLGITPDLVTYNTMIKALCRKGSMDDILSIFEELEKNGFEPDLISFNTLLEEFYRRELFVEGDRIWDLMKSKNLSPNIRSYNSRVRGLTRNKKFTDALNLIDVMKTEGISPDVHTYNALITAYRVDNNLEEVMKCYNEMKEKGLTPDTVTYCMLIPLLCKKGDLDRAVEVSEEAIKHKLLSRPNMYKPVVERLMGAGKIDEATQLVKNGKLQSYFRYLPDLSAGKKKTTSSPVSSSAKTTSTPVSSSPDTSSFLLSLSLAADSSSSDSDSSSPDSSSSVSSSPDSSSSVSSSPDSYSSFSSSPDSSSSVSSSLFSSSRENSSSPDYSNSVSSSLDYSGSVSSSSDYSSSVFPSANSSSSSSGLLDD

SEQ ID NO: 80761 - DNA, 1517 bp, Arabidopsis thaliana
  misc_feature (1)..(1517): Ceres Seq. ID no. 12657062
  misc_feature (1)..(1517): Ortholog of  Ceres SEQ ID NO 13594213 as cited in SEQ ID NO 57038
  misc_feature (1)..(1517): Ortholog of  Ceres SEQ ID NO 13654989 as cited in SEQ ID NO 63117
  misc_feature (1)..(1517): Ortholog of  Ceres SEQ ID NO 13584744 as cited in SEQ ID NO 69137
gcctcctaaaatcttacaacacaaaaaaaaaaaaaacatttagttaaatccaatgagagactcttcaacaactgcatccaccaaatcctcaccgttatggaaaccctttgcctcaaactgttgttccgttgatgaccaaaccgtctttggcaatctcagccgttgccgaccttcgagatcagaattctccaagaaccatctcggaccacttccttcttttcggcgactctcctttgctgatctaagccgttcttcttcggctaggatcaatgaagatcttgcacagactcttggagccgacttagtggattttcagatgtgtgaactcaagatgatcactcagagtttctccgggaactatcttctcggagaaggtgggttcggtaaagtgtataaaggttatgttgatgattatctccgacaaagtctcaaggctcagcctgttgctgtcaagctattggacattgaggggcttcaaggacatcgtgaatggctttctgaggtcatatttcttggacagctaaaacacccgaatttagtcaaacttattggttactgctgcgaagaagaggaacgagtactcatctacgagtttatgccacgtggtagcctagaaaatcacctcttcagacggatatcactatcgttgccgtgggcgacgcggctgaagatagcggtcgcagctgctaagggtttggcgtttttgcatgatttggagagtccaatcatttaccgtgatttcaaaacttctaatatactacttgattcggattttactgcaaaactctcagattttgggttggcaaaaatgggaccagaaggatccaaatctcatgtcacaactcgagtcatgggcacttatggttatgctgctcctgaatatgtttcaacagggcatttaacaacaaagagtgacgtgtatagttatggcgtcgttttactcgagctcctaacgggaagaagagccacagaaaagtcacggccaaaaaaccagcagaacatcatcgactggtcaaagccttatctaacaagcagccgccgactccgatgtgttatggacccgaggctcgctggacaatactccgtcaaggcggctaaagatacagctcttctagccttacaatgtgtgagcccaaaccctaaagaccggcccaaaatgcttgccgttgtggaagctctagagagtctcatacattataaggacatggcggtttcttctggtcattggccactgtctcctaaatctcagggcgggaaggtttccccgaaggttcgaggggatcatcggagtggtagaaaatcagctccgggttcgttaagatcgtgaacttagggttgaatgaccttataaaaaaagagagaaaataacatgtgtgatgtggtgtgtgtgtatgtgtgtatacggtcatacgtctaagagtgacatagtgagagacatatgactctcactaagaaaaaacaatgatatgaatatataaatattgtagattagggttttcgtataaaatatttaatcc

SEQ ID NO: 80762 - protein, 424 aa, Arabidopsis thaliana
  peptide (1)..(424): Ceres Seq. ID no. 12657063
MRDSSTTASTKSSPLWKPFASNCCSVDDQTVFGNLSRCRPSRSEFSKNHLGPLPSFRRLSFADLSRSSSARINEDLAQTLGADLVDFQMCELKMITQSFSGNYLLGEGGFGKVYKGYVDDYLRQSLKAQPVAVKLLDIEGLQGHREWLSEVIFLGQLKHPNLVKLIGYCCEEEERVLIYEFMPRGSLENHLFRRISLSLPWATRLKIAVAAAKGLAFLHDLESPIIYRDFKTSNILLDSDFTAKLSDFGLAKMGPEGSKSHVTTRVMGTYGYAAPEYVSTGHLTTKSDVYSYGVVLLELLTGRRATEKSRPKNQQNIIDWSKPYLTSSRRLRCVMDPRLAGQYSVKAAKDTALLALQCVSPNPKDRPKMLAVVEALESLIHYKDMAVSSGHWPLSPKSQGGKVSPKVRGDHRSGRKSAPGSLRS

SEQ ID NO: 80763 - protein, 336 aa, Arabidopsis thaliana
  peptide (1)..(336): Ceres Seq. ID no. 12657064
MCELKMITQSFSGNYLLGEGGFGKVYKGYVDDYLRQSLKAQPVAVKLLDIEGLQGHREWLSEVIFLGQLKHPNLVKLIGYCCEEEERVLIYEFMPRGSLENHLFRRISLSLPWATRLKIAVAAAKGLAFLHDLESPIIYRDFKTSNILLDSDFTAKLSDFGLAKMGPEGSKSHVTTRVMGTYGYAAPEYVSTGHLTTKSDVYSYGVVLLELLTGRRATEKSRPKNQQNIIDWSKPYLTSSRRLRCVMDPRLAGQYSVKAAKDTALLALQCVSPNPKDRPKMLAVVEALESLIHYKDMAVSSGHWPLSPKSQGGKVSPKVRGDHRSGRKSAPGSLRS

SEQ ID NO: 80764 - protein, 331 aa, Arabidopsis thaliana
  peptide (1)..(331): Ceres Seq. ID no. 12657065
MITQSFSGNYLLGEGGFGKVYKGYVDDYLRQSLKAQPVAVKLLDIEGLQGHREWLSEVIFLGQLKHPNLVKLIGYCCEEEERVLIYEFMPRGSLENHLFRRISLSLPWATRLKIAVAAAKGLAFLHDLESPIIYRDFKTSNILLDSDFTAKLSDFGLAKMGPEGSKSHVTTRVMGTYGYAAPEYVSTGHLTTKSDVYSYGVVLLELLTGRRATEKSRPKNQQNIIDWSKPYLTSSRRLRCVMDPRLAGQYSVKAAKDTALLALQCVSPNPKDRPKMLAVVEALESLIHYKDMAVSSGHWPLSPKSQGGKVSPKVRGDHRSGRKSAPGSLRS

SEQ ID NO: 80765 - DNA, 1425 bp, Arabidopsis thaliana
  misc_feature (1)..(1425): Ceres Seq. ID no. 12657078
  misc_feature (1)..(1425): Ortholog of  Ceres SEQ ID NO 14310592 as cited in SEQ ID NO 55379
atgatcgatgtcattcaaagtttaggcattgatctccattttcgacaagagatcgagcaaacccttcacatgatttacaaagaaggcctccaattcaacggtgatctccatgagatagcgcttcgctttcgattgctgagacaagagggtcactatgttcaagaaattattttcaaaaacatcctagacaagaagggtggatttaaagacgtagtaaaaaatgacgtcaagggtctaacagaattgtttgaagcttctgagctccgtgtagaaggtgaagaaacactcgacggtgcgagagaattcacatatagccgccttaatgaactttgctcaggtagagaaagtcatcaaaagcaagagataatgaagtctttggcgcaacctcgccacaaaaccgtaagaggattaacgtccaagaggttcacaagcatgatcaaaatcgcgggtcaagaagatccagaatggttacagtctctattacgagtggcggagatcgattccattaggctaaagtcattgactcaaggagaaatgtctcaaacatttaaatggtggacagaacttggtttagaaaaagatgtggagaaggcaagaagccagccgttaaaatggcatacgtggtccatgaaaattcttcaagatccgaccttaaccgaacaaaggcttgatcttaccaaaccaatatcgcttgtttatgttatagatgacattttcgatgtctatggggagctagaagaactaaccatcttcacacgagttgttgagagatgggatcataaggggcttaagacgctacccaaatacatgagggtttgttttgaagctctagatatgatcacaacggagattagcatgaagatctacaaatcacatggttggaacccgacatacgctcttcgacaatcgtgggcaagtttgtgtaaagcattcttggtagaagcaaagtggtttaattcgggttacttacccaccactgaagagtatatgaagaatggggttgtgagttcaggtgttcatttagtgatgcttcatgcctatatcttgttaggcgaagaactaacaaaagagaaagtcgaactaatagagagtaacccggggattgtatcatctgcagctacaattctcaggctctgggatgatctcggaagtgccaaggatgagaaccaagatggaactgatggatcatatgtagagtgttacctgaacgagtacaagggatcaactgttgatgaagcaagaacacatgttgcccagaagatatctagagcatggaaacgcttgaacagggagtgtctgaatccatgtccattctcaagatcattctcaaaagcttgtctcaacattgcaagaacagttcctttaatgtacagctatgatgatgatcaacgacttcccgacgaatatctcaagtctctaatgtaa

SEQ ID NO: 80766 - protein, 474 aa, Arabidopsis thaliana
  peptide (1)..(474): Ceres Seq. ID no. 12657079
MIDVIQSLGIDLHFRQEIEQTLHMIYKEGLQFNGDLHEIALRFRLLRQEGHYVQEIIFKNILDKKGGFKDVVKNDVKGLTELFEASELRVEGEETLDGAREFTYSRLNELCSGRESHQKQEIMKSLAQPRHKTVRGLTSKRFTSMIKIAGQEDPEWLQSLLRVAEIDSIRLKSLTQGEMSQTFKWWTELGLEKDVEKARSQPLKWHTWSMKILQDPTLTEQRLDLTKPISLVYVIDDIFDVYGELEELTIFTRVVERWDHKGLKTLPKYMRVCFEALDMITTEISMKIYKSHGWNPTYALRQSWASLCKAFLVEAKWFNSGYLPTTEEYMKNGVVSSGVHLVMLHAYILLGEELTKEKVELIESNPGIVSSAATILRLWDDLGSAKDENQDGTDGSYVECYLNEYKGSTVDEARTHVAQKISRAWKRLNRECLNPCPFSRSFSKACLNIARTVPLMYSYDDDQRLPDEYLKSLM

SEQ ID NO: 80767 - protein, 451 aa, Arabidopsis thaliana
  peptide (1)..(451): Ceres Seq. ID no. 12657080
MIYKEGLQFNGDLHEIALRFRLLRQEGHYVQEIIFKNILDKKGGFKDVVKNDVKGLTELFEASELRVEGEETLDGAREFTYSRLNELCSGRESHQKQEIMKSLAQPRHKTVRGLTSKRFTSMIKIAGQEDPEWLQSLLRVAEIDSIRLKSLTQGEMSQTFKWWTELGLEKDVEKARSQPLKWHTWSMKILQDPTLTEQRLDLTKPISLVYVIDDIFDVYGELEELTIFTRVVERWDHKGLKTLPKYMRVCFEALDMITTEISMKIYKSHGWNPTYALRQSWASLCKAFLVEAKWFNSGYLPTTEEYMKNGVVSSGVHLVMLHAYILLGEELTKEKVELIESNPGIVSSAATILRLWDDLGSAKDENQDGTDGSYVECYLNEYKGSTVDEARTHVAQKISRAWKRLNRECLNPCPFSRSFSKACLNIARTVPLMYSYDDDQRLPDEYLKSLM

SEQ ID NO: 80768 - protein, 352 aa, Arabidopsis thaliana
  peptide (1)..(352): Ceres Seq. ID no. 12657081
MKSLAQPRHKTVRGLTSKRFTSMIKIAGQEDPEWLQSLLRVAEIDSIRLKSLTQGEMSQTFKWWTELGLEKDVEKARSQPLKWHTWSMKILQDPTLTEQRLDLTKPISLVYVIDDIFDVYGELEELTIFTRVVERWDHKGLKTLPKYMRVCFEALDMITTEISMKIYKSHGWNPTYALRQSWASLCKAFLVEAKWFNSGYLPTTEEYMKNGVVSSGVHLVMLHAYILLGEELTKEKVELIESNPGIVSSAATILRLWDDLGSAKDENQDGTDGSYVECYLNEYKGSTVDEARTHVAQKISRAWKRLNRECLNPCPFSRSFSKACLNIARTVPLMYSYDDDQRLPDEYLKSLM

SEQ ID NO: 80769 - DNA, 1537 bp, Arabidopsis thaliana
  misc_feature (1)..(1537): Ceres Seq. ID no. 12657087
  misc_feature (1)..(1537): Ortholog of  Ceres SEQ ID NO 14312212 as cited in SEQ ID NO 54399
  misc_feature (1)..(1537): Ortholog of  Ceres SEQ ID NO 15225341 as cited in SEQ ID NO 55222
  misc_feature (1)..(1537): Ortholog of  Ceres SEQ ID NO 14311755 as cited in SEQ ID NO 57271
  misc_feature (1)..(1537): Ortholog of  Ceres SEQ ID NO 15171156 as cited in SEQ ID NO 58259
  misc_feature (1)..(1537): Ortholog of  Ceres SEQ ID NO 14302212 as cited in SEQ ID NO 66507
  misc_feature (1)..(1537): Ortholog of  Ceres SEQ ID NO 13653980 as cited in SEQ ID NO 69253
aacaacacaaagtctctctctctctgataaaatcttaaaacccacctcgagatcatagtcttcatcaattagccataaaaaagcacaatgctttcttcaatcaaaccatcttcgtcttccttctccaccgctatctccggcagcgtaaggcggtcaattcctacaaagctcaagttttctcctttactcatcatcaaaaactgccataaccaaagctttaacgctaatgttgtctcccatcaaaagcctctacacatttcatctgcttcgaatttcaagcgtgaggtcaaagtcgaagcttacgaggccgatcgttcccgtccactggacatcaacatcgagcttcccgatgaacaatccgcgcagaaactgaaaatcggaatctacttcgcaacttggtgggcacttaacgttgtcttcaacatctacaacaagaaagtcctcaatgcttttccttacccgtggcttacttcgacgttgtctctcgcttgtggttctttgatgatgcttgtctcttgggctactagaatcgcagatgctcctaaaactgatctcgagttctggaaaactctgttcccggtcgctgtagcacacacgataggacacgttgcagcaacagtgagtatgtcaaaagtagcagtttccttcacacacatcattaaaagtggtgaaccagctttcagtgtcttagtctcaagattcttcatgggagagactttccctcttcctgtctatctctctctcttaccaatcatcggaggctgcgctctcgcggccatcaccgagcttaacttcaacatcactgggtttatgggggcaatgatatcgaatttggcatttgtgttccggaatatcttttcgaagaaagggatgaaagggaagtcagtgagcggaatgaactactacgcttgcttatcgatgatgtctcttgtgatcctcactccattttctattgccgtggaaggtcctcaaatgtgggctgctggttggcaaaatgcggtttctcaagtcggaccaaactttgtctggtgggtagtggcacaaagtgtgttttaccatttgtacaatcaggtctcatacatgtcattagaccagatttcgccgttaactttcagtatcggtaatacgatgaagcggatttccgttattgttgcatcgatcatcattttccataccccgattcaaccggttaatgccctcggtgctgccattgcgatttttggaactttcctctactcacaggcgaagcagtgaggatggtttaggaggcagttttttgggtttgttttgcaaaagaaaatgaaaactaacaaaagagtagccggggaggagagaacattccggtgagatcaacatcggaaaatgcttttccccggtccatggatatgaagaaactggagcttgaagttgatagagtgtttgcttttactttttttttcattgtctcataatagattctgcacaagacaggctaattctatattatctatgttttatttagatgatcgtaataataaagatatcagtgtcatttctt

SEQ ID NO: 80770 - protein, 388 aa, Arabidopsis thaliana
  peptide (1)..(388): Ceres Seq. ID no. 12657088
MLSSIKPSSSSFSTAISGSVRRSIPTKLKFSPLLIIKNCHNQSFNANVVSHQKPLHISSASNFKREVKVEAYEADRSRPLDINIELPDEQSAQKLKIGIYFATWWALNVVFNIYNKKVLNAFPYPWLTSTLSLACGSLMMLVSWATRIADAPKTDLEFWKTLFPVAVAHTIGHVAATVSMSKVAVSFTHIIKSGEPAFSVLVSRFFMGETFPLPVYLSLLPIIGGCALAAITELNFNITGFMGAMISNLAFVFRNIFSKKGMKGKSVSGMNYYACLSMMSLVILTPFSIAVEGPQMWAAGWQNAVSQVGPNFVWWVVAQSVFYHLYNQVSYMSLDQISPLTFSIGNTMKRISVIVASIIIFHTPIQPVNALGAAIAIFGTFLYSQAKQ

SEQ ID NO: 80771 - protein, 250 aa, Arabidopsis thaliana
  peptide (1)..(250): Ceres Seq. ID no. 12657089
MMLVSWATRIADAPKTDLEFWKTLFPVAVAHTIGHVAATVSMSKVAVSFTHIIKSGEPAFSVLVSRFFMGETFPLPVYLSLLPIIGGCALAAITELNFNITGFMGAMISNLAFVFRNIFSKKGMKGKSVSGMNYYACLSMMSLVILTPFSIAVEGPQMWAAGWQNAVSQVGPNFVWWVVAQSVFYHLYNQVSYMSLDQISPLTFSIGNTMKRISVIVASIIIFHTPIQPVNALGAAIAIFGTFLYSQAKQ

SEQ ID NO: 80772 - protein, 249 aa, Arabidopsis thaliana
  peptide (1)..(249): Ceres Seq. ID no. 12657090
MLVSWATRIADAPKTDLEFWKTLFPVAVAHTIGHVAATVSMSKVAVSFTHIIKSGEPAFSVLVSRFFMGETFPLPVYLSLLPIIGGCALAAITELNFNITGFMGAMISNLAFVFRNIFSKKGMKGKSVSGMNYYACLSMMSLVILTPFSIAVEGPQMWAAGWQNAVSQVGPNFVWWVVAQSVFYHLYNQVSYMSLDQISPLTFSIGNTMKRISVIVASIIIFHTPIQPVNALGAAIAIFGTFLYSQAKQ

SEQ ID NO: 80773 - DNA, 1563 bp, Arabidopsis thaliana
  misc_feature (1)..(1563): Ceres Seq. ID no. 12657091
  misc_feature (1)..(1563): Ortholog of  Ceres SEQ ID NO 13600220 as cited in SEQ ID NO 0
atgaaaaatttaaccagtttcgtaattgttatcttactacaaagcttattgtttcatgtatatggtcgtcatcaaagttcttcgaagaacattttagtagattcatctccatttccttctgatttcctctttggtacagcttcttccgcttaccagtatgaaggtgcgttcttgactgatggaaaaagtttgaacaattgggatgtctttacgcataaaaatcctgggaaaatacttgacaagaacaatgcagatagagctgtggaccaatataatcgatttttggaggacatccaattaatgtcttttcttggagtgaacagttataggttttcaatttcttggtgtagaatcttacctagaggaagatttggagagattaattatttggggataaagtattacaacatatttatcgatgctctcattagtagagggattaaaccatttgtgacgttgaaccatgtcgactatcctcaagaactcgaggaccggtttcaaagttggttaaaccccgagatgcagaaggaatttggttatttagccgatatatgtttcaagcattttggaaaccgagttaaatactggaccacgcttaacgaaccaaatcaacaattaatcttaggctatctaacaggtaaatttccaccctctcgttgctcctcgccatacgggaactgtagccaggggaattcagaaaccgaacctttcatagccgcacataacatgatccttgcacacgcaaaagcggttaacatatacaagaccaaatatcagaaagaacaaaagggaagcattggcattgtggtacaaacatcatggtttgaacccattagtgattccaatgcggataaagaagctgctgagagagctcaatcattttactctaattggattctagatcccgttatatatgggaaatatccaaaagaaatggtagatattcttggaccagccttgccacaattttcgagcaatgaagtgaagaacttagagaagtcgagggcagatttcgttggtattaatcactatacaagttacttcattcaagattgtttgacctctgcttgtaatactggacatggagcttttaaggccgaaggatatgctctcaagttagaccggaaaggcaatgttactataggagaacttaccgatgtaaattggcagcatattgatcccacaggattccacaagatgctgaattatttaaaagataggtacccaaacatgccaatgttcataactgaaaacggttttggagacttgcaaaaacctgaaacaacggataaagaacttctaaatgatacaaaaaggatccaatacatgagtggatacttagaagctttacaagcagcaatgagggatggagcaaatgtgaagggttattttgtgtggtcactattagacaattttgagtggttgttcggatacaaggttcggtttggtctattccatgtggatctaacaactcttaaaaggtcaccgaaacaatcagcttcatggtacaaaaattatatcgaagaacacgtgaatcgaagagatatcgtagataattattaa

SEQ ID NO: 80774 - protein, 520 aa, Arabidopsis thaliana
  peptide (1)..(520): Ceres Seq. ID no. 12657092
MKNLTSFVIVILLQSLLFHVYGRHQSSSKNILVDSSPFPSDFLFGTASSAYQYEGAFLTDGKSLNNWDVFTHKNPGKILDKNNADRAVDQYNRFLEDIQLMSFLGVNSYRFSISWCRILPRGRFGEINYLGIKYYNIFIDALISRGIKPFVTLNHVDYPQELEDRFQSWLNPEMQKEFGYLADICFKHFGNRVKYWTTLNEPNQQLILGYLTGKFPPSRCSSPYGNCSQGNSETEPFIAAHNMILAHAKAVNIYKTKYQKEQKGSIGIVVQTSWFEPISDSNADKEAAERAQSFYSNWILDPVIYGKYPKEMVDILGPALPQFSSNEVKNLEKSRADFVGINHYTSYFIQDCLTSACNTGHGAFKAEGYALKLDRKGNVTIGELTDVNWQHIDPTGFHKMLNYLKDRYPNMPMFITENGFGDLQKPETTDKELLNDTKRIQYMSGYLEALQAAMRDGANVKGYFVWSLLDNFEWLFGYKVRFGLFHVDLTTLKRSPKQSASWYKNYIEEHVNRRDIVDNY

SEQ ID NO: 80775 - protein, 420 aa, Arabidopsis thaliana
  peptide (1)..(420): Ceres Seq. ID no. 12657093
MSFLGVNSYRFSISWCRILPRGRFGEINYLGIKYYNIFIDALISRGIKPFVTLNHVDYPQELEDRFQSWLNPEMQKEFGYLADICFKHFGNRVKYWTTLNEPNQQLILGYLTGKFPPSRCSSPYGNCSQGNSETEPFIAAHNMILAHAKAVNIYKTKYQKEQKGSIGIVVQTSWFEPISDSNADKEAAERAQSFYSNWILDPVIYGKYPKEMVDILGPALPQFSSNEVKNLEKSRADFVGINHYTSYFIQDCLTSACNTGHGAFKAEGYALKLDRKGNVTIGELTDVNWQHIDPTGFHKMLNYLKDRYPNMPMFITENGFGDLQKPETTDKELLNDTKRIQYMSGYLEALQAAMRDGANVKGYFVWSLLDNFEWLFGYKVRFGLFHVDLTTLKRSPKQSASWYKNYIEEHVNRRDIVDNY

SEQ ID NO: 80776 - protein, 347 aa, Arabidopsis thaliana
  peptide (1)..(347): Ceres Seq. ID no. 12657094
MQKEFGYLADICFKHFGNRVKYWTTLNEPNQQLILGYLTGKFPPSRCSSPYGNCSQGNSETEPFIAAHNMILAHAKAVNIYKTKYQKEQKGSIGIVVQTSWFEPISDSNADKEAAERAQSFYSNWILDPVIYGKYPKEMVDILGPALPQFSSNEVKNLEKSRADFVGINHYTSYFIQDCLTSACNTGHGAFKAEGYALKLDRKGNVTIGELTDVNWQHIDPTGFHKMLNYLKDRYPNMPMFITENGFGDLQKPETTDKELLNDTKRIQYMSGYLEALQAAMRDGANVKGYFVWSLLDNFEWLFGYKVRFGLFHVDLTTLKRSPKQSASWYKNYIEEHVNRRDIVDNY

SEQ ID NO: 80777 - DNA, 3651 bp, Arabidopsis thaliana
  misc_feature (1)..(3651): Ceres Seq. ID no. 12657104
  misc_feature (1)..(3651): Ortholog of  Ceres SEQ ID NO 14306557 as cited in SEQ ID NO 53442
atgttgacaaagttcgaaaccaaaagtaacagagttaagggactgagttttcaccctaaacgaccatggattctcgcgagtttgcacagtggcgtgatccagctctgggattatcgtatgggtactttgatcgatagattcgacgaacacgaaggacctgttcgtggtgttcatttccacaattctcagcctctcttcgtctccggaggggatgattacaagattaaagtgtggaactacaaaaaccacaggtgccttttcactcttctagggcatcttgattatatccgcacggttcagttccatcatgagtacccatggattgtgagtgcaagtgatgatcaaactatccgtatatggaactggcaatcacggacttgtgtttctgtattgactggtcacaatcattatgttatgtgtgcttctttccatccgaaagaagacctcgtcgtatcagcttcgttagatcagactgttcgtgtttgggatattggtgctcttaggaagaagactgtatctcctgctgatgatatcatgaggttgactcagatgaatagtgatctttttggtggagttgatgccattgtcaagtacgttcttgaaggtcatgatagaggtgtaaactgggctgcttttcatcccaccctgcctcttattgtctcgggtgcagatgaccgccaagtaaagctgtggcgtatgaatgaaactaaagcttgggaggtggatacattgcgaggccatatgaataacgtttcatctgttatgttccatgcaaaacaggacataattgtatcaaactctgaagataagagcatccgtgtctgggatgctaccaagcgaactggacttcagactttccgtcgtgaacatgatagattctggattcttgcagttcaccctgagatgaatctactagcagcaggacatgacagtggcatgattgtgttcaagcttgagagagaacgtcctgcatttgctttgagtggggattctttgttctatgccaaggatagattcttgcggtactatgaatattcaactcaaagggattcccaagttatccctatacggcgtccgggtactccaagcttgaatcaaagtcctaggactctatcatacagtcccactgaaaatgcagttttgatctgctcagatctggatggtggttcgtatgagttgtacatcataccgaaagatagtgttggcaggagtgacgttgtgcaagatgcaaagagagggacaggtggctctgcagtattcattgcccgtaaccgatttgctgttctcgagaaaagcaccagccaagtgctagtcaagaatctaaagaatgaggtggttaaaaagagtcctctgcctattcccacagatgctatcttttatgctgggactgggaatttgctttgtagatctgaggataaagtagttatctttgacctccagcaaaggcttgttcttggtgagcttcagacaccatttgttaggtacgttgtttggtccagtgatatggagagtgttgctttgctcagcaaacatactatcattatcgcgagcaaaaaacttgttctccagtgcacgcttcatgagacgatacgtgtgaaaagtggagcttgggacgataatggtgtcttcatttacacaactttgaatcatatcaagtactgtcttcctaatggagatagtggaatcatccgaaccctggatgtcccaatctatatcaccaaggtgtctggtaatacaatcttttgcttggatcgggatggcaaaaacaaggctatcaccattaatgcaaccgagtacattttcaagctttcactgctgaggaagagatatgatcatgtcatgagcatgataaagaactctcagctatgtggacaggctatgattgcttacctgcagcagaaaggattccctgaagttgccctccattttgttgaagatgagaggatccgattcaatctggctcttgaaagtggcaacatcagtgtggctgttgcatccgctacacagattaacgagaaagaccactggtatagacttggagtggaggctcttcgccaaggtaattctggaattgttgagtttgcataccagcagacaaagaactttgagaggttatcttttctttatctcattactggaaatttggacaagctttcaaagttgatgaagattgcagaagtgaagaacaacgtaatgggacagtttcacaatgctctctacctaggagatgttaaagagcgtgttaagatactggagaatgctggtcatttgcctctagcttatatcacagcttcggttcatggtttaaatgacattgctgagcgactggcaactgagttaggagacaacgtgccctcattgcctgaaggaaaaactccatcgcttctaatgccaccgacacccatcatgtgtggtggtgattggcctcttcttagagtgatgaaaggaatatttgaaggaggacttgagagtgcagacagaggaggtactgttgatgaagaagatgttgaaggggattggggtgaggaacttgacattaatgttgatggaatggagaacagagatattgaagacattttggcggctgcagaagcaggtgaagaagaaaacgatgaggaaggtggatggggacttgaagacttggtgctcccaccagagcttgacactcctaaagcctctgctaatgcacgttcatctgtttttgtgacacctccccaaggtatgcccgtaagtcagagctggagccagaaatcttctcttgctgctgagcaagccgcagcgggaagcttcgacactgcaatgcgtctgctccacagacagcttggtatcaagaactttacacctttgaaatcgatgtttctagatctgttcaatggcagccatagctatctgcgtgctttttcttcatgtcctgtggttccacttgccattgagcgtggatggagcgagtcttccagtcccaacgtccgtagcccaccagctcttgtttatgatttctctcagctagacgagaagctcaaatccggctacaaagctacaacaactgggaaattcactgaggctctccgtctcttcctttctatcctgcacaccatccctctagtggtagtcgagacaagaagagaagtggatgaggtcaaggaattaatcgttatcgttaaagaatatgtccttggtcttcaaatggagctcaagaggagagagatgaaagatgatccggtgaggcagcaagagctcgctgcttacttcactcactgcaacctccaaacacctcacttacggcttgcgctgcttagtgcaatgggtgtctgctacaaggcaaagaacctcgccactgcttctaatttcgccagaagactgttggaaacaagcccagttgatagccaagccaagatggctagacaagttgtgcaagccgctgaacgtaacatgaccgatgaaacaaagcttaactacgacttcaggaacccttttgtggtatgtggttccacatatgtcccgatctacagaggacagaaagacgtctcatgtccttactgcaccgcccggtttgtaccaaaccaggaaggaaacatctgcacggtctgtgatctagcagtgattggcgcagacgcatctggtttgttatgctctccatctcaagtccggtga

SEQ ID NO: 80778 - protein, 1216 aa, Arabidopsis thaliana
  peptide (1)..(1216): Ceres Seq. ID no. 12657105
MLTKFETKSNRVKGLSFHPKRPWILASLHSGVIQLWDYRMGTLIDRFDEHEGPVRGVHFHNSQPLFVSGGDDYKIKVWNYKNHRCLFTLLGHLDYIRTVQFHHEYPWIVSASDDQTIRIWNWQSRTCVSVLTGHNHYVMCASFHPKEDLVVSASLDQTVRVWDIGALRKKTVSPADDIMRLTQMNSDLFGGVDAIVKYVLEGHDRGVNWAAFHPTLPLIVSGADDRQVKLWRMNETKAWEVDTLRGHMNNVSSVMFHAKQDIIVSNSEDKSIRVWDATKRTGLQTFRREHDRFWILAVHPEMNLLAAGHDSGMIVFKLERERPAFALSGDSLFYAKDRFLRYYEYSTQRDSQVIPIRRPGTPSLNQSPRTLSYSPTENAVLICSDLDGGSYELYIIPKDSVGRSDVVQDAKRGTGGSAVFIARNRFAVLEKSTSQVLVKNLKNEVVKKSPLPIPTDAIFYAGTGNLLCRSEDKVVIFDLQQRLVLGELQTPFVRYVVWSSDMESVALLSKHTIIIASKKLVLQCTLHETIRVKSGAWDDNGVFIYTTLNHIKYCLPNGDSGIIRTLDVPIYITKVSGNTIFCLDRDGKNKAITINATEYIFKLSLLRKRYDHVMSMIKNSQLCGQAMIAYLQQKGFPEVALHFVEDERIRFNLALESGNISVAVASATQINEKDHWYRLGVEALRQGNSGIVEFAYQQTKNFERLSFLYLITGNLDKLSKLMKIAEVKNNVMGQFHNALYLGDVKERVKILENAGHLPLAYITASVHGLNDIAERLATELGDNVPSLPEGKTPSLLMPPTPIMCGGDWPLLRVMKGIFEGGLESADRGGTVDEEDVEGDWGEELDINVDGMENRDIEDILAAAEAGEEENDEEGGWGLEDLVLPPELDTPKASANARSSVFVTPPQGMPVSQSWSQKSSLAAEQAAAGSFDTAMRLLHRQLGIKNFTPLKSMFLDLFNGSHSYLRAFSSCPVVPLAIERGWSESSSPNVRSPPALVYDFSQLDEKLKSGYKATTTGKFTEALRLFLSILHTIPLVVVETRREVDEVKELIVIVKEYVLGLQMELKRREMKDDPVRQQELAAYFTHCNLQTPHLRLALLSAMGVCYKAKNLATASNFARRLLETSPVDSQAKMARQVVQAAERNMTDETKLNYDFRNPFVVCGSTYVPIYRGQKDVSCPYCTARFVPNQEGNICTVCDLAVIGADASGLLCSPSQVR

SEQ ID NO: 80779 - protein, 1177 aa, Arabidopsis thaliana
  peptide (1)..(1177): Ceres Seq. ID no. 12657106
MGTLIDRFDEHEGPVRGVHFHNSQPLFVSGGDDYKIKVWNYKNHRCLFTLLGHLDYIRTVQFHHEYPWIVSASDDQTIRIWNWQSRTCVSVLTGHNHYVMCASFHPKEDLVVSASLDQTVRVWDIGALRKKTVSPADDIMRLTQMNSDLFGGVDAIVKYVLEGHDRGVNWAAFHPTLPLIVSGADDRQVKLWRMNETKAWEVDTLRGHMNNVSSVMFHAKQDIIVSNSEDKSIRVWDATKRTGLQTFRREHDRFWILAVHPEMNLLAAGHDSGMIVFKLERERPAFALSGDSLFYAKDRFLRYYEYSTQRDSQVIPIRRPGTPSLNQSPRTLSYSPTENAVLICSDLDGGSYELYIIPKDSVGRSDVVQDAKRGTGGSAVFIARNRFAVLEKSTSQVLVKNLKNEVVKKSPLPIPTDAIFYAGTGNLLCRSEDKVVIFDLQQRLVLGELQTPFVRYVVWSSDMESVALLSKHTIIIASKKLVLQCTLHETIRVKSGAWDDNGVFIYTTLNHIKYCLPNGDSGIIRTLDVPIYITKVSGNTIFCLDRDGKNKAITINATEYIFKLSLLRKRYDHVMSMIKNSQLCGQAMIAYLQQKGFPEVALHFVEDERIRFNLALESGNISVAVASATQINEKDHWYRLGVEALRQGNSGIVEFAYQQTKNFERLSFLYLITGNLDKLSKLMKIAEVKNNVMGQFHNALYLGDVKERVKILENAGHLPLAYITASVHGLNDIAERLATELGDNVPSLPEGKTPSLLMPPTPIMCGGDWPLLRVMKGIFEGGLESADRGGTVDEEDVEGDWGEELDINVDGMENRDIEDILAAAEAGEEENDEEGGWGLEDLVLPPELDTPKASANARSSVFVTPPQGMPVSQSWSQKSSLAAEQAAAGSFDTAMRLLHRQLGIKNFTPLKSMFLDLFNGSHSYLRAFSSCPVVPLAIERGWSESSSPNVRSPPALVYDFSQLDEKLKSGYKATTTGKFTEALRLFLSILHTIPLVVVETRREVDEVKELIVIVKEYVLGLQMELKRREMKDDPVRQQELAAYFTHCNLQTPHLRLALLSAMGVCYKAKNLATASNFARRLLETSPVDSQAKMARQVVQAAERNMTDETKLNYDFRNPFVVCGSTYVPIYRGQKDVSCPYCTARFVPNQEGNICTVCDLAVIGADASGLLCSPSQVR

SEQ ID NO: 80780 - protein, 1078 aa, Arabidopsis thaliana
  peptide (1)..(1078): Ceres Seq. ID no. 12657107
MCASFHPKEDLVVSASLDQTVRVWDIGALRKKTVSPADDIMRLTQMNSDLFGGVDAIVKYVLEGHDRGVNWAAFHPTLPLIVSGADDRQVKLWRMNETKAWEVDTLRGHMNNVSSVMFHAKQDIIVSNSEDKSIRVWDATKRTGLQTFRREHDRFWILAVHPEMNLLAAGHDSGMIVFKLERERPAFALSGDSLFYAKDRFLRYYEYSTQRDSQVIPIRRPGTPSLNQSPRTLSYSPTENAVLICSDLDGGSYELYIIPKDSVGRSDVVQDAKRGTGGSAVFIARNRFAVLEKSTSQVLVKNLKNEVVKKSPLPIPTDAIFYAGTGNLLCRSEDKVVIFDLQQRLVLGELQTPFVRYVVWSSDMESVALLSKHTIIIASKKLVLQCTLHETIRVKSGAWDDNGVFIYTTLNHIKYCLPNGDSGIIRTLDVPIYITKVSGNTIFCLDRDGKNKAITINATEYIFKLSLLRKRYDHVMSMIKNSQLCGQAMIAYLQQKGFPEVALHFVEDERIRFNLALESGNISVAVASATQINEKDHWYRLGVEALRQGNSGIVEFAYQQTKNFERLSFLYLITGNLDKLSKLMKIAEVKNNVMGQFHNALYLGDVKERVKILENAGHLPLAYITASVHGLNDIAERLATELGDNVPSLPEGKTPSLLMPPTPIMCGGDWPLLRVMKGIFEGGLESADRGGTVDEEDVEGDWGEELDINVDGMENRDIEDILAAAEAGEEENDEEGGWGLEDLVLPPELDTPKASANARSSVFVTPPQGMPVSQSWSQKSSLAAEQAAAGSFDTAMRLLHRQLGIKNFTPLKSMFLDLFNGSHSYLRAFSSCPVVPLAIERGWSESSSPNVRSPPALVYDFSQLDEKLKSGYKATTTGKFTEALRLFLSILHTIPLVVVETRREVDEVKELIVIVKEYVLGLQMELKRREMKDDPVRQQELAAYFTHCNLQTPHLRLALLSAMGVCYKAKNLATASNFARRLLETSPVDSQAKMARQVVQAAERNMTDETKLNYDFRNPFVVCGSTYVPIYRGQKDVSCPYCTARFVPNQEGNICTVCDLAVIGADASGLLCSPSQVR

SEQ ID NO: 80781 - DNA, 1314 bp, Arabidopsis thaliana
  misc_feature (1)..(1314): Ceres Seq. ID no. 12657123
  misc_feature (1)..(1314): Ortholog of  Ceres SEQ ID NO 13595727 as cited in SEQ ID NO 57082
atgtattctctgattctccatggaagaaagttggtccagttgcagaaatggcgccatttgagggtttcagtgaatctttttcaaaatggatcagctttttccaataccttctcctcctctgctattgctgctgatgtgagctcaagagatggtcgaaaaggtcacaactttacagtttcttacctcgttgattcattaggtttagctacaaaagtcgctgaatcgatctccatgaaagtcagtttcgataacaagggcaaccctgattctgttctgagtcttttgagaagtcatgggttcactgattctcagatctccaacatcattaggactttcccaagattgcttatcctagatgctgagaaatcccttgctcccaagcttcagtttctgcagtccataggtgcttcaagctctgagctcaccgagactgtttctgcagttccgaaaatattggggaagagaaagggcaaatctctcagcagatactatgatttcgtcaaagtcattatagaagcggataagagttccaagttagaaaagttatgtcattctttgccagagggtagtaagcaggagaacaaaatcagaaatttattggtgttgagagaaatgggtgtgcctcagaggttgttattctcattgcttatatccgatgccggagatgtttgtggtaaagaaaaatttaaagaatcactcaagaaggctgttgagattggttttgatccaaccaccgcaacttttgtcaaagctcttaacgttctttacggattaagcgacaaaggaattgaaaataaattcaatgcctgtaaaaggttaggcttggctgtggacgatgtatgggcaatgttcaagaagtggccaaacattctgacaaagtctgagaagaagatagagaactccgttgaaacatttctaggcctaggattcagcagagatgagtttttgatgatggtcaagcgattccctcagtgcattggatattctacagagttgatgaagacgaagactgagtttctggtgacggagatgaattggccactaaaggctgtggcttcaatccctcaggtactcggatacagcctagagaagaggactgtcccaaggtgtaatgttatcaaagttctcatctcaaaaggattgctcgaaagtgaactccctccaatatcctctgttttgacaagtaccagtgaggtgtttttatatatgtatgttaggaaacatgatgacaagcagcttgtggctgagttgatggctatcttcaccggagatcgtgtttcactcaccgatcagaagacacgcctagaacaatga

SEQ ID NO: 80782 - protein, 437 aa, Arabidopsis thaliana
  peptide (1)..(437): Ceres Seq. ID no. 12657124
MYSLILHGRKLVQLQKWRHLRVSVNLFQNGSAFSNTFSSSAIAADVSSRDGRKGHNFTVSYLVDSLGLATKVAESISMKVSFDNKGNPDSVLSLLRSHGFTDSQISNIIRTFPRLLILDAEKSLAPKLQFLQSIGASSSELTETVSAVPKILGKRKGKSLSRYYDFVKVIIEADKSSKLEKLCHSLPEGSKQENKIRNLLVLREMGVPQRLLFSLLISDAGDVCGKEKFKESLKKAVEIGFDPTTATFVKALNVLYGLSDKGIENKFNACKRLGLAVDDVWAMFKKWPNILTKSEKKIENSVETFLGLGFSRDEFLMMVKRFPQCIGYSTELMKTKTEFLVTEMNWPLKAVASIPQVLGYSLEKRTVPRCNVIKVLISKGLLESELPPISSVLTSTSEVFLYMYVRKHDDKQLVAELMAIFTGDRVSLTDQKTRLEQ

SEQ ID NO: 80783 - protein, 360 aa, Arabidopsis thaliana
  peptide (1)..(360): Ceres Seq. ID no. 12657125
MKVSFDNKGNPDSVLSLLRSHGFTDSQISNIIRTFPRLLILDAEKSLAPKLQFLQSIGASSSELTETVSAVPKILGKRKGKSLSRYYDFVKVIIEADKSSKLEKLCHSLPEGSKQENKIRNLLVLREMGVPQRLLFSLLISDAGDVCGKEKFKESLKKAVEIGFDPTTATFVKALNVLYGLSDKGIENKFNACKRLGLAVDDVWAMFKKWPNILTKSEKKIENSVETFLGLGFSRDEFLMMVKRFPQCIGYSTELMKTKTEFLVTEMNWPLKAVASIPQVLGYSLEKRTVPRCNVIKVLISKGLLESELPPISSVLTSTSEVFLYMYVRKHDDKQLVAELMAIFTGDRVSLTDQKTRLEQ

SEQ ID NO: 80784 - protein, 233 aa, Arabidopsis thaliana
  peptide (1)..(233): Ceres Seq. ID no. 12657126
MGVPQRLLFSLLISDAGDVCGKEKFKESLKKAVEIGFDPTTATFVKALNVLYGLSDKGIENKFNACKRLGLAVDDVWAMFKKWPNILTKSEKKIENSVETFLGLGFSRDEFLMMVKRFPQCIGYSTELMKTKTEFLVTEMNWPLKAVASIPQVLGYSLEKRTVPRCNVIKVLISKGLLESELPPISSVLTSTSEVFLYMYVRKHDDKQLVAELMAIFTGDRVSLTDQKTRLEQ

SEQ ID NO: 80785 - DNA, 888 bp, Arabidopsis thaliana
  misc_feature (1)..(888): Ceres Seq. ID no. 12657135
  misc_feature (1)..(888): Ortholog of  Ceres SEQ ID NO 14305259 as cited in SEQ ID NO 58247
atggctgtatcatttcaaaccaagaaccctctaagacccatcaccaacatcccaagaagctatggtccaacgcgtgtacgtgtcacatgctctgttactaccaccaatcctcagcttaatcatgagaaccttgtagttgagaaacgccttgtgaatcctcctctttccaagaacaacgacccgactctgcaatcgacatggactcatcggttatgggttgcagcgggaagtacaaccatatttgcctctttcgctaaatctatcattggagggtttggttctcatctttggctccaaccagctttagcgtgttatgcagggtacgtgtttgctgatctaggctccggtgtttaccactgggccattgataactatggtggtgcatcaacacctatagttggagcccaacttgaagcgtctcagggtcatcacaagtatccctggacaatcacaaaacgtcaattcgccaacaattcatacactatcgctcgagccataacttttatagttctaccactaaaccttgcaattaacaatcctctgtttcatagctttgtgagcacatttgcattttgcattttgttaagccaacaattccatgcttgggctcatggaaccaagagcaagcttccacctctcgtgatggcgttgcaggacatgggactgcttgtctcacggaaagatcacccgggacatcaccaagcaccgtataacagcaactactgtgtagtgagtggggcatggaacaaagttttggacgaaagtaacttatttaaggcattggagatggcgttgtttttccagttcggtgtgagaccaaactcgtggaacgagccaaactctgactggacagaagaaaccgagactaatttctttacaaagatttaa

SEQ ID NO: 80786 - protein, 295 aa, Arabidopsis thaliana
  peptide (1)..(295): Ceres Seq. ID no. 12657136
MAVSFQTKNPLRPITNIPRSYGPTRVRVTCSVTTTNPQLNHENLVVEKRLVNPPLSKNNDPTLQSTWTHRLWVAAGSTTIFASFAKSIIGGFGSHLWLQPALACYAGYVFADLGSGVYHWAIDNYGGASTPIVGAQLEASQGHHKYPWTITKRQFANNSYTIARAITFIVLPLNLAINNPLFHSFVSTFAFCILLSQQFHAWAHGTKSKLPPLVMALQDMGLLVSRKDHPGHHQAPYNSNYCVVSGAWNKVLDESNLFKALEMALFFQFGVRPNSWNEPNSDWTEETETNFFTKI

SEQ ID NO: 80787 - DNA, 1038 bp, Arabidopsis thaliana
  misc_feature (1)..(1038): Ceres Seq. ID no. 12657177
  misc_feature (1)..(1038): Ortholog of  Ceres SEQ ID NO 13593889 as cited in SEQ ID NO 53305
  misc_feature (1)..(1038): Ortholog of  Ceres SEQ ID NO 13581959 as cited in SEQ ID NO 56156
  misc_feature (1)..(1038): Ortholog of  Ceres SEQ ID NO 15171809 as cited in SEQ ID NO 57329
atggagaagaagagatttgacagtatggaatcttggtcgatgatcctcgagtccgagaacgtggagacatgggaagcttctaaaggcgaaagagaggaatggaccgcagatctttcgcagctatttatcggaaacaaatttgcttccggagcacactctagaatatacagagggatctacaaacaaagagccgttgccgtgaagatggtgaggatcccaacacacaaggaagagacaagggctaagcttgaacaacagtttaagtccgaggttgctctgctttctcgtctctttcaccctaacatcgttcagttcattgcggcgtgcaagaaaccgccggtgtactgcattataacagagtacatgtcacaaggaaacctccgaatgtacctaaacaagaaagagccttactcgctttcgatcgagaccgtactaaggctggctctagacatctcaagaggaatggagtatcttcactcgcaaggtgttatccacagagacctaaagtccaacaatttgcttttgaacgacgagatgagagttaaagttgcagactttgggacatcttgtcttgagacgcaatgcagagaggccaagggtaacatgggaacttatagatggatggctccagagatgatcaaggagaagccttataccagaaaagtcgatgtttatagctttggcatcgttctatgggaactcaccaccgcgttgcttccgttccaaggcatgactcctgtgcaagccgcattcgcagtcgctgaaaagaacgaaagaccaccattgccggcgagctgtcaaccagcgctagctcatctaatcaagaggtgttggtcagagaatccgtcgaagcggccagacttctcaaacatagtggcggtgctagagaagtacgacgagtgtgtcaaagaaggactgcctttgacgtcacacgcaagcctaacgaagacaaagaaagctattcttgatcaccttaaaggctgtgtcacatccattagctcaccattttcttcctcctctgttcctgtaaatgcctag

SEQ ID NO: 80788 - protein, 345 aa, Arabidopsis thaliana
  peptide (1)..(345): Ceres Seq. ID no. 12657178
MEKKRFDSMESWSMILESENVETWEASKGEREEWTADLSQLFIGNKFASGAHSRIYRGIYKQRAVAVKMVRIPTHKEETRAKLEQQFKSEVALLSRLFHPNIVQFIAACKKPPVYCIITEYMSQGNLRMYLNKKEPYSLSIETVLRLALDISRGMEYLHSQGVIHRDLKSNNLLLNDEMRVKVADFGTSCLETQCREAKGNMGTYRWMAPEMIKEKPYTRKVDVYSFGIVLWELTTALLPFQGMTPVQAAFAVAEKNERPPLPASCQPALAHLIKRCWSENPSKRPDFSNIVAVLEKYDECVKEGLPLTSHASLTKTKKAILDHLKGCVTSISSPFSSSSVPVNA

SEQ ID NO: 80789 - protein, 337 aa, Arabidopsis thaliana
  peptide (1)..(337): Ceres Seq. ID no. 12657179
MESWSMILESENVETWEASKGEREEWTADLSQLFIGNKFASGAHSRIYRGIYKQRAVAVKMVRIPTHKEETRAKLEQQFKSEVALLSRLFHPNIVQFIAACKKPPVYCIITEYMSQGNLRMYLNKKEPYSLSIETVLRLALDISRGMEYLHSQGVIHRDLKSNNLLLNDEMRVKVADFGTSCLETQCREAKGNMGTYRWMAPEMIKEKPYTRKVDVYSFGIVLWELTTALLPFQGMTPVQAAFAVAEKNERPPLPASCQPALAHLIKRCWSENPSKRPDFSNIVAVLEKYDECVKEGLPLTSHASLTKTKKAILDHLKGCVTSISSPFSSSSVPVNA

SEQ ID NO: 80790 - protein, 332 aa, Arabidopsis thaliana
  peptide (1)..(332): Ceres Seq. ID no. 12657180
MILESENVETWEASKGEREEWTADLSQLFIGNKFASGAHSRIYRGIYKQRAVAVKMVRIPTHKEETRAKLEQQFKSEVALLSRLFHPNIVQFIAACKKPPVYCIITEYMSQGNLRMYLNKKEPYSLSIETVLRLALDISRGMEYLHSQGVIHRDLKSNNLLLNDEMRVKVADFGTSCLETQCREAKGNMGTYRWMAPEMIKEKPYTRKVDVYSFGIVLWELTTALLPFQGMTPVQAAFAVAEKNERPPLPASCQPALAHLIKRCWSENPSKRPDFSNIVAVLEKYDECVKEGLPLTSHASLTKTKKAILDHLKGCVTSISSPFSSSSVPVNA

SEQ ID NO: 80791 - DNA, 450 bp, Arabidopsis thaliana
  misc_feature (1)..(450): Ceres Seq. ID no. 12657189
  misc_feature (1)..(450): Ortholog of  Ceres SEQ ID NO 13599506 as cited in SEQ ID NO 334
  misc_feature (1)..(450): Ortholog of  Ceres SEQ ID NO 15172970 as cited in SEQ ID NO 51736
  misc_feature (1)..(450): Ortholog of  Ceres SEQ ID NO 13598157 as cited in SEQ ID NO 61570
  misc_feature (1)..(450): Ortholog of  Ceres SEQ ID NO 15173774 as cited in SEQ ID NO 61771
  misc_feature (1)..(450): Ortholog of  Ceres SEQ ID NO 15175549 as cited in SEQ ID NO 0
atggcttcaagaaccacaaaatctttagctcttttcttgatcctcaacttccttttcttcacaacaatatccgcctgcggtaactgcggttgcccttctcccaagccaaaacataaacctagcccctctcccaagccaaaacctaaccctaaacccaagccaacaccacaccctagtcctagcccggcaatagccaaatgccctagagacgcccttaagctaggagtttgcgccaacgtactcaacggcctactaaacgtaacccttggcaagccaccggtcgagccatgttgcaccctcatccaaggactcgctgatcttgaggctgcagcttgtctttgcactgcgctcaaggctaacatcctcggtatcaacctgaatatcccactctctctcagtcttcttctcaatgtttgcagcaaaaaagttcctcgtggcttccaatgctaa

SEQ ID NO: 80792 - protein, 149 aa, Arabidopsis thaliana
  peptide (1)..(149): Ceres Seq. ID no. 12657190
MASRTTKSLALFLILNFLFFTTISACGNCGCPSPKPKHKPSPSPKPKPNPKPKPTPHPSPSPAIAKCPRDALKLGVCANVLNGLLNVTLGKPPVEPCCTLIQGLADLEAAACLCTALKANILGINLNIPLSLSLLLNVCSKKVPRGFQC

SEQ ID NO: 80793 - DNA, 1643 bp, Arabidopsis thaliana
  misc_feature (1)..(1643): Ceres Seq. ID no. 12657219
  misc_feature (1)..(1643): Ortholog of  Ceres SEQ ID NO 13637473 as cited in SEQ ID NO 53391
  misc_feature (1)..(1643): Ortholog of  Ceres SEQ ID NO 15170670 as cited in SEQ ID NO 68165
ctctttctctctcttttgtttctcgctgccatggctaagtcttgctatttcagaccagctcttcttcttctgttagttcttttggttcatgccgagtcacgcggtcggttcgagccaaagattcttatgccgacagaggaagctaacccggctgaccaagacgaagatggtgtcggtacaagatgggcggttctcgtcgctggttcttctggatatggaaactacagacaccaggctgacgtgtgtcacgcatatcaaatactaagaaaaggaggtttaaaggaagaaaacatagtcgttttgatgtatgatgatatcgcaaaccacccacttaatcctcgtccgggtactctcatcaaccatcctgacggtgacgatgtttacgccggagtccctaaggactatactggtagtagcgttacggctgcaaacttctacgctgtactcctaggcgaccagaaggctgttaaaggtggaagcggtaaggtcatcgctagcaagcccaacgatcacattttcgtatattatgcggatcatggtggtcccggagttcttgggatgccaaatacgcctcacatatatgcagctgattttattgaaacgcttaagaagaagcatgcttccggaacatacaaagagatggttatatacgtagaagcgtgtgaaagtgggagtattttcgaagggataatgccaaaggacttgaacatttacgtaacaacggcttcaaatgcacaagagagtagttatggaacatattgtcctggcatgaatccgtcacccccatctgaatatatcacttgcttaggggatttatatagtgttgcttggatggaagatagtgagactcacaatttaaagaaagagaccataaagcaacaataccacacggtgaagatgaggacatcaaactacaatacctactcaggtggctctcatgtgatggaatacggtaacaatagtattaagtcggagaagctttatctttaccaagggtttgatccagccaccgttaatctcccactaaacgaattaccggtcaagtcaaaaataggagtcgttaaccaacgcgacgcggaccttctcttcctttggcatatgtatcggacatcggaagatgggtcaaggaagaaggatgacacattgaaggaattaactgagacaacaaggcataggaaacatttagatgcaagcgtcgaattgatagccacaattttgtttggtccgacgatgaatgttcttaacttggttagagaacccggtttgcctttggttgacgattgggaatgtcttaaatcgatggtacgtgtatttgaagagcattgtggatcactaacgcaatatgggatgaaacatatgcgagcgtttgcaaacgtttgtaacaacggtgtgtccaaagagctgatggaggaagcttctactgcggcatgcggtggttatagtgaggctcgctacacggtgcatccatcaatcttaggctatagcgcctgagagattttgaggcttttctgattttcaagtgtttcgaattataacgttaaagatgtcaaaataaaagaaatgtttagtatgtaaatacgtacgtagcaataaggtcgtctaacttttttttatcgattgttatctttttaataaaactttgc

SEQ ID NO: 80794 - protein, 496 aa, Arabidopsis thaliana
  peptide (1)..(496): Ceres Seq. ID no. 12657220
LFLSLLFLAAMAKSCYFRPALLLLLVLLVHAESRGRFEPKILMPTEEANPADQDEDGVGTRWAVLVAGSSGYGNYRHQADVCHAYQILRKGGLKEENIVVLMYDDIANHPLNPRPGTLINHPDGDDVYAGVPKDYTGSSVTAANFYAVLLGDQKAVKGGSGKVIASKPNDHIFVYYADHGGPGVLGMPNTPHIYAADFIETLKKKHASGTYKEMVIYVEACESGSIFEGIMPKDLNIYVTTASNAQESSYGTYCPGMNPSPPSEYITCLGDLYSVAWMEDSETHNLKKETIKQQYHTVKMRTSNYNTYSGGSHVMEYGNNSIKSEKLYLYQGFDPATVNLPLNELPVKSKIGVVNQRDADLLFLWHMYRTSEDGSRKKDDTLKELTETTRHRKHLDASVELIATILFGPTMNVLNLVREPGLPLVDDWECLKSMVRVFEEHCGSLTQYGMKHMRAFANVCNNGVSKELMEEASTAACGGYSEARYTVHPSILGYSA

SEQ ID NO: 80795 - protein, 486 aa, Arabidopsis thaliana
  peptide (1)..(486): Ceres Seq. ID no. 12657221
MAKSCYFRPALLLLLVLLVHAESRGRFEPKILMPTEEANPADQDEDGVGTRWAVLVAGSSGYGNYRHQADVCHAYQILRKGGLKEENIVVLMYDDIANHPLNPRPGTLINHPDGDDVYAGVPKDYTGSSVTAANFYAVLLGDQKAVKGGSGKVIASKPNDHIFVYYADHGGPGVLGMPNTPHIYAADFIETLKKKHASGTYKEMVIYVEACESGSIFEGIMPKDLNIYVTTASNAQESSYGTYCPGMNPSPPSEYITCLGDLYSVAWMEDSETHNLKKETIKQQYHTVKMRTSNYNTYSGGSHVMEYGNNSIKSEKLYLYQGFDPATVNLPLNELPVKSKIGVVNQRDADLLFLWHMYRTSEDGSRKKDDTLKELTETTRHRKHLDASVELIATILFGPTMNVLNLVREPGLPLVDDWECLKSMVRVFEEHCGSLTQYGMKHMRAFANVCNNGVSKELMEEASTAACGGYSEARYTVHPSILGYSA

SEQ ID NO: 80796 - protein, 454 aa, Arabidopsis thaliana
  peptide (1)..(454): Ceres Seq. ID no. 12657222
MPTEEANPADQDEDGVGTRWAVLVAGSSGYGNYRHQADVCHAYQILRKGGLKEENIVVLMYDDIANHPLNPRPGTLINHPDGDDVYAGVPKDYTGSSVTAANFYAVLLGDQKAVKGGSGKVIASKPNDHIFVYYADHGGPGVLGMPNTPHIYAADFIETLKKKHASGTYKEMVIYVEACESGSIFEGIMPKDLNIYVTTASNAQESSYGTYCPGMNPSPPSEYITCLGDLYSVAWMEDSETHNLKKETIKQQYHTVKMRTSNYNTYSGGSHVMEYGNNSIKSEKLYLYQGFDPATVNLPLNELPVKSKIGVVNQRDADLLFLWHMYRTSEDGSRKKDDTLKELTETTRHRKHLDASVELIATILFGPTMNVLNLVREPGLPLVDDWECLKSMVRVFEEHCGSLTQYGMKHMRAFANVCNNGVSKELMEEASTAACGGYSEARYTVHPSILGYSA

SEQ ID NO: 80797 - DNA, 1281 bp, Arabidopsis thaliana
  misc_feature (1)..(1281): Ceres Seq. ID no. 12657223
  misc_feature (1)..(1281): Ortholog of  Ceres SEQ ID NO 13657677 as cited in SEQ ID NO 66119
atgattcaatctcgtcctcttccttcaatagttgatttcagtaaagtattgagtaaaatcgccaaatcgaagaattacgatcttgtgatctctctgtttcaccatatggaagtttgtggaattggtcatgatctttatagttacaacattgtgattaattgtttatgtcgatgctctcgatttgttattgctttatctgttgttgggaagatgatgaagtttggttacgagcctgatgttgtcacggttagttctttgattaatggattttgtcaagggaatagagtttttgatgctatagatttggttagtaaaatggaggaaatgggatttagaccagatgttgttatctacaacacgatcatcgacggttcttgtaagatcgggttggtgaatgacgcggtggagctgtttgatcggatggaaagagatggggttagagctgatgctgttacttataactctcttgtggccggtctttgttgttctggtagatggagtgatgcagctcggctaatgagagatatggtaatgagggatattgttcctaatgtcattactttcactgcggtgatcgatgtgtttgtgaaagaagggaagttttcggaggcgatgaagttgtacgaggagatgacacgaaggtgtgtagatccggatgttttcacttacaattcgttgatcaacggtctttgtatgcacggtcgggtagatgaggccaaacaaatgcttgatttgatggtaactaagggttgtctccccgatgtagtgacttataatactctcattaacgggttttgcaagtctaagagggttgatgaaggaacgaaactcttccgcgagatggctcaaagaggattagttggtgacactatcacatacaacactataatccagggctattttcaagcgggtagaccagatgcggcgcaagaaattttcagtcggatggattctcgtcccaatattaggacgtacagcattttgttgtatgggctttgtatgaactggagggtagagaaagcattggtgttattcgagaatatgcaaaagagtgaaatagaacttgatattactacttataatatcgtcattcacgggatgtgcaagattggtaatgttgaagatgcgtgggacttgtttcgtagcctttcttgcaaaggacttaagcctgatgttgtgtcctacactacgatgatctcaggcttttgtaggaaacgccaatgggataaatcagatttgttgtacagaaaaatgcaagaagatgggcttcttccattataa

SEQ ID NO: 80798 - protein, 426 aa, Arabidopsis thaliana
  peptide (1)..(426): Ceres Seq. ID no. 12657224
MIQSRPLPSIVDFSKVLSKIAKSKNYDLVISLFHHMEVCGIGHDLYSYNIVINCLCRCSRFVIALSVVGKMMKFGYEPDVVTVSSLINGFCQGNRVFDAIDLVSKMEEMGFRPDVVIYNTIIDGSCKIGLVNDAVELFDRMERDGVRADAVTYNSLVAGLCCSGRWSDAARLMRDMVMRDIVPNVITFTAVIDVFVKEGKFSEAMKLYEEMTRRCVDPDVFTYNSLINGLCMHGRVDEAKQMLDLMVTKGCLPDVVTYNTLINGFCKSKRVDEGTKLFREMAQRGLVGDTITYNTIIQGYFQAGRPDAAQEIFSRMDSRPNIRTYSILLYGLCMNWRVEKALVLFENMQKSEIELDITTYNIVIHGMCKIGNVEDAWDLFRSLSCKGLKPDVVSYTTMISGFCRKRQWDKSDLLYRKMQEDGLLPL

SEQ ID NO: 80799 - protein, 391 aa, Arabidopsis thaliana
  peptide (1)..(391): Ceres Seq. ID no. 12657225
MEVCGIGHDLYSYNIVINCLCRCSRFVIALSVVGKMMKFGYEPDVVTVSSLINGFCQGNRVFDAIDLVSKMEEMGFRPDVVIYNTIIDGSCKIGLVNDAVELFDRMERDGVRADAVTYNSLVAGLCCSGRWSDAARLMRDMVMRDIVPNVITFTAVIDVFVKEGKFSEAMKLYEEMTRRCVDPDVFTYNSLINGLCMHGRVDEAKQMLDLMVTKGCLPDVVTYNTLINGFCKSKRVDEGTKLFREMAQRGLVGDTITYNTIIQGYFQAGRPDAAQEIFSRMDSRPNIRTYSILLYGLCMNWRVEKALVLFENMQKSEIELDITTYNIVIHGMCKIGNVEDAWDLFRSLSCKGLKPDVVSYTTMISGFCRKRQWDKSDLLYRKMQEDGLLPL

SEQ ID NO: 80800 - protein, 356 aa, Arabidopsis thaliana
  peptide (1)..(356): Ceres Seq. ID no. 12657226
MMKFGYEPDVVTVSSLINGFCQGNRVFDAIDLVSKMEEMGFRPDVVIYNTIIDGSCKIGLVNDAVELFDRMERDGVRADAVTYNSLVAGLCCSGRWSDAARLMRDMVMRDIVPNVITFTAVIDVFVKEGKFSEAMKLYEEMTRRCVDPDVFTYNSLINGLCMHGRVDEAKQMLDLMVTKGCLPDVVTYNTLINGFCKSKRVDEGTKLFREMAQRGLVGDTITYNTIIQGYFQAGRPDAAQEIFSRMDSRPNIRTYSILLYGLCMNWRVEKALVLFENMQKSEIELDITTYNIVIHGMCKIGNVEDAWDLFRSLSCKGLKPDVVSYTTMISGFCRKRQWDKSDLLYRKMQEDGLLPL

SEQ ID NO: 80801 - DNA, 939 bp, Arabidopsis thaliana
  misc_feature (1)..(939): Ceres Seq. ID no. 12657231
  misc_feature (1)..(939): Ortholog of  Ceres SEQ ID NO 12474478 as cited in SEQ ID NO 96
  misc_feature (1)..(939): Ortholog of  Ceres SEQ ID NO 14302111 as cited in SEQ ID NO 68773
atgaacatcttatctcaaacccaaatccttcatctctctatagctattcttctcttcatcacaacatcatcatcatcattatcaccatcatcatcatcaccatcattatcaccatcaccaccatcatcatcaccatcatcggcaccaccatcatcattatcaccatcatcaccaccaccactatcattatcaccatcatcaccaccaccaccgccaccatcatcatcacctctatcatcattatcaccatcattatcaccatcaccaccatcatcatcaccatcatcggcaccaccatcatcattatcaccatcatcaccaccaccactatcattatcaccatcatcaccaccaccaccgccaccatcatcatcacctctatcatcattatcaccatcatcatcttcatcaacatactcaaatcaaaccaacttagattacatcaaaacatcatgtaacattacactctacaaaaccatttgctacaactctctatctccttacgcctcaacaatccgttccaaccctcaaaaactcgctgtcatcgccctcaatctcaccctctcatccgccaaatctgcctccaaattcgtcaaaaacatatctcacggaggtggtctaacacgtttggaagtagttgcggttgctgattgcgttgaagagattggagactcggtgacttcgcttcaagattcgataagggaattggattctatcaactataaagatagtgcaaagtttgagatggttatgtcggatgttgaaacatgggttagtgctgctctcacgaatgatgacacatgtatggatggtttcagtctagttaaaacggccgtgaaagatttggttcgacgacatgttgttgaggtagctcggcttactagcaacgcgcttgctctcattaatatgtacgcctctacgcaagaaaacttttcttaa

SEQ ID NO: 80802 - protein, 312 aa, Arabidopsis thaliana
  peptide (1)..(312): Ceres Seq. ID no. 12657232
MNILSQTQILHLSIAILLFITTSSSSLSPSSSSPSLSPSPPSSSPSSAPPSSLSPSSPPPLSLSPSSPPPPPPSSSPLSSLSPSLSPSPPSSSPSSAPPSSLSPSSPPPLSLSPSSPPPPPPSSSPLSSLSPSSSSSTYSNQTNLDYIKTSCNITLYKTICYNSLSPYASTIRSNPQKLAVIALNLTLSSAKSASKFVKNISHGGGLTRLEVVAVADCVEEIGDSVTSLQDSIRELDSINYKDSAKFEMVMSDVETWVSAALTNDDTCMDGFSLVKTAVKDLVRRHVVEVARLTSNALALINMYASTQENFS

SEQ ID NO: 80803 - DNA, 922 bp, Arabidopsis thaliana
  misc_feature (1)..(922): Ceres Seq. ID no. 12657233
  misc_feature (1)..(922): Ortholog of  Ceres SEQ ID NO 13594929 as cited in SEQ ID NO 55800
aaaaaagcagagctcacacttagaaaacaaaaaacaaaaatggctacgctttcgtttggaatcgccgccgctgcaaccaccgtccgtacgattccgagatttaattcacggaggagcaaaatcacatgcgaatgggatccgaaaggtgtgttgggtccggctcaaactggtcatatagctcggcttgagtttaagcgtcggctagagagagattcagaggcaagagaagcttttcagaaacaacttcgtgaagagaaagagcgtcgtcaagctcttagacaatctagagttgtaccggatactgctgcggagctgattgagtactttcttgatactgaagctcaggagattgagtatgagatcgctaggcttagaggaaggttaaacgacgaattctttgcgcagatacgacttgaaatcggacagattcgatttgctgttactaagactgcggatattgaagatagattgattgagcttgaaacacttcaaaaagctttagaagaaggaatagaggcttatgacaaaatgcaaaatgagcttatgacggctacaaatagcttaaccaaactcttaacctcaaccgatataaaaaccacattgttggatatggtggagaaaaaccaaatcaacagatctttgttggcacttctcgacgaaaacatagccaatgcatacaaaggaaaccagaaagaagcaggagattacatggagaagatacgctcttcagttcttaagtatttgacagtgtaggatcatatgagtcttcgaaagatttctcaagcttttgaatgttttctattatcggggaaaattgtatttatatttttgtttgttgagtaaaatgtattttctttttttccgaacgatgtttatatttttagggtcatttcagatcttcaagtaataaaaagaatttaat

SEQ ID NO: 80804 - protein, 250 aa, Arabidopsis thaliana
  peptide (1)..(250): Ceres Seq. ID no. 12657234
KKAELTLRKQKTKMATLSFGIAAAATTVRTIPRFNSRRSKITCEWDPKGVLGPAQTGHIARLEFKRRLERDSEAREAFQKQLREEKERRQALRQSRVVPDTAAELIEYFLDTEAQEIEYEIARLRGRLNDEFFAQIRLEIGQIRFAVTKTADIEDRLIELETLQKALEEGIEAYDKMQNELMTATNSLTKLLTSTDIKTTLLDMVEKNQINRSLLALLDENIANAYKGNQKEAGDYMEKIRSSVLKYLTV

SEQ ID NO: 80805 - protein, 237 aa, Arabidopsis thaliana
  peptide (1)..(237): Ceres Seq. ID no. 12657235
MATLSFGIAAAATTVRTIPRFNSRRSKITCEWDPKGVLGPAQTGHIARLEFKRRLERDSEAREAFQKQLREEKERRQALRQSRVVPDTAAELIEYFLDTEAQEIEYEIARLRGRLNDEFFAQIRLEIGQIRFAVTKTADIEDRLIELETLQKALEEGIEAYDKMQNELMTATNSLTKLLTSTDIKTTLLDMVEKNQINRSLLALLDENIANAYKGNQKEAGDYMEKIRSSVLKYLTV

SEQ ID NO: 80806 - DNA, 774 bp, Arabidopsis thaliana
  misc_feature (1)..(774): Ceres Seq. ID no. 12657267
  misc_feature (1)..(774): Ortholog of  Ceres SEQ ID NO 13596519 as cited in SEQ ID NO 62572
  misc_feature (1)..(774): Ortholog of  Ceres SEQ ID NO 12625108 as cited in SEQ ID NO 68102
atggatcaaaatttgtatcgcaagtgcctggttattttatcgatgatggcaatgatcggcacatcaatggctacatatgccgggaccccatggcgtacagcctcagccactttttacggtgacgacaccggcagcgcaactatgggtggggcttgtggctatggtaacatgtatgacagcggctacggggtagccacgactgcgctgagcacagccctgttcaacgagggttatgcatgcggtcaatgtttccagttaaagtgtgtgtcgtcgcctaactgctactacgggtcaccagccaccgtggtaactgcaaccaacatatgtccaccaaattatggccaagcatccaacaatggtggatggtgtaatccgccacgagtccattttgatttgactaaaccagcttttatgaagatcgctaactggaaggctggtatcatccccgtctcatatcgcagagtggcatgtaagaagatcggaggaataaggttcaaatttgaaggaaatggatattggctacttgtgtacgtgatgaacgtaggtggtccaggtgacatcaagaccatggccgttaaaggtagccgcacagggtggatcaacatgagccataactggggagcttcgtaccaagccttttcttctctctacggtcagtctctctcgttccggctcacctcttacaccactcgtcagaccatttacgcttataatgctgctccggcaagctggagcgcgggcaagacctaccagagcaaggctaattttaactaa

SEQ ID NO: 80807 - protein, 257 aa, Arabidopsis thaliana
  peptide (1)..(257): Ceres Seq. ID no. 12657268
MDQNLYRKCLVILSMMAMIGTSMATYAGTPWRTASATFYGDDTGSATMGGACGYGNMYDSGYGVATTALSTALFNEGYACGQCFQLKCVSSPNCYYGSPATVVTATNICPPNYGQASNNGGWCNPPRVHFDLTKPAFMKIANWKAGIIPVSYRRVACKKIGGIRFKFEGNGYWLLVYVMNVGGPGDIKTMAVKGSRTGWINMSHNWGASYQAFSSLYGQSLSFRLTSYTTRQTIYAYNAAPASWSAGKTYQSKANFN

SEQ ID NO: 80808 - protein, 243 aa, Arabidopsis thaliana
  peptide (1)..(243): Ceres Seq. ID no. 12657269
MMAMIGTSMATYAGTPWRTASATFYGDDTGSATMGGACGYGNMYDSGYGVATTALSTALFNEGYACGQCFQLKCVSSPNCYYGSPATVVTATNICPPNYGQASNNGGWCNPPRVHFDLTKPAFMKIANWKAGIIPVSYRRVACKKIGGIRFKFEGNGYWLLVYVMNVGGPGDIKTMAVKGSRTGWINMSHNWGASYQAFSSLYGQSLSFRLTSYTTRQTIYAYNAAPASWSAGKTYQSKANFN

SEQ ID NO: 80809 - protein, 242 aa, Arabidopsis thaliana
  peptide (1)..(242): Ceres Seq. ID no. 12657270
MAMIGTSMATYAGTPWRTASATFYGDDTGSATMGGACGYGNMYDSGYGVATTALSTALFNEGYACGQCFQLKCVSSPNCYYGSPATVVTATNICPPNYGQASNNGGWCNPPRVHFDLTKPAFMKIANWKAGIIPVSYRRVACKKIGGIRFKFEGNGYWLLVYVMNVGGPGDIKTMAVKGSRTGWINMSHNWGASYQAFSSLYGQSLSFRLTSYTTRQTIYAYNAAPASWSAGKTYQSKANFN

SEQ ID NO: 80810 - DNA, 546 bp, Arabidopsis thaliana
  misc_feature (1)..(546): Ceres Seq. ID no. 12657275
  misc_feature (1)..(546): Ortholog of  Ceres SEQ ID NO 13661642 as cited in SEQ ID NO 61598
atggaaaacgacgatatcaccgtggcggagatgaagccaaagaagcgtgctggacggaggattttcaaggagacacgtcacccaatctacagaggcgtgcggcgtagggacggcgacaaatgggtatgcgaagtccgtgaaccgattcatcagcgtcgagtctggctcggaacttatccgacggcagatatggccgcacgtgctcacgacgtggcggttcttgctctgcgcgggagatccgcgtgtttgaatttctccgattctgcttggaggttgccggtgccggcatccactgatccggacacgatcaggcgcacggcggccgaagcagcggagatgttcaggccgccggagtttagtacaggaattacggttttaccctcagccagtgagtttgacacgtcggatgaaggagtcgctggaatgatgatgaggctcgcggaggagccgttgatgtcgccgccaagatcgtacattgatatgaatacgagtgtgtacgtggacgaagaaatgtgttacgaagatttgtcactttggagttactaa

SEQ ID NO: 80811 - protein, 181 aa, Arabidopsis thaliana
  peptide (1)..(181): Ceres Seq. ID no. 12657276
MENDDITVAEMKPKKRAGRRIFKETRHPIYRGVRRRDGDKWVCEVREPIHQRRVWLGTYPTADMAARAHDVAVLALRGRSACLNFSDSAWRLPVPASTDPDTIRRTAAEAAEMFRPPEFSTGITVLPSASEFDTSDEGVAGMMMRLAEEPLMSPPRSYIDMNTSVYVDEEMCYEDLSLWSY

SEQ ID NO: 80812 - protein, 171 aa, Arabidopsis thaliana
  peptide (1)..(171): Ceres Seq. ID no. 12657277
MKPKKRAGRRIFKETRHPIYRGVRRRDGDKWVCEVREPIHQRRVWLGTYPTADMAARAHDVAVLALRGRSACLNFSDSAWRLPVPASTDPDTIRRTAAEAAEMFRPPEFSTGITVLPSASEFDTSDEGVAGMMMRLAEEPLMSPPRSYIDMNTSVYVDEEMCYEDLSLWSY

SEQ ID NO: 80813 - protein, 118 aa, Arabidopsis thaliana
  peptide (1)..(118): Ceres Seq. ID no. 12657278
MAARAHDVAVLALRGRSACLNFSDSAWRLPVPASTDPDTIRRTAAEAAEMFRPPEFSTGITVLPSASEFDTSDEGVAGMMMRLAEEPLMSPPRSYIDMNTSVYVDEEMCYEDLSLWSY

SEQ ID NO: 80814 - DNA, 2419 bp, Arabidopsis thaliana
  misc_feature (1)..(2419): Ceres Seq. ID no. 12657295
  misc_feature (1)..(2419): Ortholog of  Ceres SEQ ID NO 13657677 as cited in SEQ ID NO 66119
accaaaagttcaaacctttactctctctgtctgcaaaaggttcatcatttagggtttatacaagtttacagagagtttacgattctgaatcagtgattttggaagaaaccccaatcagctgaagatgaggagattgtttgcgatttcatcgacgggaaacagatttgttcatcggagtcttctcggaaaaggtaaatgtggaactgctcctccttcctttagccattgcagtttctgggtacgagatttctctggtgttagatatgattacagaaaaatatcgataaataggctaaatgatttgaagctagatgatgcggttaatctgttcggtgacatggtcaagtctcgtcctttcccttcgattgttgagttcagtaaactgttgagtgccattgctaagatgaacaagttcgatcttgtcatctctctcggcgagcagatgcaaaatttgggaatttcacataatctttacacatacagtattctcatcaactgtttctgccgacgctctcagctctctcttgctttagctgttcttgccaagatgatgaaactcggctatgagcccgatattgtcacgcttaactctctgctcaatggtttctgtcacgggaataggatttcagatgccgtatctcttgttggtcagatggtggaaatgggatatcagcccgattcattcacattcaacactctaattcatggactttttcgccacaacagagcttcagaagcagtggctttagttgaccggatggttgtgaaaggttgtcaaccagatctggttacttatggtattgtagtaaatggattatgtaagagaggtgatattgatttggctttgagtttgttaaagaagatggaacaagggaaaatagagcctggtgttgtgatctacaacactatcattgatgctctttgcaactacaaaaacgtgaatgatgcactcaatctgttcactgaaatggataacaaaggaattagaccaaatgttgttacctacaactccctcataagatgcctttgtaattacggaagatggagtgatgcttctcgactactcagtgatatgattgagaggaaaatcaatccaaatgtagtcactttcagcgcattgattgatgcatttgtgaaggaggggaagcttgtagaggctgagaaattgtacgacgagatgatcaaaaggtctatagatcctgatattttcacttatagttcactgatcaatgggttttgtatgcacgatcgtttagacgaggccaagcacatgtttgagttgatgattagcaaggactgtttcccaaacgtagtgacttacaatactcttataaagggattttgtaaggctaagagagtagacgaaggtatggaactcttccgcgagatgtctcaaagaggattggttggcaacacagtcacttacaccactcttatccatggattttttcaagctagagagtgtgataatgcccaaatagttttcaaacagatggtttctgatggtgtgcttcccgatattatgacatacagcattttattagatgggctttgtaataatgggaaggtagagacagcattggtggtgtttgagtatctgcaaaggagtaaaatggaacctgatatttacacatataatattatgattgaagggatgtgcaaggcagggaaggtggaagatgggtgggatctattttgtagcctcagccttaaaggagtgaagcctaatgttgtaacctacacaacaatgatgtcaggattttgtaggaaaggtttaaaggaagaagcagatgccttgtttagagaaatgaaagaagaagggcctcttccagatagtggtacatataatacgcttatcagggcacatctgagagatggtgacaaagcagcatcagctgaactcatcagagaaatgaggagttgcaggtttgttggagatgcttcaaccattggcttggtcactaatatgttgcatgatgggagattggacaaaagctttctcaagatgctttcttaaaacagtttatcctcgagagaagaggatcgtgaggtgaatcaagtctttatgttgccttactctgtttacttctcaagctacatgtgtgtatttggttgctgtcgtgtgtgtaagcttcatgaagatgactgatactttgctttgtgtaattcattgttaggttaacacacacgagatcaatttgtgagcatcagaacaagatctcagacgtgtcattattatggttttactgtagtagatttggtttttaaccaaacgtattttataattcttgttttgaatgattgctagcagtttctagttccttttggttcaaaaaaataacttgatttggattcttattcccagtgacatttgtaacgtggattttattttggtggtaatattttaaaccggtttgac

SEQ ID NO: 80815 - protein, 630 aa, Arabidopsis thaliana
  peptide (1)..(630): Ceres Seq. ID no. 12657296
MRRLFAISSTGNRFVHRSLLGKGKCGTAPPSFSHCSFWVRDFSGVRYDYRKISINRLNDLKLDDAVNLFGDMVKSRPFPSIVEFSKLLSAIAKMNKFDLVISLGEQMQNLGISHNLYTYSILINCFCRRSQLSLALAVLAKMMKLGYEPDIVTLNSLLNGFCHGNRISDAVSLVGQMVEMGYQPDSFTFNTLIHGLFRHNRASEAVALVDRMVVKGCQPDLVTYGIVVNGLCKRGDIDLALSLLKKMEQGKIEPGVVIYNTIIDALCNYKNVNDALNLFTEMDNKGIRPNVVTYNSLIRCLCNYGRWSDASRLLSDMIERKINPNVVTFSALIDAFVKEGKLVEAEKLYDEMIKRSIDPDIFTYSSLINGFCMHDRLDEAKHMFELMISKDCFPNVVTYNTLIKGFCKAKRVDEGMELFREMSQRGLVGNTVTYTTLIHGFFQARECDNAQIVFKQMVSDGVLPDIMTYSILLDGLCNNGKVETALVVFEYLQRSKMEPDIYTYNIMIEGMCKAGKVEDGWDLFCSLSLKGVKPNVVTYTTMMSGFCRKGLKEEADALFREMKEEGPLPDSGTYNTLIRAHLRDGDKAASAELIREMRSCRFVGDASTIGLVTNMLHDGRLDKSFLKMLS

SEQ ID NO: 80816 - protein, 559 aa, Arabidopsis thaliana
  peptide (1)..(559): Ceres Seq. ID no. 12657297
MVKSRPFPSIVEFSKLLSAIAKMNKFDLVISLGEQMQNLGISHNLYTYSILINCFCRRSQLSLALAVLAKMMKLGYEPDIVTLNSLLNGFCHGNRISDAVSLVGQMVEMGYQPDSFTFNTLIHGLFRHNRASEAVALVDRMVVKGCQPDLVTYGIVVNGLCKRGDIDLALSLLKKMEQGKIEPGVVIYNTIIDALCNYKNVNDALNLFTEMDNKGIRPNVVTYNSLIRCLCNYGRWSDASRLLSDMIERKINPNVVTFSALIDAFVKEGKLVEAEKLYDEMIKRSIDPDIFTYSSLINGFCMHDRLDEAKHMFELMISKDCFPNVVTYNTLIKGFCKAKRVDEGMELFREMSQRGLVGNTVTYTTLIHGFFQARECDNAQIVFKQMVSDGVLPDIMTYSILLDGLCNNGKVETALVVFEYLQRSKMEPDIYTYNIMIEGMCKAGKVEDGWDLFCSLSLKGVKPNVVTYTTMMSGFCRKGLKEEADALFREMKEEGPLPDSGTYNTLIRAHLRDGDKAASAELIREMRSCRFVGDASTIGLVTNMLHDGRLDKSFLKMLS

SEQ ID NO: 80817 - protein, 537 aa, Arabidopsis thaliana
  peptide (1)..(537): Ceres Seq. ID no. 12657298
MNKFDLVISLGEQMQNLGISHNLYTYSILINCFCRRSQLSLALAVLAKMMKLGYEPDIVTLNSLLNGFCHGNRISDAVSLVGQMVEMGYQPDSFTFNTLIHGLFRHNRASEAVALVDRMVVKGCQPDLVTYGIVVNGLCKRGDIDLALSLLKKMEQGKIEPGVVIYNTIIDALCNYKNVNDALNLFTEMDNKGIRPNVVTYNSLIRCLCNYGRWSDASRLLSDMIERKINPNVVTFSALIDAFVKEGKLVEAEKLYDEMIKRSIDPDIFTYSSLINGFCMHDRLDEAKHMFELMISKDCFPNVVTYNTLIKGFCKAKRVDEGMELFREMSQRGLVGNTVTYTTLIHGFFQARECDNAQIVFKQMVSDGVLPDIMTYSILLDGLCNNGKVETALVVFEYLQRSKMEPDIYTYNIMIEGMCKAGKVEDGWDLFCSLSLKGVKPNVVTYTTMMSGFCRKGLKEEADALFREMKEEGPLPDSGTYNTLIRAHLRDGDKAASAELIREMRSCRFVGDASTIGLVTNMLHDGRLDKSFLKMLS

SEQ ID NO: 80818 - DNA, 2049 bp, Arabidopsis thaliana
  misc_feature (1)..(2049): Ceres Seq. ID no. 12657299
  misc_feature (1)..(2049): Ortholog of  Ceres SEQ ID NO 13657677 as cited in SEQ ID NO 66119
aagatgcagagatcgatttcattgacggccaaaagattgtttgttcattggaatctccaggggataggtaatcctccaactgttccttctttcttcaatctttgcggttccggttgctgggaacgatcttttgctagtgctagtggtgattacagagagatattgagaaataggctaagtgatattattaaggtagatgatgcggttgatctgttcggtgacatggtcaagtctcgtccatttccttccattgttgaattcaataaactgttgagtgccgttgctaagatgaacaagtttgaacttgtcatctctctcggcgagcagatgcaaactttgggaatttcacatgatctttacacatacagtattttcatcaactgcttttgccgacgctctcagctctctcttgctttagctgttcttgccaagatgatgaaactcggctatgagcccgatattgtcacgctttcttcgctgctcaatggctactgtcacagtaagaggatttctgatgccgtagctttggttgatcaaatggtcgaaatgggatataaacctgatacctttacattcacaactctaattcatggactttttcttcacaacaaagcttcagaagcagtggctttagttgatcaaatggttcaaagaggatgtcaaccagatctggttacttatggtaccgtagtaaacggattatgtaagagaggtgatattgatttggctttaaatctgctcaacaagatggaagctgcgagaataaaggctaatgttgtgatcttcaacacaatcatcgatagtctctgcaaatatagacatgtggaagttgctgttgacttattcactgaaatggaaaccaaaggaattagacctaatgttgtcacctacaattccctcattaattgcctttgtaattacggaagatggagtgatgcctctcgactactgagtaatatgcttgagaagaaaatcaaccccaatgttgttactttcaatgcattgatcgatgcgttttttaaagaggggaagcttgtagaggctgaaaaattgcacgaggagatgatccaaaggtctatagatccagatactatcacttacaatttattgatcaatgggttttgcatgcacaatcgcctagacgaggccaagcagatgtttaagttcatggttagcaaggactgtcttccaaatatacagacttataatacgcttataaatggattttgtaagtgtaaaagggttgaggatggtgtggaactcttccgcgagatgtctcaaaggggattagttggcaacacagtcacttacaccactattatccaagggttttttcaagctggcgactgtgattctgcccaaatggtattcaaacagatggtttctaatcgtgtgcctacagatattatgacatacagcattttgttgcatggactttgtagttatgggaagctagatacagcattggtcatattcaagtatctgcaaaagagtgaaatggaacttaatatttttatatataatactatgattgaagggatgtgcaaggctggcaaggtgggagaagcgtgggatttattttgtagcctcagcattaagcctgatgttgtaacatacaatacaatgatctcaggattgtgtagtaaacgcctactacaggaagcagatgacctgttcagaaaaatgaaagaagatggtactcttccaaatagtggtacatataatacgcttatcagagcaaaccttagagattgtgacagagccgcatcagcagaactcatcaaagaaatgaggagttctgggtttgttggagatgcttcaaccattagcttggtgacaaatatgttgcatgatgggagattggacaaaagctttctcaatatgctttcttaaaacagtttgtcctcgaggtaggaggagtctgaggttaacacacacgagctacagaagaagatttcagacgtgtcatcattatggttactgtagtagatttggtttttaaccaaacgtattttatagttttggttcaataaatataactttatttcg

SEQ ID NO: 80819 - protein, 630 aa, Arabidopsis thaliana
  peptide (1)..(630): Ceres Seq. ID no. 12657300
KMQRSISLTAKRLFVHWNLQGIGNPPTVPSFFNLCGSGCWERSFASASGDYREILRNRLSDIIKVDDAVDLFGDMVKSRPFPSIVEFNKLLSAVAKMNKFELVISLGEQMQTLGISHDLYTYSIFINCFCRRSQLSLALAVLAKMMKLGYEPDIVTLSSLLNGYCHSKRISDAVALVDQMVEMGYKPDTFTFTTLIHGLFLHNKASEAVALVDQMVQRGCQPDLVTYGTVVNGLCKRGDIDLALNLLNKMEAARIKANVVIFNTIIDSLCKYRHVEVAVDLFTEMETKGIRPNVVTYNSLINCLCNYGRWSDASRLLSNMLEKKINPNVVTFNALIDAFFKEGKLVEAEKLHEEMIQRSIDPDTITYNLLINGFCMHNRLDEAKQMFKFMVSKDCLPNIQTYNTLINGFCKCKRVEDGVELFREMSQRGLVGNTVTYTTIIQGFFQAGDCDSAQMVFKQMVSNRVPTDIMTYSILLHGLCSYGKLDTALVIFKYLQKSEMELNIFIYNTMIEGMCKAGKVGEAWDLFCSLSIKPDVVTYNTMISGLCSKRLLQEADDLFRKMKEDGTLPNSGTYNTLIRANLRDCDRAASAELIKEMRSSGFVGDASTISLVTNMLHDGRLDKSFLNMLS

SEQ ID NO: 80820 - protein, 629 aa, Arabidopsis thaliana
  peptide (1)..(629): Ceres Seq. ID no. 12657301
MQRSISLTAKRLFVHWNLQGIGNPPTVPSFFNLCGSGCWERSFASASGDYREILRNRLSDIIKVDDAVDLFGDMVKSRPFPSIVEFNKLLSAVAKMNKFELVISLGEQMQTLGISHDLYTYSIFINCFCRRSQLSLALAVLAKMMKLGYEPDIVTLSSLLNGYCHSKRISDAVALVDQMVEMGYKPDTFTFTTLIHGLFLHNKASEAVALVDQMVQRGCQPDLVTYGTVVNGLCKRGDIDLALNLLNKMEAARIKANVVIFNTIIDSLCKYRHVEVAVDLFTEMETKGIRPNVVTYNSLINCLCNYGRWSDASRLLSNMLEKKINPNVVTFNALIDAFFKEGKLVEAEKLHEEMIQRSIDPDTITYNLLINGFCMHNRLDEAKQMFKFMVSKDCLPNIQTYNTLINGFCKCKRVEDGVELFREMSQRGLVGNTVTYTTIIQGFFQAGDCDSAQMVFKQMVSNRVPTDIMTYSILLHGLCSYGKLDTALVIFKYLQKSEMELNIFIYNTMIEGMCKAGKVGEAWDLFCSLSIKPDVVTYNTMISGLCSKRLLQEADDLFRKMKEDGTLPNSGTYNTLIRANLRDCDRAASAELIKEMRSSGFVGDASTISLVTNMLHDGRLDKSFLNMLS

SEQ ID NO: 80821 - protein, 556 aa, Arabidopsis thaliana
  peptide (1)..(556): Ceres Seq. ID no. 12657302
MVKSRPFPSIVEFNKLLSAVAKMNKFELVISLGEQMQTLGISHDLYTYSIFINCFCRRSQLSLALAVLAKMMKLGYEPDIVTLSSLLNGYCHSKRISDAVALVDQMVEMGYKPDTFTFTTLIHGLFLHNKASEAVALVDQMVQRGCQPDLVTYGTVVNGLCKRGDIDLALNLLNKMEAARIKANVVIFNTIIDSLCKYRHVEVAVDLFTEMETKGIRPNVVTYNSLINCLCNYGRWSDASRLLSNMLEKKINPNVVTFNALIDAFFKEGKLVEAEKLHEEMIQRSIDPDTITYNLLINGFCMHNRLDEAKQMFKFMVSKDCLPNIQTYNTLINGFCKCKRVEDGVELFREMSQRGLVGNTVTYTTIIQGFFQAGDCDSAQMVFKQMVSNRVPTDIMTYSILLHGLCSYGKLDTALVIFKYLQKSEMELNIFIYNTMIEGMCKAGKVGEAWDLFCSLSIKPDVVTYNTMISGLCSKRLLQEADDLFRKMKEDGTLPNSGTYNTLIRANLRDCDRAASAELIKEMRSSGFVGDASTISLVTNMLHDGRLDKSFLNMLS

SEQ ID NO: 80822 - DNA, 1926 bp, Arabidopsis thaliana
  misc_feature (1)..(1926): Ceres Seq. ID no. 12657339
  misc_feature (1)..(1926): Ortholog of  Ceres SEQ ID NO 14310024 as cited in SEQ ID NO 20634
atgcctgtctccgtctcaaagttgagacgaccaagaacgtccaaaaagaccgaaaccggaaatcccgaaaaaacacttaaagatcctcgtacttgctgtaataaccttttttcgatcttttccgccagatcatttctttatcgtgtacctctcacgattctctttcttttcttgatttatctttggtccacttccacgaccgttatctctggtaacgtcgttcatatatgcatctcttcgcggaagctcactgacctttattgcctcactgccggttctcagcccgctttacgtgcaccagtcaacaatttcactgcgccggctagtgaagatgtggtaacaagtaaagaagagaagaatgtttttgttcttggtaaagacggagacaagggtttcgcagaaaatgaaaccttcgagggaggaaaagattcagacaaatctacggtcggagaaaacctcaccatcaataagaacgaaactttcacaggagaaacctccggagaaagagtttccattcttaatcaagatgctaaacccatccatgaaaagaatcttgattccgttcttgatcaagattctttacccaaaaacgagattgatcaagatttcatcattgattgggatccagaaactggcgaagaacgataccgatatttcaaagcgaagaccgaagacgaggagaccggtctaaaatctacggaagagtatattcaaatacagagaacttggttatcgatgggaaacaaccgcaaaaagccgggatcttgcgaaggaaaaggtgtatacgtttacgatttaccatctaaattcaacaaagatttgttgagggaatgctccgatatggttccatgggctgatttttgcaactacttcaagaacgatgcgtttggtgaactgatggagagtatgggtaaaggctggttcagaacgcatcagtattcacttgagccgatatttcactctagaattttgaagcatccatgtagggttcataacgagactcaagcgaagctcttctatgtgcctttctatggcggtatggatgttttgagatggcatttcaagaacgtttcaagcgatgtgaaagatgttttgccgattgagattgttaaatggctcggatcgaagaaatcatggaggaaaaactccggaaaagatcatgtttttgttctcggaaagatctcttgggattttaggagggttgataagtattcttggggctcaagcttacttgagatgcaagaaatgaaaaaccctacaaagcttctcatcgaacgtaatccatgggaagtcaacgacatcgcgatacctcatcccacatacttccacccgaaaactgacaccgatatcgccatatggcaaaacaaaatacttgggaaacctcgtcggagcctaattagcttcgctggtgcagcaagacccggtaaccctgagagcatccggtcaatattgattgaccaatgcagatcgtctccaaaccaatgccggtttttgaattgtaccgatggaggctgcgataaatcggaatcggttatcgagcttttccgagattcggagttctgccttcaaccgcctggagacagtccaacaaggaaatcgattttcgattccctcatattaggttgtattccggtgatatttgatccgtacagcgcgtattaccagtacacgtggcatttaccggaggatcaccggagatattcggtgtatataaacaaagaagatgtgaagttgaagagagtgaatgtgattgagaagttaatgtcaaagactctaagggaaagagaggacatgaggagttacattgttcatgagcttttgcctggtttggtctatggagattctaatgctaagtttgagagatttcgagatgctttcgatattactatggatagtttattcaagaagattgcaaaaactgtataa

SEQ ID NO: 80823 - protein, 641 aa, Arabidopsis thaliana
  peptide (1)..(641): Ceres Seq. ID no. 12657340
MPVSVSKLRRPRTSKKTETGNPEKTLKDPRTCCNNLFSIFSARSFLYRVPLTILFLFLIYLWSTSTTVISGNVVHICISSRKLTDLYCLTAGSQPALRAPVNNFTAPASEDVVTSKEEKNVFVLGKDGDKGFAENETFEGGKDSDKSTVGENLTINKNETFTGETSGERVSILNQDAKPIHEKNLDSVLDQDSLPKNEIDQDFIIDWDPETGEERYRYFKAKTEDEETGLKSTEEYIQIQRTWLSMGNNRKKPGSCEGKGVYVYDLPSKFNKDLLRECSDMVPWADFCNYFKNDAFGELMESMGKGWFRTHQYSLEPIFHSRILKHPCRVHNETQAKLFYVPFYGGMDVLRWHFKNVSSDVKDVLPIEIVKWLGSKKSWRKNSGKDHVFVLGKISWDFRRVDKYSWGSSLLEMQEMKNPTKLLIERNPWEVNDIAIPHPTYFHPKTDTDIAIWQNKILGKPRRSLISFAGAARPGNPESIRSILIDQCRSSPNQCRFLNCTDGGCDKSESVIELFRDSEFCLQPPGDSPTRKSIFDSLILGCIPVIFDPYSAYYQYTWHLPEDHRRYSVYINKEDVKLKRVNVIEKLMSKTLREREDMRSYIVHELLPGLVYGDSNAKFERFRDAFDITMDSLFKKIAKTV

SEQ ID NO: 80824 - protein, 396 aa, Arabidopsis thaliana
  peptide (1)..(396): Ceres Seq. ID no. 12657341
MGNNRKKPGSCEGKGVYVYDLPSKFNKDLLRECSDMVPWADFCNYFKNDAFGELMESMGKGWFRTHQYSLEPIFHSRILKHPCRVHNETQAKLFYVPFYGGMDVLRWHFKNVSSDVKDVLPIEIVKWLGSKKSWRKNSGKDHVFVLGKISWDFRRVDKYSWGSSLLEMQEMKNPTKLLIERNPWEVNDIAIPHPTYFHPKTDTDIAIWQNKILGKPRRSLISFAGAARPGNPESIRSILIDQCRSSPNQCRFLNCTDGGCDKSESVIELFRDSEFCLQPPGDSPTRKSIFDSLILGCIPVIFDPYSAYYQYTWHLPEDHRRYSVYINKEDVKLKRVNVIEKLMSKTLREREDMRSYIVHELLPGLVYGDSNAKFERFRDAFDITMDSLFKKIAKTV

SEQ ID NO: 80825 - protein, 361 aa, Arabidopsis thaliana
  peptide (1)..(361): Ceres Seq. ID no. 12657342
MVPWADFCNYFKNDAFGELMESMGKGWFRTHQYSLEPIFHSRILKHPCRVHNETQAKLFYVPFYGGMDVLRWHFKNVSSDVKDVLPIEIVKWLGSKKSWRKNSGKDHVFVLGKISWDFRRVDKYSWGSSLLEMQEMKNPTKLLIERNPWEVNDIAIPHPTYFHPKTDTDIAIWQNKILGKPRRSLISFAGAARPGNPESIRSILIDQCRSSPNQCRFLNCTDGGCDKSESVIELFRDSEFCLQPPGDSPTRKSIFDSLILGCIPVIFDPYSAYYQYTWHLPEDHRRYSVYINKEDVKLKRVNVIEKLMSKTLREREDMRSYIVHELLPGLVYGDSNAKFERFRDAFDITMDSLFKKIAKTV

SEQ ID NO: 80826 - DNA, 3171 bp, Arabidopsis thaliana
  misc_feature (1)..(3171): Ceres Seq. ID no. 12657351
  misc_feature (1)..(3171): Ortholog of  Ceres SEQ ID NO 13600310 as cited in SEQ ID NO 5086
atgagcagtcatctgtcacaggacgccaatatgaatggtgtctatgttcgatcagatgtgtctagcatgctgagttttgacggatcagaaagtcgcgaaagtatggatgacagtaagaaaggtcatcagagtttggttgagtggttaaatgagacacttccttatctgaagttaccatgggaagcttcagaggacgaactgagagcatgcttgagggatggaactgtcttgtgtagccttttaaatcagcttagtcctgggtcaatgagaatgggaggcagctttgagcctgccagtgtaaaaattgagcggtttctgactgctatggatgaaatggccctgcctaggttcgaagtttcagatatagaacagtccctgaaggcgcttaaagccagtttttccgatggtagttatgataagaactcactagctgcgaggaggagatggagcttgccagaggaccactcagattcaagaggagatgaccgcaactttactgatggattccagtcgaaggaaggatctgagattgatatgtctgatgctaaaatttcggatttacttaaatccaacagtttacgaaatgctcctactaggtcactgtttgacatgctggataagcttctagatgagagcatgacgaagatgaatggacatgtgtctcatgctatggcatctctcttgagcgcacttgtgcaagtgattgaacaaagaatctcaaatcaagctgataacctaaagaatcaaaatatactctttagggtacgtgaagaaaaatacaggtcaagaataaaggtcttagaatccttggcagctgggacaacaaaggaaaacgagatcgttacgaactgtatggagcatataaagcttgagaaaaccagaatagaagagaaagaacgatcagaagaaaaagatgttgtgagactgagaaaggaaaaagagcgcagtgatgctgagattcgccagctgaagcaggaactcaaattggtgaaagagacacatgaaaaccaatgcttggaattagaagcaaaagcacaaaaaactagagatgagttggagaagaagttaaaagatgcggagttacatgttgtagattcaagtaggaaggtgaaagaacttgagaagttgtgccaatctaaatctcaaagatgggagaaaaaagagtgcatctaccagaacttcatagacaaccattctggagccttgcaggagttgagtgctacttcgttgtctataaaacatgaagtcgtaaggacacagaggaaatactttgaggatttaaattactacggtttgaagctcaaaggagtggctgatgcagcaaaaaattaccatgttgtccttgaagaaaatcgaagactgtacaatgaagtgcaagaattgaaaggaaatatcagagtctattgccggattagaccatttcttccagggcaaaacagtagacaaacaactatagaatacattggtgagactggtgaattggtggttgcgaatccctttaagcaagggaaagatacgcatcggttatttaagttcaacaaagttttcgatcaagcagcaacacaagaggaggttttcttagatactcgaccattaattcgatccattcttgatggctataatgtttgtatatttgcctatggtcagactggttctggaaaaacttatacaatgagtgggccaagcatcacttcaaaagaagactggggtgtcaattatagagctttgaatgacttgtttctcttaactcagagtagacaaaacactgtcatgtatgaagttggtgttcaaatggtggagatatataatgagcaagttcgtgatatactttctgatgggatttggaacaccgccttaccaaatgggctagcagtccctgatgcaagcatgcattgtgtgagatcaacagaagatgttcttgaactgatgaatattggactaatgaacagaaccgtgggtgctacagctctcaatgaaaggagcagtagatcacactgtgttctttctgtccatgtacgaggtgtcgacgtggaaaccgattcaattttgcggggcagtttgcatttagttgaccttgctggaagtgagagggttgatcgctctgaggcaaccggagagaggctcaaggaagctcagcatatcaacaaatcattgtcagcacttggggatgtcatatttgctttagcgcacaagaaccctcatgttccttacagaaacagcaaattgactcaagtccttcaaagttctttgggtggacaggctaaaactcttatgtttgtccaagtcaatcctgatggcgattcttatgctgagacagtaagcactttgaaattcgccgaaagggtttctggtgtggagttaggtgctgccaaaagtagtaaagagggtcgagatgtaagacaactcatggaacaggtatcgaacttgaaggatgtaattgctaagaaagatgaagagctacaaaattttcagaaggtaaaaggtaataatgcaacatccctgaaacgtggattaagcaatttaaggttggtggggcctacatcacctagaagacattctattggagcgtcaccaaacgctcgacgaggaaaggcctctggtttatttggaagaggaacctcagatgttgacaactgctctgaatatagcagcaagcattcggattctggttcacaacaatcatcagacgaacgtaaacatcaaaaagattatcaccaaccatctaaatttgctggtgcggcgaaaggaatcgattttgatgatgaagatgttgaactcgtaggtcttgcagatgcagattctgaggacagattgagtgatatctctgatagttgtctttcaatgggaacagaaactgatggatccataagcagtgcagtagagttgactctattccctgaaactgctaagcctcttgaactaatagaacgacctgaagcacgcatgacttctgagaaactcgagaaatcagtgaaaatggggaaaaccgagccaaaagacagaactaatattccatcgaagattccaaagcagaccttgaaaccaccaggccaaaccagaccgtctcgtctgtcaattgccactagctcctcctctaaggctttaacaggtgctaaaaggccaacaattagcacttcatcttcagcgaaaccactcaatagaaggcggtga

SEQ ID NO: 80827 - protein, 1056 aa, Arabidopsis thaliana
  peptide (1)..(1056): Ceres Seq. ID no. 12657352
MSSHLSQDANMNGVYVRSDVSSMLSFDGSESRESMDDSKKGHQSLVEWLNETLPYLKLPWEASEDELRACLRDGTVLCSLLNQLSPGSMRMGGSFEPASVKIERFLTAMDEMALPRFEVSDIEQSLKALKASFSDGSYDKNSLAARRRWSLPEDHSDSRGDDRNFTDGFQSKEGSEIDMSDAKISDLLKSNSLRNAPTRSLFDMLDKLLDESMTKMNGHVSHAMASLLSALVQVIEQRISNQADNLKNQNILFRVREEKYRSRIKVLESLAAGTTKENEIVTNCMEHIKLEKTRIEEKERSEEKDVVRLRKEKERSDAEIRQLKQELKLVKETHENQCLELEAKAQKTRDELEKKLKDAELHVVDSSRKVKELEKLCQSKSQRWEKKECIYQNFIDNHSGALQELSATSLSIKHEVVRTQRKYFEDLNYYGLKLKGVADAAKNYHVVLEENRRLYNEVQELKGNIRVYCRIRPFLPGQNSRQTTIEYIGETGELVVANPFKQGKDTHRLFKFNKVFDQAATQEEVFLDTRPLIRSILDGYNVCIFAYGQTGSGKTYTMSGPSITSKEDWGVNYRALNDLFLLTQSRQNTVMYEVGVQMVEIYNEQVRDILSDGIWNTALPNGLAVPDASMHCVRSTEDVLELMNIGLMNRTVGATALNERSSRSHCVLSVHVRGVDVETDSILRGSLHLVDLAGSERVDRSEATGERLKEAQHINKSLSALGDVIFALAHKNPHVPYRNSKLTQVLQSSLGGQAKTLMFVQVNPDGDSYAETVSTLKFAERVSGVELGAAKSSKEGRDVRQLMEQVSNLKDVIAKKDEELQNFQKVKGNNATSLKRGLSNLRLVGPTSPRRHSIGASPNARRGKASGLFGRGTSDVDNCSEYSSKHSDSGSQQSSDERKHQKDYHQPSKFAGAAKGIDFDDEDVELVGLADADSEDRLSDISDSCLSMGTETDGSISSAVELTLFPETAKPLELIERPEARMTSEKLEKSVKMGKTEPKDRTNIPSKIPKQTLKPPGQTRPSRLSIATSSSSKALTGAKRPTISTSSSAKPLNRRR

SEQ ID NO: 80828 - protein, 1046 aa, Arabidopsis thaliana
  peptide (1)..(1046): Ceres Seq. ID no. 12657353
MNGVYVRSDVSSMLSFDGSESRESMDDSKKGHQSLVEWLNETLPYLKLPWEASEDELRACLRDGTVLCSLLNQLSPGSMRMGGSFEPASVKIERFLTAMDEMALPRFEVSDIEQSLKALKASFSDGSYDKNSLAARRRWSLPEDHSDSRGDDRNFTDGFQSKEGSEIDMSDAKISDLLKSNSLRNAPTRSLFDMLDKLLDESMTKMNGHVSHAMASLLSALVQVIEQRISNQADNLKNQNILFRVREEKYRSRIKVLESLAAGTTKENEIVTNCMEHIKLEKTRIEEKERSEEKDVVRLRKEKERSDAEIRQLKQELKLVKETHENQCLELEAKAQKTRDELEKKLKDAELHVVDSSRKVKELEKLCQSKSQRWEKKECIYQNFIDNHSGALQELSATSLSIKHEVVRTQRKYFEDLNYYGLKLKGVADAAKNYHVVLEENRRLYNEVQELKGNIRVYCRIRPFLPGQNSRQTTIEYIGETGELVVANPFKQGKDTHRLFKFNKVFDQAATQEEVFLDTRPLIRSILDGYNVCIFAYGQTGSGKTYTMSGPSITSKEDWGVNYRALNDLFLLTQSRQNTVMYEVGVQMVEIYNEQVRDILSDGIWNTALPNGLAVPDASMHCVRSTEDVLELMNIGLMNRTVGATALNERSSRSHCVLSVHVRGVDVETDSILRGSLHLVDLAGSERVDRSEATGERLKEAQHINKSLSALGDVIFALAHKNPHVPYRNSKLTQVLQSSLGGQAKTLMFVQVNPDGDSYAETVSTLKFAERVSGVELGAAKSSKEGRDVRQLMEQVSNLKDVIAKKDEELQNFQKVKGNNATSLKRGLSNLRLVGPTSPRRHSIGASPNARRGKASGLFGRGTSDVDNCSEYSSKHSDSGSQQSSDERKHQKDYHQPSKFAGAAKGIDFDDEDVELVGLADADSEDRLSDISDSCLSMGTETDGSISSAVELTLFPETAKPLELIERPEARMTSEKLEKSVKMGKTEPKDRTNIPSKIPKQTLKPPGQTRPSRLSIATSSSSKALTGAKRPTISTSSSAKPLNRRR

SEQ ID NO: 80829 - protein, 1034 aa, Arabidopsis thaliana
  peptide (1)..(1034): Ceres Seq. ID no. 12657354
MLSFDGSESRESMDDSKKGHQSLVEWLNETLPYLKLPWEASEDELRACLRDGTVLCSLLNQLSPGSMRMGGSFEPASVKIERFLTAMDEMALPRFEVSDIEQSLKALKASFSDGSYDKNSLAARRRWSLPEDHSDSRGDDRNFTDGFQSKEGSEIDMSDAKISDLLKSNSLRNAPTRSLFDMLDKLLDESMTKMNGHVSHAMASLLSALVQVIEQRISNQADNLKNQNILFRVREEKYRSRIKVLESLAAGTTKENEIVTNCMEHIKLEKTRIEEKERSEEKDVVRLRKEKERSDAEIRQLKQELKLVKETHENQCLELEAKAQKTRDELEKKLKDAELHVVDSSRKVKELEKLCQSKSQRWEKKECIYQNFIDNHSGALQELSATSLSIKHEVVRTQRKYFEDLNYYGLKLKGVADAAKNYHVVLEENRRLYNEVQELKGNIRVYCRIRPFLPGQNSRQTTIEYIGETGELVVANPFKQGKDTHRLFKFNKVFDQAATQEEVFLDTRPLIRSILDGYNVCIFAYGQTGSGKTYTMSGPSITSKEDWGVNYRALNDLFLLTQSRQNTVMYEVGVQMVEIYNEQVRDILSDGIWNTALPNGLAVPDASMHCVRSTEDVLELMNIGLMNRTVGATALNERSSRSHCVLSVHVRGVDVETDSILRGSLHLVDLAGSERVDRSEATGERLKEAQHINKSLSALGDVIFALAHKNPHVPYRNSKLTQVLQSSLGGQAKTLMFVQVNPDGDSYAETVSTLKFAERVSGVELGAAKSSKEGRDVRQLMEQVSNLKDVIAKKDEELQNFQKVKGNNATSLKRGLSNLRLVGPTSPRRHSIGASPNARRGKASGLFGRGTSDVDNCSEYSSKHSDSGSQQSSDERKHQKDYHQPSKFAGAAKGIDFDDEDVELVGLADADSEDRLSDISDSCLSMGTETDGSISSAVELTLFPETAKPLELIERPEARMTSEKLEKSVKMGKTEPKDRTNIPSKIPKQTLKPPGQTRPSRLSIATSSSSKALTGAKRPTISTSSSAKPLNRRR

SEQ ID NO: 80830 - DNA, 1647 bp, Arabidopsis thaliana
  misc_feature (1)..(1647): Ceres Seq. ID no. 12657363
  misc_feature (1)..(1647): Ortholog of  Ceres SEQ ID NO 14303109 as cited in SEQ ID NO 66330
atggattactctacggctacgacgacggcggggaacggttacagttcgccgcgtgactcttctttcccttcgagcttcactaagttcaactccgctttaacggcaggtcttctaaatccaatgtctcctcctccgcctccggcgatgcacgacaagacacgatcaagtccgacgctgttcgaaatgatggctagtgaagctgataccatagggaaagttccagttcagatccataacggtgtgcttccatctccgtcgtcgtcttcatcgtcttcttctgcggcggctacggctgcgaggacgacgaatgtgaatcatcttgttatttcagctcaggataagcaagcgcttgcgatgcaacggatttcggatcttctggtgattcggagccccgggaatcagttcaatgacccgaattcgagtgatgtgaagctgactctgagctctaaagatgggattagtatcaccatgtgtgttcataggcagattcttgtagctcacagtaggtttttcgctatgaaattgtcggatcgatggtctaaacagcagctgccgccgtcgtcttctccgtacattgttgagatctcagattgtgatgacgttgaggtgtatattgagacgttgatgctgatgtactgcagagatctaaggaagaagatgatgagacatgatgtttctagggttcttggtattttgaaggtttcagcagcaattgggtttgatgctggagtgctttcatgtctggagtacttggaagcagcaccatggtcagaggatgaagaatacaggattgcttctttgttgtctgagctacaccttgaaaacgttggggcaactgaagttttgagaagagtttctgtagaagctagcaatgggaataacgggagtaacggtgggagcaatgacgaggtgcttttgaatcttttgcatattgttcttgagggaaaagatgagaaagcaaggcgtgatatgaaaacacttgtttccaaaatgcttagagagaactcgtctggaaatgatcttaggaaagagtcgttgtacttggcttgtgatgggtgtttgcataagcttaagcggcagtttctacaagcagcagagtcggatttggagaatgttgaccagatagcaagacaagcggataatctgcattggattttggatattttgatagatagacaaatcgcagaggattttattgtgatgtgggcttctctttctgagctatccgaggtacattctaaggtccctgttgttcacaggtttgagattagcagagtaacagcgaggatctttgttggaattggaaagggacaaattctgacaccgaaagaagtgaggtgtttgctgctgaggaattggttgacacctttctatgatgattttgggtggatgaggagagcttcgaaagggcttgatcggtatttaatcgaggatggtttaagcaataccattctgactcttcctcttgcttggcaacaagagtttttcctagcttggtttgatcggttcttgaactctaatgaagactgtcctaatatccagagagggttcgaagtttggtggagacgggcgttttggagacggaaagaacagagtcaagagcctgctcggctaagagtcaccgcttcagccactgaaaactcctaa

SEQ ID NO: 80831 - protein, 548 aa, Arabidopsis thaliana
  peptide (1)..(548): Ceres Seq. ID no. 12657364
MDYSTATTTAGNGYSSPRDSSFPSSFTKFNSALTAGLLNPMSPPPPPAMHDKTRSSPTLFEMMASEADTIGKVPVQIHNGVLPSPSSSSSSSSAAATAARTTNVNHLVISAQDKQALAMQRISDLLVIRSPGNQFNDPNSSDVKLTLSSKDGISITMCVHRQILVAHSRFFAMKLSDRWSKQQLPPSSSPYIVEISDCDDVEVYIETLMLMYCRDLRKKMMRHDVSRVLGILKVSAAIGFDAGVLSCLEYLEAAPWSEDEEYRIASLLSELHLENVGATEVLRRVSVEASNGNNGSNGGSNDEVLLNLLHIVLEGKDEKARRDMKTLVSKMLRENSSGNDLRKESLYLACDGCLHKLKRQFLQAAESDLENVDQIARQADNLHWILDILIDRQIAEDFIVMWASLSELSEVHSKVPVVHRFEISRVTARIFVGIGKGQILTPKEVRCLLLRNWLTPFYDDFGWMRRASKGLDRYLIEDGLSNTILTLPLAWQQEFFLAWFDRFLNSNEDCPNIQRGFEVWWRRAFWRRKEQSQEPARLRVTASATENS

SEQ ID NO: 80832 - protein, 508 aa, Arabidopsis thaliana
  peptide (1)..(508): Ceres Seq. ID no. 12657365
MSPPPPPAMHDKTRSSPTLFEMMASEADTIGKVPVQIHNGVLPSPSSSSSSSSAAATAARTTNVNHLVISAQDKQALAMQRISDLLVIRSPGNQFNDPNSSDVKLTLSSKDGISITMCVHRQILVAHSRFFAMKLSDRWSKQQLPPSSSPYIVEISDCDDVEVYIETLMLMYCRDLRKKMMRHDVSRVLGILKVSAAIGFDAGVLSCLEYLEAAPWSEDEEYRIASLLSELHLENVGATEVLRRVSVEASNGNNGSNGGSNDEVLLNLLHIVLEGKDEKARRDMKTLVSKMLRENSSGNDLRKESLYLACDGCLHKLKRQFLQAAESDLENVDQIARQADNLHWILDILIDRQIAEDFIVMWASLSELSEVHSKVPVVHRFEISRVTARIFVGIGKGQILTPKEVRCLLLRNWLTPFYDDFGWMRRASKGLDRYLIEDGLSNTILTLPLAWQQEFFLAWFDRFLNSNEDCPNIQRGFEVWWRRAFWRRKEQSQEPARLRVTASATENS

SEQ ID NO: 80833 - protein, 500 aa, Arabidopsis thaliana
  peptide (1)..(500): Ceres Seq. ID no. 12657366
MHDKTRSSPTLFEMMASEADTIGKVPVQIHNGVLPSPSSSSSSSSAAATAARTTNVNHLVISAQDKQALAMQRISDLLVIRSPGNQFNDPNSSDVKLTLSSKDGISITMCVHRQILVAHSRFFAMKLSDRWSKQQLPPSSSPYIVEISDCDDVEVYIETLMLMYCRDLRKKMMRHDVSRVLGILKVSAAIGFDAGVLSCLEYLEAAPWSEDEEYRIASLLSELHLENVGATEVLRRVSVEASNGNNGSNGGSNDEVLLNLLHIVLEGKDEKARRDMKTLVSKMLRENSSGNDLRKESLYLACDGCLHKLKRQFLQAAESDLENVDQIARQADNLHWILDILIDRQIAEDFIVMWASLSELSEVHSKVPVVHRFEISRVTARIFVGIGKGQILTPKEVRCLLLRNWLTPFYDDFGWMRRASKGLDRYLIEDGLSNTILTLPLAWQQEFFLAWFDRFLNSNEDCPNIQRGFEVWWRRAFWRRKEQSQEPARLRVTASATENS

SEQ ID NO: 80834 - DNA, 1248 bp, Arabidopsis thaliana
  misc_feature (1)..(1248): Ceres Seq. ID no. 12657373
  misc_feature (1)..(1248): Ortholog of  Ceres SEQ ID NO 15178096 as cited in SEQ ID NO 52497
atgagacctgcgcaagataatcaaggctcgttccttggccggattagtatccgtcgcaaccaattcgtcgacgtcaacaacgaacaagaacaagaagatctcgagcttttccaaaaacacatcgccgatcgtttcaccgagcttctttctcctcctcaaccaccaccgtcagatgaaattaacacggtagcttccgtagccgcgacggagcagattatgtccgtgacttggcttcgtaagctgatggatgttttcctctgttgcgaagctgaattcaaagcgattttgttaatgggtcgtgacccgacccagatttctaagccgccttttgaccggttagttcctgaaatgttagaccggtcgattaaagcgcttgacatttgtaccgccgttgttaacggtatcgattccgttagacattaccagcgtttagctgagattgctgtgacggctttggagcaacgtccgttaggtgacggtaacgtgaggagagctaaacgcgcgttggcgaatctcgtcgtcgcgttgagtctcgaggataaagagaatgttagcggcggaggtggtggcggcggcggagggaataagacgacggagagatcgtggtcgtttggtcgtcgaagcggtggatcatcggcggcgagtaaaggaggagcaacgattggtcagctcaaatcgtcgtcgtgggcggttgggagaaattggtcggcggcgaagcagatccacgcaatgacagcgaatcttacgccgccacgtggtaacgaagcggcgggattgcctcaaccaatgtttataatgagtacggtgatggttttcgtaatgtgggtgctaacggcggcggttccgtgtcaggagagatcaggattagcgaatcatttaccagtgccgccgaaacatttgaattgggctcagagtttgatcggaatccatgagaaaatcggagatgagtggaagaagaaagagaagaaaggatctgctggattgatggaggagatgacgaggatggagaagctaggtcactcgttgatggaattcgcagatggatttcattatccggcggagaaagatgctgctgaatctgcggcggtgcaagtggcggagatggcggagatatgcaggagaatggaggaggagcttgtgccgttacagcaacagatcagagaagtttttcataggatcgtgaggagtcgtgcggagattctcgaggtgttggagcaagccgggaaagtttcggcgccagttgtgtaa

SEQ ID NO: 80835 - protein, 415 aa, Arabidopsis thaliana
  peptide (1)..(415): Ceres Seq. ID no. 12657374
MRPAQDNQGSFLGRISIRRNQFVDVNNEQEQEDLELFQKHIADRFTELLSPPQPPPSDEINTVASVAATEQIMSVTWLRKLMDVFLCCEAEFKAILLMGRDPTQISKPPFDRLVPEMLDRSIKALDICTAVVNGIDSVRHYQRLAEIAVTALEQRPLGDGNVRRAKRALANLVVALSLEDKENVSGGGGGGGGGNKTTERSWSFGRRSGGSSAASKGGATIGQLKSSSWAVGRNWSAAKQIHAMTANLTPPRGNEAAGLPQPMFIMSTVMVFVMWVLTAAVPCQERSGLANHLPVPPKHLNWAQSLIGIHEKIGDEWKKKEKKGSAGLMEEMTRMEKLGHSLMEFADGFHYPAEKDAAESAAVQVAEMAEICRRMEEELVPLQQQIREVFHRIVRSRAEILEVLEQAGKVSAPVV

SEQ ID NO: 80836 - protein, 343 aa, Arabidopsis thaliana
  peptide (1)..(343): Ceres Seq. ID no. 12657375
MSVTWLRKLMDVFLCCEAEFKAILLMGRDPTQISKPPFDRLVPEMLDRSIKALDICTAVVNGIDSVRHYQRLAEIAVTALEQRPLGDGNVRRAKRALANLVVALSLEDKENVSGGGGGGGGGNKTTERSWSFGRRSGGSSAASKGGATIGQLKSSSWAVGRNWSAAKQIHAMTANLTPPRGNEAAGLPQPMFIMSTVMVFVMWVLTAAVPCQERSGLANHLPVPPKHLNWAQSLIGIHEKIGDEWKKKEKKGSAGLMEEMTRMEKLGHSLMEFADGFHYPAEKDAAESAAVQVAEMAEICRRMEEELVPLQQQIREVFHRIVRSRAEILEVLEQAGKVSAPVV

SEQ ID NO: 80837 - protein, 334 aa, Arabidopsis thaliana
  peptide (1)..(334): Ceres Seq. ID no. 12657376
MDVFLCCEAEFKAILLMGRDPTQISKPPFDRLVPEMLDRSIKALDICTAVVNGIDSVRHYQRLAEIAVTALEQRPLGDGNVRRAKRALANLVVALSLEDKENVSGGGGGGGGGNKTTERSWSFGRRSGGSSAASKGGATIGQLKSSSWAVGRNWSAAKQIHAMTANLTPPRGNEAAGLPQPMFIMSTVMVFVMWVLTAAVPCQERSGLANHLPVPPKHLNWAQSLIGIHEKIGDEWKKKEKKGSAGLMEEMTRMEKLGHSLMEFADGFHYPAEKDAAESAAVQVAEMAEICRRMEEELVPLQQQIREVFHRIVRSRAEILEVLEQAGKVSAPVV

SEQ ID NO: 80838 - DNA, 2828 bp, Arabidopsis thaliana
  misc_feature (1)..(2828): Ceres Seq. ID no. 12657397
  misc_feature (1)..(2828): Ortholog of  Ceres SEQ ID NO 13590241 as cited in SEQ ID NO 63878
  misc_feature (1)..(2828): Ortholog of  Ceres SEQ ID NO 13660597 as cited in SEQ ID NO 67655
agcgatcaaaaaaatcttcattaaaagaaccctaaatctctcatatccgccgccgtctttgcctcattttcaacaccggtgatgacgtgtaaatagatctggttttcacggttctcactactctctgtgatttttcagactattgaatcgttaggaccaaaacaagtacaaagaaactgcagaagaaaagatttgagagagatatcttacgaaacaagcaaacagatgttgttgtcggcgcttggcgtcggagttggagtaggtgtgggtttaggcttggcttctggtcaagccgtcggaaaatgggccggcgggaactcgtcgtcaaataacgccgtcacggcggataagatggagaaggagatactccgtcaagttgttgacggcagagagagtaaaattactttcgatgagtttccttattatctcagtgaacaaacacgagtgcttctaacaagtgcagcttatgtccatttgaagcacttcgatgcttcaaaatatacgagaaacttgtctccagctagccgagccattctcttgtccggccctgccgagctttaccaacaaatgctagccaaagccctagctcatttcttcgatgccaagttacttcttctagacgtcaacgattttgcactcaagatacagagcaaatacggcagtggaaatacagaatcatcgtcattcaagagatctccctcagaatctgctttagagcaactatcaggactgtttagttccttctccatccttcctcagagagaagagtcaaaagctggtggtaccttgaggaggcaaagcagtggtgtggatatcaaatcaagctcaatggaaggctctagtaatcctccaaagcttcgtcgaaactcttcagcagcagctaatattagcaaccttgcatcttcctcaaatcaagtttcagcgcctttgaaacgaagtagcagttggtcattcgatgaaaagcttctcgtccaatctttatataaggtcttggcctatgtctccaaggcgaatccgattgtgttatatcttcgagacgtcgagaactttctgttccgctcacagagaacttacaacttgttccagaagcttctccagaaactcagtggaccggtcctcattctcggttcaagaattgtggacttgtcaagcgaagacgctcaagaaattgatgagaagctctctgctgttttcccttataatatcgacataagacctcctgaggatgagactcatctagtgagctggaaatcgcagcttgaacgcgacatgaacatgatccaaactcaggacaataggaaccatatcatggaagttttgtcggagaatgatcttatatgcgatgaccttgaatccatctcttttgaggacacgaaggttttaagcaattacattgaagagatcgttgtctctgctctttcctatcatctgatgaacaacaaagatcctgagtacagaaacggaaaactggtgatatcttctataagtttgtcgcatggattcagtctcttcagagaaggcaaagctggcggtcgtgagaagctgaagcaaaaaactaaggaggaatcatccaaggaagtaaaagctgaatcaatcaagccggagacaaaaacagagagtgtcaccaccgtaagcagcaaggaagaaccagagaaagaagctaaagctgagaaagttaccccaaaagctccggaagttgcaccggataacgagtttgagaaacggataagaccggaagtaatcccagcagaagaaattaacgtcacattcaaagacattggtgcacttgacgagataaaagagtcactacaagaacttgtaatgcttcctctccgtaggccagacctcttcacaggaggtctcttgaagccctgcagaggaatcttactcttcggtccaccgggtacaggtaaaacaatgctagctaaagccattgccaaagaggcaggagcgagtttcataaacgtttcgatgtcaacaataacttcgaaatggtttggagaagacgagaagaatgttagggctttgtttactctagcttcgaaggtgtcaccaaccataatatttgtggatgaagttgatagtatgttgggacagagaacaagagttggagaacatgaagctatgagaaagatcaagaatgagtttatgagtcattgggatgggttaatgactaaacctggtgaacgtatcttagtccttgctgctactaatcggcctttcgatcttgatgaagccattatcagacgattcgaacgaaggatcatggtgggactaccggctgtagagaacagagaaaagattctaagaacattgttggcgaaggagaaagtagatgaaaacttggattacaaggaactagcaatgatgacagaaggatacacaggaagtgatcttaagaatctgtgcacaaccgctgcgtataggccggtgagagaacttatacagcaagagaggatcaaagacacagagaagaagaagcagagagagcctacaaaagcaggtgaagaagatgaaggaaaagaagagagagttataacacttcgtccgttgaacagacaagactttaaagaagccaagaatcaggtggcggcgagttttgcggctgagggagcgggaatgggagagttgaagcagtggaatgaattgtatggagaaggaggatcgaggaagaaagaacaactcacttacttcttgtaatgatgatgatgaatcatgatgctggtaatggattatgaaatttggtaatgtaatagtatggtgaatttttgtttccatggttaataagagaataagaatatgatgatattgctaaaagtttgacccgt

SEQ ID NO: 80839 - protein, 824 aa, Arabidopsis thaliana
  peptide (1)..(824): Ceres Seq. ID no. 12657398
MLLSALGVGVGVGVGLGLASGQAVGKWAGGNSSSNNAVTADKMEKEILRQVVDGRESKITFDEFPYYLSEQTRVLLTSAAYVHLKHFDASKYTRNLSPASRAILLSGPAELYQQMLAKALAHFFDAKLLLLDVNDFALKIQSKYGSGNTESSSFKRSPSESALEQLSGLFSSFSILPQREESKAGGTLRRQSSGVDIKSSSMEGSSNPPKLRRNSSAAANISNLASSSNQVSAPLKRSSSWSFDEKLLVQSLYKVLAYVSKANPIVLYLRDVENFLFRSQRTYNLFQKLLQKLSGPVLILGSRIVDLSSEDAQEIDEKLSAVFPYNIDIRPPEDETHLVSWKSQLERDMNMIQTQDNRNHIMEVLSENDLICDDLESISFEDTKVLSNYIEEIVVSALSYHLMNNKDPEYRNGKLVISSISLSHGFSLFREGKAGGREKLKQKTKEESSKEVKAESIKPETKTESVTTVSSKEEPEKEAKAEKVTPKAPEVAPDNEFEKRIRPEVIPAEEINVTFKDIGALDEIKESLQELVMLPLRRPDLFTGGLLKPCRGILLFGPPGTGKTMLAKAIAKEAGASFINVSMSTITSKWFGEDEKNVRALFTLASKVSPTIIFVDEVDSMLGQRTRVGEHEAMRKIKNEFMSHWDGLMTKPGERILVLAATNRPFDLDEAIIRRFERRIMVGLPAVENREKILRTLLAKEKVDENLDYKELAMMTEGYTGSDLKNLCTTAAYRPVRELIQQERIKDTEKKKQREPTKAGEEDEGKEERVITLRPLNRQDFKEAKNQVAASFAAEGAGMGELKQWNELYGEGGSRKKEQLTYFL

SEQ ID NO: 80840 - protein, 782 aa, Arabidopsis thaliana
  peptide (1)..(782): Ceres Seq. ID no. 12657399
MEKEILRQVVDGRESKITFDEFPYYLSEQTRVLLTSAAYVHLKHFDASKYTRNLSPASRAILLSGPAELYQQMLAKALAHFFDAKLLLLDVNDFALKIQSKYGSGNTESSSFKRSPSESALEQLSGLFSSFSILPQREESKAGGTLRRQSSGVDIKSSSMEGSSNPPKLRRNSSAAANISNLASSSNQVSAPLKRSSSWSFDEKLLVQSLYKVLAYVSKANPIVLYLRDVENFLFRSQRTYNLFQKLLQKLSGPVLILGSRIVDLSSEDAQEIDEKLSAVFPYNIDIRPPEDETHLVSWKSQLERDMNMIQTQDNRNHIMEVLSENDLICDDLESISFEDTKVLSNYIEEIVVSALSYHLMNNKDPEYRNGKLVISSISLSHGFSLFREGKAGGREKLKQKTKEESSKEVKAESIKPETKTESVTTVSSKEEPEKEAKAEKVTPKAPEVAPDNEFEKRIRPEVIPAEEINVTFKDIGALDEIKESLQELVMLPLRRPDLFTGGLLKPCRGILLFGPPGTGKTMLAKAIAKEAGASFINVSMSTITSKWFGEDEKNVRALFTLASKVSPTIIFVDEVDSMLGQRTRVGEHEAMRKIKNEFMSHWDGLMTKPGERILVLAATNRPFDLDEAIIRRFERRIMVGLPAVENREKILRTLLAKEKVDENLDYKELAMMTEGYTGSDLKNLCTTAAYRPVRELIQQERIKDTEKKKQREPTKAGEEDEGKEERVITLRPLNRQDFKEAKNQVAASFAAEGAGMGELKQWNELYGEGGSRKKEQLTYFL

SEQ ID NO: 80841 - protein, 710 aa, Arabidopsis thaliana
  peptide (1)..(710): Ceres Seq. ID no. 12657400
MLAKALAHFFDAKLLLLDVNDFALKIQSKYGSGNTESSSFKRSPSESALEQLSGLFSSFSILPQREESKAGGTLRRQSSGVDIKSSSMEGSSNPPKLRRNSSAAANISNLASSSNQVSAPLKRSSSWSFDEKLLVQSLYKVLAYVSKANPIVLYLRDVENFLFRSQRTYNLFQKLLQKLSGPVLILGSRIVDLSSEDAQEIDEKLSAVFPYNIDIRPPEDETHLVSWKSQLERDMNMIQTQDNRNHIMEVLSENDLICDDLESISFEDTKVLSNYIEEIVVSALSYHLMNNKDPEYRNGKLVISSISLSHGFSLFREGKAGGREKLKQKTKEESSKEVKAESIKPETKTESVTTVSSKEEPEKEAKAEKVTPKAPEVAPDNEFEKRIRPEVIPAEEINVTFKDIGALDEIKESLQELVMLPLRRPDLFTGGLLKPCRGILLFGPPGTGKTMLAKAIAKEAGASFINVSMSTITSKWFGEDEKNVRALFTLASKVSPTIIFVDEVDSMLGQRTRVGEHEAMRKIKNEFMSHWDGLMTKPGERILVLAATNRPFDLDEAIIRRFERRIMVGLPAVENREKILRTLLAKEKVDENLDYKELAMMTEGYTGSDLKNLCTTAAYRPVRELIQQERIKDTEKKKQREPTKAGEEDEGKEERVITLRPLNRQDFKEAKNQVAASFAAEGAGMGELKQWNELYGEGGSRKKEQLTYFL

SEQ ID NO: 80842 - DNA, 852 bp, Arabidopsis thaliana
  misc_feature (1)..(852): Ceres Seq. ID no. 12657435
  misc_feature (1)..(852): Ortholog of  Ceres SEQ ID NO 13594193 as cited in SEQ ID NO 58558
  misc_feature (1)..(852): Ortholog of  Ceres SEQ ID NO 15177545 as cited in SEQ ID NO 0
atgtcttcgcatagtgatgaaatcgaagaagaacaaatatcaagaattgagaaaggcaaaggcaaagattgccaaggaggaatcgagacggttatatgtacttctcccagcattgtctgccttacccaaaagttgatagcagagatgattgggacctattttatagtattctctggatgtggagtggtggtagtgaatgtcttgtacggaggaacaataacatttccagggatctgtgttacttggggtctcattgttatggtcatgatttactctactggtcacatttccggtgcacattttaaccctgccgttaccgttactttcgccattttccgacggtttccttggcatcaggtaccattgtatataggtgcacaatttgcgggatcgttactagcgagtttgacattgagactaatgtttaaagtgacacccgaagctttctttggaacgactccagctgattcgccagcacgagcgctcgtcgcagaaatcattatctcattcctcctcatgttcgttatctctggagttgccaccgataatcgtgcggttggagaattagctggaattgcggtggggatgactataatggtaaacgtctttgtggccggaccaatttcgggagcatcaatgaatccagcaagaagtctaggaccagcattagtgatgggagtatataaacacatatgggtttacattgttggtcccgtcctaggagttatatccggaggttttgtttacaaccttatcagatttacggataagccactccgagaactcactaagagcgcttcttttctccgtgccgtttctccaagccacaagggttctagttctaagacttaa

SEQ ID NO: 80843 - protein, 283 aa, Arabidopsis thaliana
  peptide (1)..(283): Ceres Seq. ID no. 12657436
MSSHSDEIEEEQISRIEKGKGKDCQGGIETVICTSPSIVCLTQKLIAEMIGTYFIVFSGCGVVVVNVLYGGTITFPGICVTWGLIVMVMIYSTGHISGAHFNPAVTVTFAIFRRFPWHQVPLYIGAQFAGSLLASLTLRLMFKVTPEAFFGTTPADSPARALVAEIIISFLLMFVISGVATDNRAVGELAGIAVGMTIMVNVFVAGPISGASMNPARSLGPALVMGVYKHIWVYIVGPVLGVISGGFVYNLIRFTDKPLRELTKSASFLRAVSPSHKGSSSKT

SEQ ID NO: 80844 - protein, 235 aa, Arabidopsis thaliana
  peptide (1)..(235): Ceres Seq. ID no. 12657437
MIGTYFIVFSGCGVVVVNVLYGGTITFPGICVTWGLIVMVMIYSTGHISGAHFNPAVTVTFAIFRRFPWHQVPLYIGAQFAGSLLASLTLRLMFKVTPEAFFGTTPADSPARALVAEIIISFLLMFVISGVATDNRAVGELAGIAVGMTIMVNVFVAGPISGASMNPARSLGPALVMGVYKHIWVYIVGPVLGVISGGFVYNLIRFTDKPLRELTKSASFLRAVSPSHKGSSSKT

SEQ ID NO: 80845 - protein, 197 aa, Arabidopsis thaliana
  peptide (1)..(197): Ceres Seq. ID no. 12657438
MVMIYSTGHISGAHFNPAVTVTFAIFRRFPWHQVPLYIGAQFAGSLLASLTLRLMFKVTPEAFFGTTPADSPARALVAEIIISFLLMFVISGVATDNRAVGELAGIAVGMTIMVNVFVAGPISGASMNPARSLGPALVMGVYKHIWVYIVGPVLGVISGGFVYNLIRFTDKPLRELTKSASFLRAVSPSHKGSSSKT

SEQ ID NO: 80846 - DNA, 852 bp, Arabidopsis thaliana
  misc_feature (1)..(852): Ceres Seq. ID no. 12657439
  misc_feature (1)..(852): Ortholog of  Ceres SEQ ID NO 13594193 as cited in SEQ ID NO 58558
  misc_feature (1)..(852): Ortholog of  Ceres SEQ ID NO 15177545 as cited in SEQ ID NO 0
atgacttctcatggtgaagagatcgaagacgaacaaatatcaagaattgagaaaggcaattgcaaagatagccaaggaggaatggagacggccatatgtagttctcctagcattgtttgccttacacaaaagttgatagcagagatgattggaacctatttcataatattctctggatgtggagtagtggtagtgaatgtcttgtacggaggaacaataacatttccagggatctgtgtgacttggggtctcattgttatggtcatgatttactctactggtcacatttccggtgcacattttaaccctgccgtcactgtcacgttcgctgttttccggcggtttccttggtatcaggtaccattgtatataggtgcacaacttacgggatcattactagcgagtttaacattgagactaatgttcaatgtgacacccaaagctttctttggaacaactccaactgattcatcaggacaagcactagtagcagagatcattatctcattcctcctcatgttcgttatctccggcgttgccactgatagtcgtgcgactggagaattagctggaatcgcggtggggatgactataatattgaacgtctttgtagccggacctatttcgggagcatcaatgaatccagcgagaagtcttggaccagcaatagtgatgggaagatataaaggaatttgggtttacattgttggtccctttgtcggaatttttgccggaggttttgtttacaacttcatgagatttacggataagccactacgagaactcacaaaaagtgcttctttcctccgtagtgttgcccaaaaagacaatgcttctaaatcagatggctaa

SEQ ID NO: 80847 - protein, 283 aa, Arabidopsis thaliana
  peptide (1)..(283): Ceres Seq. ID no. 12657440
MTSHGEEIEDEQISRIEKGNCKDSQGGMETAICSSPSIVCLTQKLIAEMIGTYFIIFSGCGVVVVNVLYGGTITFPGICVTWGLIVMVMIYSTGHISGAHFNPAVTVTFAVFRRFPWYQVPLYIGAQLTGSLLASLTLRLMFNVTPKAFFGTTPTDSSGQALVAEIIISFLLMFVISGVATDSRATGELAGIAVGMTIILNVFVAGPISGASMNPARSLGPAIVMGRYKGIWVYIVGPFVGIFAGGFVYNFMRFTDKPLRELTKSASFLRSVAQKDNASKSDG

SEQ ID NO: 80848 - protein, 256 aa, Arabidopsis thaliana
  peptide (1)..(256): Ceres Seq. ID no. 12657441
METAICSSPSIVCLTQKLIAEMIGTYFIIFSGCGVVVVNVLYGGTITFPGICVTWGLIVMVMIYSTGHISGAHFNPAVTVTFAVFRRFPWYQVPLYIGAQLTGSLLASLTLRLMFNVTPKAFFGTTPTDSSGQALVAEIIISFLLMFVISGVATDSRATGELAGIAVGMTIILNVFVAGPISGASMNPARSLGPAIVMGRYKGIWVYIVGPFVGIFAGGFVYNFMRFTDKPLRELTKSASFLRSVAQKDNASKSDG

SEQ ID NO: 80849 - protein, 235 aa, Arabidopsis thaliana
  peptide (1)..(235): Ceres Seq. ID no. 12657442
MIGTYFIIFSGCGVVVVNVLYGGTITFPGICVTWGLIVMVMIYSTGHISGAHFNPAVTVTFAVFRRFPWYQVPLYIGAQLTGSLLASLTLRLMFNVTPKAFFGTTPTDSSGQALVAEIIISFLLMFVISGVATDSRATGELAGIAVGMTIILNVFVAGPISGASMNPARSLGPAIVMGRYKGIWVYIVGPFVGIFAGGFVYNFMRFTDKPLRELTKSASFLRSVAQKDNASKSDG

SEQ ID NO: 80850 - DNA, 1223 bp, Arabidopsis thaliana
  misc_feature (1)..(1223): Ceres Seq. ID no. 12657462
  misc_feature (1)..(1223): Ortholog of  Ceres SEQ ID NO 13596891 as cited in SEQ ID NO 62868
  misc_feature (1)..(1223): Ortholog of  Ceres SEQ ID NO 12617235 as cited in SEQ ID NO 63990
  misc_feature (1)..(1223): Ortholog of  Ceres SEQ ID NO 13655371 as cited in SEQ ID NO 68945
attgaatcggaaaaaaatggcgaacatctgcatagcgacgacggcaactaacaatcaggtgattctccgtgactacgtgagtggattccctaaacaatccgacctctacattgccacaaccaccattgacttacgtgtacctcccggatccatggcggttctagtcaagaatctctacttatcttgcgatcctcatagccgcactcgcatggggaagcctgatccctcatcccaggcttccatggctcatgctttcactatcggcaagccaatctctgggtttggagtggctaaagcaatagattcagggcacccaaattacaaaacaggagatttactttggggaagagttggttgggaagagtatagtgttattactccaactccttcttcacatttcaagattcatcacaccgatgttccattatctttctacactggacttcttggtattccgggtctcactgcgtatgttgggttttacgagatatgttctccgaagaaaggagagactgtatttgtatcagctgcatctggcgcagtaggtcaacttgtgggacagtttgcgaagatggcgggatgctatgtcgttggaagcgctagcagtaaagagaaggttgatcttctcaagactaagtttgggtatgatgacgctttcaattataaggaagaaaaggatcttagtgctgccctaaagaggtgtttcccagaaggaatagacatatactttgagaacgtgggaggcaaaatgttagacgcagtgctccaaaacatgaggacacatggccgaatcgcagcgtgtggaatgatttcacaatacaatctaaaggaaccagaaggtttacataacacagccaccattgtccacaaacgcatccgtgttcaagattttgcagctgtcgaattttttgatagatactccaagtttttggacttcatacttccacacgtaagagaagggaagataacatatgttgaggatatagcccaaggacttgagaatggaccttctgctttgatcggactcttccacggtaagaacgtcgggaaacaacttgtcgaagttgctcgcgagtgagattaaaattaacaaatgttttattaccgtttggttttagttgttgctggaaataagatcggtttgtacaagctgtgacaatgttttgtttgttggtcagaaataaatggactttgtttgtctgtaaagctttgtttctgacatg

SEQ ID NO: 80851 - protein, 358 aa, Arabidopsis thaliana; identical to SEQ ID NO: 29202
  peptide (1)..(358): Ceres Seq. ID no. 12657463

SEQ ID NO: 80852 - protein, 353 aa, Arabidopsis thaliana; identical to SEQ ID NO: 29203
  peptide (1)..(353): Ceres Seq. ID no. 12657464

SEQ ID NO: 80853 - protein, 308 aa, Arabidopsis thaliana; identical to SEQ ID NO: 29204
  peptide (1)..(308): Ceres Seq. ID no. 12657465

SEQ ID NO: 80854 - DNA, 1239 bp, Arabidopsis thaliana
  misc_feature (1)..(1239): Ceres Seq. ID no. 12657466
  misc_feature (1)..(1239): Ortholog of  Ceres SEQ ID NO 13658153 as cited in SEQ ID NO 66326
atgttgagtgccttttggggtcatgcatcagctattgctatagcttcaccagttgtcagcattgtgggttttcagggtgatcgtactacgataagacgaccaacatacggagagatgaaatttgtggacgtagttgaaagacctagagagatgccaacatttcctcaatcgtttccaatgaacggtggtgatggtccgcacagttacatccacaattcttcctatcaaaaagtggcgatcgatggcgttaaagaaaggacaagcgaagcgatcttagaaaaactcgatcttgaattcctcaaccgtaactctgaagaaaatatcttgagaattgtggattttggttgttccattggacctaacacgtttgatgttgtccaaaatatcattgatacagtgaaacaaaaacgcctaaaagaaaacaaaacctatattggtgctcctcttgagttccaagtatgcttcaatgatcaaccaaacaatgattttaacacactttttcgaacccaaccgttcttttcccggaaagaatatttttccgtgggagttccaggctccttccatggtagagtattaccaaaaaatagcctccatataggtcacacttcctatacactccactggctttctaatgttccccaacatgtttgtgacaagaaatctccggcattgaataaaagctatattcaatgtaataatttagtagatgaagtgaccaaggcttacaagatccagttcagaaaagattttggaggatttcttgaggcaagggcggaagagcttgtctcgggcggattgatgatcctttcaggacaatgcttgcccgatggtatcccaaaggctttgacatggcaaggtgttgtgatcgatatgattggagattgtcttatggatctggctaaattgggaataacaagcaaggaaaagatcgaactgttcagtttacccacatacattccgcatattagtgaattcaaggcaaacattgaacaaaatgaaaactttaatgtcgagacaatggaggagataagtcatcctatggattatatgccattaaccaacgacttcatcacttccatgtttcgagccattctcaatacaattatcgaagaacactttggagaaggtgtggtcaacgagctattcagtcgacttgctaaaaggctcgacaagtacccaattgatttcaaaaggtgtaaaaagtatgtgaactattttatcgtgcttaagagaaagtga

SEQ ID NO: 80855 - protein, 412 aa, Arabidopsis thaliana
  peptide (1)..(412): Ceres Seq. ID no. 12657467
MLSAFWGHASAIAIASPVVSIVGFQGDRTTIRRPTYGEMKFVDVVERPREMPTFPQSFPMNGGDGPHSYIHNSSYQKVAIDGVKERTSEAILEKLDLEFLNRNSEENILRIVDFGCSIGPNTFDVVQNIIDTVKQKRLKENKTYIGAPLEFQVCFNDQPNNDFNTLFRTQPFFSRKEYFSVGVPGSFHGRVLPKNSLHIGHTSYTLHWLSNVPQHVCDKKSPALNKSYIQCNNLVDEVTKAYKIQFRKDFGGFLEARAEELVSGGLMILSGQCLPDGIPKALTWQGVVIDMIGDCLMDLAKLGITSKEKIELFSLPTYIPHISEFKANIEQNENFNVETMEEISHPMDYMPLTNDFITSMFRAILNTIIEEHFGEGVVNELFSRLAKRLDKYPIDFKRCKKYVNYFIVLKRK

SEQ ID NO: 80856 - protein, 374 aa, Arabidopsis thaliana
  peptide (1)..(374): Ceres Seq. ID no. 12657468
MKFVDVVERPREMPTFPQSFPMNGGDGPHSYIHNSSYQKVAIDGVKERTSEAILEKLDLEFLNRNSEENILRIVDFGCSIGPNTFDVVQNIIDTVKQKRLKENKTYIGAPLEFQVCFNDQPNNDFNTLFRTQPFFSRKEYFSVGVPGSFHGRVLPKNSLHIGHTSYTLHWLSNVPQHVCDKKSPALNKSYIQCNNLVDEVTKAYKIQFRKDFGGFLEARAEELVSGGLMILSGQCLPDGIPKALTWQGVVIDMIGDCLMDLAKLGITSKEKIELFSLPTYIPHISEFKANIEQNENFNVETMEEISHPMDYMPLTNDFITSMFRAILNTIIEEHFGEGVVNELFSRLAKRLDKYPIDFKRCKKYVNYFIVLKRK

SEQ ID NO: 80857 - protein, 362 aa, Arabidopsis thaliana
  peptide (1)..(362): Ceres Seq. ID no. 12657469
MPTFPQSFPMNGGDGPHSYIHNSSYQKVAIDGVKERTSEAILEKLDLEFLNRNSEENILRIVDFGCSIGPNTFDVVQNIIDTVKQKRLKENKTYIGAPLEFQVCFNDQPNNDFNTLFRTQPFFSRKEYFSVGVPGSFHGRVLPKNSLHIGHTSYTLHWLSNVPQHVCDKKSPALNKSYIQCNNLVDEVTKAYKIQFRKDFGGFLEARAEELVSGGLMILSGQCLPDGIPKALTWQGVVIDMIGDCLMDLAKLGITSKEKIELFSLPTYIPHISEFKANIEQNENFNVETMEEISHPMDYMPLTNDFITSMFRAILNTIIEEHFGEGVVNELFSRLAKRLDKYPIDFKRCKKYVNYFIVLKRK

SEQ ID NO: 80858 - DNA, 1362 bp, Arabidopsis thaliana
  misc_feature (1)..(1362): Ceres Seq. ID no. 12657470
  misc_feature (1)..(1362): Ortholog of  Ceres SEQ ID NO 13594345 as cited in SEQ ID NO 58043
  misc_feature (1)..(1362): Ortholog of  Ceres SEQ ID NO 12614112 as cited in SEQ ID NO 60891
  misc_feature (1)..(1362): Ortholog of  Ceres SEQ ID NO 13597574 as cited in SEQ ID NO 64677
  misc_feature (1)..(1362): Ortholog of  Ceres SEQ ID NO 13597843 as cited in SEQ ID NO 64850
  misc_feature (1)..(1362): Ortholog of  Ceres SEQ ID NO 13662880 as cited in SEQ ID NO 65422
  misc_feature (1)..(1362): Ortholog of  Ceres SEQ ID NO 12779098 as cited in SEQ ID NO 67698
  misc_feature (1)..(1362): Ortholog of  Ceres SEQ ID NO 13591190 as cited in SEQ ID NO 68044
  misc_feature (1)..(1362): Ortholog of  Ceres SEQ ID NO 13596089 as cited in SEQ ID NO 68373
atggaggaaaagcaagagaggaggagaaggatcgtgttgattcccgctccagcacaaggacacatatctccgatgatgcaacttgcaagagcccttcacttaaagggcttctccattacagttgctcaaaccaagttcaattacttgaagccttcaaaagacttagctgattttcagtttatcaccatcccagagagcttaccagcctcggatcttaagaatctaggaccagtttggtttcttcttaaactcaataaagagtgtgagtttagcttcaaggagtgtttaggtcaattgttgctgcaaaaacaacttataccggaagaagagatcgcttgtgtcatctacgacgagttcatgtactttgctgaagctgcagccaaagagtttaaccttcccaaagttattttcagtaccgaaaatgcgacggcttttgcttgtcgctctgccatgtgcaaactctatgcaaaagatggtttggctccccttaaagaaggatgtgggcgagaagaggagctagtgccaaagttgcatccccttagatacaaagacctaccaacttcagcatttgcaccagtagaagcctcagtggaagtgtttaaaagttcatgtgataaagggacagcttccgctatgataatcaacacagtgaggtgtctagagatatcatccttggagtggcttcaacaagaacttaagattccgatatatcctataggccctcttcacatggtttcttcagctcctcctacgagtctactagacgagaatgagagttgcattgattggctgaacaaacaaaagccgagctcggtgatttacataagtttgggaagctttactttgttggaaactaaagaagtgttggaaatggcttcgggcttggttagtagtaaccaacacttcttgtgggtgattcgacccgggtccatacttggttctgaattgactaatgaggaattattgagtatgatggaaataccggatcgaggctacattgtgaaatgggctccacaaaagcaagtgcttgcacattctgcggttggagcattttggagtcattgtggatggaactcgactctagagagcatgggtgaaggagttccgatgatttgtaggccttttactactgatcaaaaggtaaatgcgcggtatgtggagtgtgtctggagagttggggttcaagtggagggtgaactaaagagaggagtagtcgagagagctgtgaagaggttactggtggatgaagaaggagaagagatgaagttgagagctctcagtttgaaagagaaactcaaagtttctgttctaccgggaggttcttcacacagttcactagatgacttaatcaagactctatga

SEQ ID NO: 80859 - protein, 453 aa, Arabidopsis thaliana
  peptide (1)..(453): Ceres Seq. ID no. 12657471
MEEKQERRRRIVLIPAPAQGHISPMMQLARALHLKGFSITVAQTKFNYLKPSKDLADFQFITIPESLPASDLKNLGPVWFLLKLNKECEFSFKECLGQLLLQKQLIPEEEIACVIYDEFMYFAEAAAKEFNLPKVIFSTENATAFACRSAMCKLYAKDGLAPLKEGCGREEELVPKLHPLRYKDLPTSAFAPVEASVEVFKSSCDKGTASAMIINTVRCLEISSLEWLQQELKIPIYPIGPLHMVSSAPPTSLLDENESCIDWLNKQKPSSVIYISLGSFTLLETKEVLEMASGLVSSNQHFLWVIRPGSILGSELTNEELLSMMEIPDRGYIVKWAPQKQVLAHSAVGAFWSHCGWNSTLESMGEGVPMICRPFTTDQKVNARYVECVWRVGVQVEGELKRGVVERAVKRLLVDEEGEEMKLRALSLKEKLKVSVLPGGSSHSSLDDLIKTL

SEQ ID NO: 80860 - protein, 429 aa, Arabidopsis thaliana
  peptide (1)..(429): Ceres Seq. ID no. 12657472
MMQLARALHLKGFSITVAQTKFNYLKPSKDLADFQFITIPESLPASDLKNLGPVWFLLKLNKECEFSFKECLGQLLLQKQLIPEEEIACVIYDEFMYFAEAAAKEFNLPKVIFSTENATAFACRSAMCKLYAKDGLAPLKEGCGREEELVPKLHPLRYKDLPTSAFAPVEASVEVFKSSCDKGTASAMIINTVRCLEISSLEWLQQELKIPIYPIGPLHMVSSAPPTSLLDENESCIDWLNKQKPSSVIYISLGSFTLLETKEVLEMASGLVSSNQHFLWVIRPGSILGSELTNEELLSMMEIPDRGYIVKWAPQKQVLAHSAVGAFWSHCGWNSTLESMGEGVPMICRPFTTDQKVNARYVECVWRVGVQVEGELKRGVVERAVKRLLVDEEGEEMKLRALSLKEKLKVSVLPGGSSHSSLDDLIKTL

SEQ ID NO: 80861 - protein, 428 aa, Arabidopsis thaliana
  peptide (1)..(428): Ceres Seq. ID no. 12657473
MQLARALHLKGFSITVAQTKFNYLKPSKDLADFQFITIPESLPASDLKNLGPVWFLLKLNKECEFSFKECLGQLLLQKQLIPEEEIACVIYDEFMYFAEAAAKEFNLPKVIFSTENATAFACRSAMCKLYAKDGLAPLKEGCGREEELVPKLHPLRYKDLPTSAFAPVEASVEVFKSSCDKGTASAMIINTVRCLEISSLEWLQQELKIPIYPIGPLHMVSSAPPTSLLDENESCIDWLNKQKPSSVIYISLGSFTLLETKEVLEMASGLVSSNQHFLWVIRPGSILGSELTNEELLSMMEIPDRGYIVKWAPQKQVLAHSAVGAFWSHCGWNSTLESMGEGVPMICRPFTTDQKVNARYVECVWRVGVQVEGELKRGVVERAVKRLLVDEEGEEMKLRALSLKEKLKVSVLPGGSSHSSLDDLIKTL

SEQ ID NO: 80862 - DNA, 1107 bp, Arabidopsis thaliana
  misc_feature (1)..(1107): Ceres Seq. ID no. 12657474
  misc_feature (1)..(1107): Ortholog of  Ceres SEQ ID NO 14304654 as cited in SEQ ID NO 53301
  misc_feature (1)..(1107): Ortholog of  Ceres SEQ ID NO 15172291 as cited in SEQ ID NO 55046
  misc_feature (1)..(1107): Ortholog of  Ceres SEQ ID NO 13658153 as cited in SEQ ID NO 66326
  misc_feature (1)..(1107): Ortholog of  Ceres SEQ ID NO 14303011 as cited in SEQ ID NO 67226
atgggtgttctaagcatgaagggaggagatggagaacacagttatgctaataattccgagggacagaaacgtcttgcttctgatgcaaaaccggtggtggtagaaaccgtaaaagaaatgatagtgaaaacagattttcctggttgtataaaagtggccgacttaggatgttcttccggggaaaacacgttattggtcatgtccgaaatagtcaacacgatcattacatcataccaacaaaaaggcaaaaacttaccagagatcaattgttgtttgaacgatctcccagacaacgatttcaacactactttcaagttggtccctgccttccacaagttgctgaagatggatgttaaagggaaatgcttcatctcaggagtcccaggctcattctactcaagacttttccctagcaagtctctccattttgttcattcatctctttgtctacattggctttccaaagttcctgatgggcttgaagataacaagaagaatgtgtaccttagaagtccatgccctccaaatgtgtacaagagttatttgactcagttcaagaatgatttctctttgtttctgagactgcgtgcggatgagactgtgccaaatggacgtatggctcttactttcgtgggcagaaaatctttggatcctttatctaaagattgtttccaaaattggtcgtcgatatctgattccctcctcgacttggtttctgagggtattgtgaaggaatcggatgtagattcttttaacttgccattctacaatcctgacgagagtgaggtgagggaagttatcgaaagcgagggctcgttcaaaatcagcaattttgagacaatctttggtcttctcttttcatacaaaactggtcgtactgaagtgaaagatgatgatgataatttggaccaatcatgtcgatttgaagtcattcgaaagagggcaagcatcataagatccattactgaaccaatgcttggtgctcattttggagacgccattatggatcgtctgttcgagaggtatacataccatcttgccgagcgttacgatactttgcgcaacaaaccaactgttcagttcttcgtttccttgacaaggaagtaa

SEQ ID NO: 80863 - protein, 368 aa, Arabidopsis thaliana
  peptide (1)..(368): Ceres Seq. ID no. 12657475
MGVLSMKGGDGEHSYANNSEGQKRLASDAKPVVVETVKEMIVKTDFPGCIKVADLGCSSGENTLLVMSEIVNTIITSYQQKGKNLPEINCCLNDLPDNDFNTTFKLVPAFHKLLKMDVKGKCFISGVPGSFYSRLFPSKSLHFVHSSLCLHWLSKVPDGLEDNKKNVYLRSPCPPNVYKSYLTQFKNDFSLFLRLRADETVPNGRMALTFVGRKSLDPLSKDCFQNWSSISDSLLDLVSEGIVKESDVDSFNLPFYNPDESEVREVIESEGSFKISNFETIFGLLFSYKTGRTEVKDDDDNLDQSCRFEVIRKRASIIRSITEPMLGAHFGDAIMDRLFERYTYHLAERYDTLRNKPTVQFFVSLTRK

SEQ ID NO: 80864 - protein, 363 aa, Arabidopsis thaliana
  peptide (1)..(363): Ceres Seq. ID no. 12657476
MKGGDGEHSYANNSEGQKRLASDAKPVVVETVKEMIVKTDFPGCIKVADLGCSSGENTLLVMSEIVNTIITSYQQKGKNLPEINCCLNDLPDNDFNTTFKLVPAFHKLLKMDVKGKCFISGVPGSFYSRLFPSKSLHFVHSSLCLHWLSKVPDGLEDNKKNVYLRSPCPPNVYKSYLTQFKNDFSLFLRLRADETVPNGRMALTFVGRKSLDPLSKDCFQNWSSISDSLLDLVSEGIVKESDVDSFNLPFYNPDESEVREVIESEGSFKISNFETIFGLLFSYKTGRTEVKDDDDNLDQSCRFEVIRKRASIIRSITEPMLGAHFGDAIMDRLFERYTYHLAERYDTLRNKPTVQFFVSLTRK

SEQ ID NO: 80865 - protein, 329 aa, Arabidopsis thaliana
  peptide (1)..(329): Ceres Seq. ID no. 12657477
MIVKTDFPGCIKVADLGCSSGENTLLVMSEIVNTIITSYQQKGKNLPEINCCLNDLPDNDFNTTFKLVPAFHKLLKMDVKGKCFISGVPGSFYSRLFPSKSLHFVHSSLCLHWLSKVPDGLEDNKKNVYLRSPCPPNVYKSYLTQFKNDFSLFLRLRADETVPNGRMALTFVGRKSLDPLSKDCFQNWSSISDSLLDLVSEGIVKESDVDSFNLPFYNPDESEVREVIESEGSFKISNFETIFGLLFSYKTGRTEVKDDDDNLDQSCRFEVIRKRASIIRSITEPMLGAHFGDAIMDRLFERYTYHLAERYDTLRNKPTVQFFVSLTRK

SEQ ID NO: 80866 - DNA, 1802 bp, Arabidopsis thaliana
  misc_feature (1)..(1802): Ceres Seq. ID no. 12657478
  misc_feature (1)..(1802): Ortholog of  Ceres SEQ ID NO 15176081 as cited in SEQ ID NO 65838
  misc_feature (1)..(1802): Ortholog of  Ceres SEQ ID NO 13660287 as cited in SEQ ID NO 67316
gctcactctttggtctttagtcttttacatgctttaatctttccatctttgtctctatctcgtggatatggaagaagacaaaattcttacggagacccttctatctgcggcggaagaaccacctgctcttcctttctcatccgtggaagatattcctccgatcaccaccgttggtggcttcgtcaaggagttcaacgtggaggtcaaaaagctatggtacttggcagggccagccattttcatgtctataacccaatattctctcggcgctgctactcaggtcttcgccggacacatcagcaccatcgctctcgcagcggtctccgttgaaaactcggtcatcgctggattctcatttggtgtcatgcttggaatgggaagcgcgttagaaacgctatgtggacaagcgtttggagcagggaaattgtcaatgcttggcgtttacttgcaacgatcatgggtgatactaaacgtgaccgcggttattctctcgcttctttacatcttcgccgctccaatcctcgcgttcatcggtcaaacgccggcgatctctagcgccacgggaatattttccatctacatgatccctcagatctttgcttacgctgttaattacccaacggctaagttcttgcaatcacaaagcaaaatcatggtgatggctgcgatatcagcggttgcacttgttctacacgtgctcctcacgtggtttgtcattgaggggctccagtggggcacggcgggtctagccgtcgtgctcaacgcctcgtggtggttcattgtcgtggcgcagcttgtgtacatatttagtggtacatgcggtgaagcttggtctggattctcatgggaagcttttcataatttgtggagtttcgtcagattatctttggcttctgctgttatgctctgtttggaggtatggtatcttatggcagtcatattatttgctggatatttgaagaatgctgagatctccgtagctgctctctccatctgcatgaacattttgggatggactgcaatgattgctattgggatgaacgcagccgtaagtgtgagagtgtctaatgaattaggagcaaaacatccaagaaccgcaaaattctcactactagtggcagtgataacatctacagtgatcggacttgctatatcaattgctctactcatctttagagataaatatccatcgttatttgtgggagacgaagaagttatcattgttgttaaagatcttacaccaatactcgcagtctctattgtcatcaacaatgtccaacctgtcttatcaggggtggctgtgggagctggatggcaagcagttgtggcatacgttaacatagtatgttattacgtgtttggaatcccatttggtctgttactaggctacaagcttaactttggtgtaatgggaatctggtgcggaatgttgacaggaaccgtggttcagacaatagtcttaacatggatgatctgtagaacaaattgggacacagaggctgcaatggctgagggtaggataagagagtggggaggagaagtatcagatcaactcttaaactaaaaagacattataagaagtgatatagtttgtgttttattaatctcgtgatttgtattcatgtcgaatctttgttgcatcaaagtttgtttttgtgtctttttggttgtaccatgagtcttgtccaggttttgagatgatatgcttgagcttgacacttatggacttgttcggtcgagaaatggagagaaaagatacaaagagatcgactggtccctctttcttacgacttaaatttgtt

SEQ ID NO: 80867 - protein, 498 aa, Arabidopsis thaliana
  peptide (1)..(498): Ceres Seq. ID no. 12657479
MEEDKILTETLLSAAEEPPALPFSSVEDIPPITTVGGFVKEFNVEVKKLWYLAGPAIFMSITQYSLGAATQVFAGHISTIALAAVSVENSVIAGFSFGVMLGMGSALETLCGQAFGAGKLSMLGVYLQRSWVILNVTAVILSLLYIFAAPILAFIGQTPAISSATGIFSIYMIPQIFAYAVNYPTAKFLQSQSKIMVMAAISAVALVLHVLLTWFVIEGLQWGTAGLAVVLNASWWFIVVAQLVYIFSGTCGEAWSGFSWEAFHNLWSFVRLSLASAVMLCLEVWYLMAVILFAGYLKNAEISVAALSICMNILGWTAMIAIGMNAAVSVRVSNELGAKHPRTAKFSLLVAVITSTVIGLAISIALLIFRDKYPSLFVGDEEVIIVVKDLTPILAVSIVINNVQPVLSGVAVGAGWQAVVAYVNIVCYYVFGIPFGLLLGYKLNFGVMGIWCGMLTGTVVQTIVLTWMICRTNWDTEAAMAEGRIREWGGEVSDQLLN

SEQ ID NO: 80868 - protein, 440 aa, Arabidopsis thaliana
  peptide (1)..(440): Ceres Seq. ID no. 12657480
MSITQYSLGAATQVFAGHISTIALAAVSVENSVIAGFSFGVMLGMGSALETLCGQAFGAGKLSMLGVYLQRSWVILNVTAVILSLLYIFAAPILAFIGQTPAISSATGIFSIYMIPQIFAYAVNYPTAKFLQSQSKIMVMAAISAVALVLHVLLTWFVIEGLQWGTAGLAVVLNASWWFIVVAQLVYIFSGTCGEAWSGFSWEAFHNLWSFVRLSLASAVMLCLEVWYLMAVILFAGYLKNAEISVAALSICMNILGWTAMIAIGMNAAVSVRVSNELGAKHPRTAKFSLLVAVITSTVIGLAISIALLIFRDKYPSLFVGDEEVIIVVKDLTPILAVSIVINNVQPVLSGVAVGAGWQAVVAYVNIVCYYVFGIPFGLLLGYKLNFGVMGIWCGMLTGTVVQTIVLTWMICRTNWDTEAAMAEGRIREWGGEVSDQLLN

SEQ ID NO: 80869 - protein, 399 aa, Arabidopsis thaliana
  peptide (1)..(399): Ceres Seq. ID no. 12657481
MLGMGSALETLCGQAFGAGKLSMLGVYLQRSWVILNVTAVILSLLYIFAAPILAFIGQTPAISSATGIFSIYMIPQIFAYAVNYPTAKFLQSQSKIMVMAAISAVALVLHVLLTWFVIEGLQWGTAGLAVVLNASWWFIVVAQLVYIFSGTCGEAWSGFSWEAFHNLWSFVRLSLASAVMLCLEVWYLMAVILFAGYLKNAEISVAALSICMNILGWTAMIAIGMNAAVSVRVSNELGAKHPRTAKFSLLVAVITSTVIGLAISIALLIFRDKYPSLFVGDEEVIIVVKDLTPILAVSIVINNVQPVLSGVAVGAGWQAVVAYVNIVCYYVFGIPFGLLLGYKLNFGVMGIWCGMLTGTVVQTIVLTWMICRTNWDTEAAMAEGRIREWGGEVSDQLLN

SEQ ID NO: 80870 - DNA, 846 bp, Arabidopsis thaliana
  misc_feature (1)..(846): Ceres Seq. ID no. 12657485
  misc_feature (1)..(846): Ortholog of  Ceres SEQ ID NO 13645959 as cited in SEQ ID NO 20706
atggacaatcacaatgaagaaccaaaaatcgcaccagaacctaatcgttggtacaacattacgttaggaccaacactactcaacaacaatcactcatactctcccaaattctgcactttacgatatgagtttaaacctgcttcaattgacagtactaaaccaggattgttacataagagtaaagacaataaggttacgttggagtttcaaaacaatcaacttaataaaccaaaagttagatttgatggtgttagtgaggattacaatgacagagataaagatgcaatcctcttctttgatggcgaaaatttccgattggagaagcttcaccgctctgttaagcgtttaaaatgcttacgtgtgcctgatgaatctgcttcagctagtagagtagtaacaaagattgttcctccagttgaaaaaccggttaagatggcacatattgacattaacaaccctgtagactttgaggaggatgtgaacattgaagatgacaatgaagaagaaactttatcgagaaaggagtttcaaacgggtggccttgacattgacattaaccttccgcatcctgctgaaatggaagatgatgagatagcagttgtagacattaatgatgacgaatcttacaaaggtcttaacgcggcagaagcactcagagcgcaagtaaatgcagaagcgagagaggagtctcgaaagagttcgagttcaggtagcgggagagaaagtgagagtagtgaaagtggagttgagagtagtggtagcggtagtagtagtaccagtgaaagcagaaaaagcggtagtgaaggtggaaccgctagcgagagcggaagccgagatagtctctag

SEQ ID NO: 80871 - protein, 281 aa, Arabidopsis thaliana
  peptide (1)..(281): Ceres Seq. ID no. 12657486
MDNHNEEPKIAPEPNRWYNITLGPTLLNNNHSYSPKFCTLRYEFKPASIDSTKPGLLHKSKDNKVTLEFQNNQLNKPKVRFDGVSEDYNDRDKDAILFFDGENFRLEKLHRSVKRLKCLRVPDESASASRVVTKIVPPVEKPVKMAHIDINNPVDFEEDVNIEDDNEEETLSRKEFQTGGLDIDINLPHPAEMEDDEIAVVDINDDESYKGLNAAEALRAQVNAEAREESRKSSSSGSGRESESSESGVESSGSGSSSTSESRKSGSEGGTASESGSRDSL

SEQ ID NO: 80872 - DNA, 2289 bp, Arabidopsis thaliana
  misc_feature (1)..(2289): Ceres Seq. ID no. 12657514
  misc_feature (1)..(2289): Ortholog of  Ceres SEQ ID NO 14306268 as cited in SEQ ID NO 51135
  misc_feature (1)..(2289): Ortholog of  Ceres SEQ ID NO 15225368 as cited in SEQ ID NO 58345
  misc_feature (1)..(2289): Ortholog of  Ceres SEQ ID NO 13654989 as cited in SEQ ID NO 63117
  misc_feature (1)..(2289): Ortholog of  Ceres SEQ ID NO 13584744 as cited in SEQ ID NO 69137
aaaaaagaaactactttccagatatcaatcatgttctctccagtactcttcagattctcaaaacctaattcttttctggtccttctcttcttcttatcctatattcactttcttccttgtgctcaaagtcaacgagaaccatgtgacactctgtttcgttgtggggatctcacagccggtttccctttctggggagtggctcggccccaaccttgtggtcatccatctttaggacttcactgccaaaaacaaacaaattcgacttctctaatcatctcaagtctgatgtaccgtgttctcgaagtaaataccactactagtactcttaaattagtaaggcaagacttttcaggtccattctgctcggcttcattcagcggagcaacgttgactcctgaactttttgagcttttgccagactacaagaccctctccgcttactacctctgcaaccctagtcttcactatcctgcgaaattcatatgtccaaataagggtgttggctcaatacatcaggatgatttgtatcacaatcactgtggtgggattttcaacatcactgttcccataggttatgctccagaggaaggagctttgaatgtaaccaatttggaaagtgttcttaaaaaaggatttgaggtgaaacttagcatcgatgagagaccgtgtcaagaatgtaaaaccaatggtggaatctgcgcctaccatgttgcaactccggtttgctgcaagacaaactcgtcatcagaagtcaattgcactccaatgatgccatctggatctagtgctcatgcaggtctctccaaaaaagggaaaataggcatcggattcgcttctggattcttgggtgccacacttatcggcggatgtttactctgtatcttcatccggagaaggaagaaactagcaacacaatacacaaacaaaggcctatcaacaacaacaccttactcaagcaattatacaatgtcaaacactccaacctccacaacaatctctggcagcaatcactctcttgtaccttcaatatctaaccttggaaacggaagcgtctactctggaattcaagtcttcagctacgaagaactcgaggaagccactgaaaatttctccaaagaactcggagatggaggcttcggtactgtctactacggtacactaaaagacggacgagcagtagctgtgaaacgactcttcgaaagatcactaaaacgcgtggaacaattcaagaacgaaatcgatatcttgaaatccctaaaacacccgaacctagtgattctatacggatgcacaacaagacatagcagagagttactcctagtatacgaatacatctccaatggcacactcgctgaacatctccatggaaaccaagcacaatctcgccctatttgttggcctgctcgactccaaatagccatcgaaaccgctagcgccttgtcctatctccacgcctcagggatcatacacagagacgttaagactactaacattctcttagatagcaattaccaagtcaaagtagctgatttcggactctcacggttgtttccgatggatcaaactcacatctccactgctccacaaggtactccaggatatgtagatcctgagtattaccaatgttaccgattaaacgagaagagtgacgtttacagcttcggagtcgtactctccgaactaatctcatcgaaagaagctgttgatatcaccagacaccgccacgatattaacctcgccaacatggcgatttcgaaaatccaaaacgacgccgtacatgagctcgcggatctatcactcggattcgcgagagatccttcggtgaagaagatgatgtcgtcggttgctgaattagcattccgatgtttgcaacaggagagagacgtacggccatcgatggatgagatcgttgaggttttgagagtgattcagaaggatgggataagtgattcgaaggatgtggttgtggagattgatgtgaacggtggtgatgatgttggattgttgaagcatggtgttcctccgccgttatcgccggagactgataaaacgacggcgagtagttcgaatactacggcgagttcgttttgaagagagtaggaaggagactctagttctgaaggaaggttcgttttgtcagtaaataaaaaaaatcatttttcatttttgccttttgaaatttttttttataaatcttgtcgttaaccttttgactttttttttttgtcgacaccttttgacttttttcatcggttccgatattttatcctttctatatattatttttgt

SEQ ID NO: 80873 - protein, 696 aa, Arabidopsis thaliana
  peptide (1)..(696): Ceres Seq. ID no. 12657515
KKETTFQISIMFSPVLFRFSKPNSFLVLLFFLSYIHFLPCAQSQREPCDTLFRCGDLTAGFPFWGVARPQPCGHPSLGLHCQKQTNSTSLIISSLMYRVLEVNTTTSTLKLVRQDFSGPFCSASFSGATLTPELFELLPDYKTLSAYYLCNPSLHYPAKFICPNKGVGSIHQDDLYHNHCGGIFNITVPIGYAPEEGALNVTNLESVLKKGFEVKLSIDERPCQECKTNGGICAYHVATPVCCKTNSSSEVNCTPMMPSGSSAHAGLSKKGKIGIGFASGFLGATLIGGCLLCIFIRRRKKLATQYTNKGLSTTTPYSSNYTMSNTPTSTTISGSNHSLVPSISNLGNGSVYSGIQVFSYEELEEATENFSKELGDGGFGTVYYGTLKDGRAVAVKRLFERSLKRVEQFKNEIDILKSLKHPNLVILYGCTTRHSRELLLVYEYISNGTLAEHLHGNQAQSRPICWPARLQIAIETASALSYLHASGIIHRDVKTTNILLDSNYQVKVADFGLSRLFPMDQTHISTAPQGTPGYVDPEYYQCYRLNEKSDVYSFGVVLSELISSKEAVDITRHRHDINLANMAISKIQNDAVHELADLSLGFARDPSVKKMMSSVAELAFRCLQQERDVRPSMDEIVEVLRVIQKDGISDSKDVVVEIDVNGGDDVGLLKHGVPPPLSPETDKTTASSSNTTASSF

SEQ ID NO: 80874 - protein, 686 aa, Arabidopsis thaliana
  peptide (1)..(686): Ceres Seq. ID no. 12657516
MFSPVLFRFSKPNSFLVLLFFLSYIHFLPCAQSQREPCDTLFRCGDLTAGFPFWGVARPQPCGHPSLGLHCQKQTNSTSLIISSLMYRVLEVNTTTSTLKLVRQDFSGPFCSASFSGATLTPELFELLPDYKTLSAYYLCNPSLHYPAKFICPNKGVGSIHQDDLYHNHCGGIFNITVPIGYAPEEGALNVTNLESVLKKGFEVKLSIDERPCQECKTNGGICAYHVATPVCCKTNSSSEVNCTPMMPSGSSAHAGLSKKGKIGIGFASGFLGATLIGGCLLCIFIRRRKKLATQYTNKGLSTTTPYSSNYTMSNTPTSTTISGSNHSLVPSISNLGNGSVYSGIQVFSYEELEEATENFSKELGDGGFGTVYYGTLKDGRAVAVKRLFERSLKRVEQFKNEIDILKSLKHPNLVILYGCTTRHSRELLLVYEYISNGTLAEHLHGNQAQSRPICWPARLQIAIETASALSYLHASGIIHRDVKTTNILLDSNYQVKVADFGLSRLFPMDQTHISTAPQGTPGYVDPEYYQCYRLNEKSDVYSFGVVLSELISSKEAVDITRHRHDINLANMAISKIQNDAVHELADLSLGFARDPSVKKMMSSVAELAFRCLQQERDVRPSMDEIVEVLRVIQKDGISDSKDVVVEIDVNGGDDVGLLKHGVPPPLSPETDKTTASSSNTTASSF

SEQ ID NO: 80875 - protein, 601 aa, Arabidopsis thaliana
  peptide (1)..(601): Ceres Seq. ID no. 12657517
MYRVLEVNTTTSTLKLVRQDFSGPFCSASFSGATLTPELFELLPDYKTLSAYYLCNPSLHYPAKFICPNKGVGSIHQDDLYHNHCGGIFNITVPIGYAPEEGALNVTNLESVLKKGFEVKLSIDERPCQECKTNGGICAYHVATPVCCKTNSSSEVNCTPMMPSGSSAHAGLSKKGKIGIGFASGFLGATLIGGCLLCIFIRRRKKLATQYTNKGLSTTTPYSSNYTMSNTPTSTTISGSNHSLVPSISNLGNGSVYSGIQVFSYEELEEATENFSKELGDGGFGTVYYGTLKDGRAVAVKRLFERSLKRVEQFKNEIDILKSLKHPNLVILYGCTTRHSRELLLVYEYISNGTLAEHLHGNQAQSRPICWPARLQIAIETASALSYLHASGIIHRDVKTTNILLDSNYQVKVADFGLSRLFPMDQTHISTAPQGTPGYVDPEYYQCYRLNEKSDVYSFGVVLSELISSKEAVDITRHRHDINLANMAISKIQNDAVHELADLSLGFARDPSVKKMMSSVAELAFRCLQQERDVRPSMDEIVEVLRVIQKDGISDSKDVVVEIDVNGGDDVGLLKHGVPPPLSPETDKTTASSSNTTASSF

SEQ ID NO: 80876 - DNA, 1917 bp, Arabidopsis thaliana
  misc_feature (1)..(1917): Ceres Seq. ID no. 12657518
  misc_feature (1)..(1917): Ortholog of  Ceres SEQ ID NO 15176941 as cited in SEQ ID NO 55559
atgatcaatctttctctatatcagacaaattctttgtcctatacaatcatatggatgctctttgtgattccctcttgtgtgttgtcagttgatgagcgacagaaacactgctctcctacgtttagatgtggcaagcagacagatctctattatcccttttggtcacctgaccgagaagagtgcggtcacccggttttcaaggtcaactgcagcggagatttcgcagagtttactatatccacggttaagttccacgtcctcgagatgaactatgagtctcgtataataagacttgtaagaacagagtatctcaacaatctttgtccttggcatccagagaacagatcaatcaaccaagaagtccttccatttcttcaagacaccgagctaggaaccttttattacaactgctctggtccaacggtagacgaacttgccaatggttacatcagacagcttgggtgtgatgaagaagttggtgggaaaagttactttgtctcgtccccttcacatcctgggaatagagctatcttagatgggttaagtgcatcgtgtgaaagaaacgtcgatatccctgtttctcgatctgccatggagacaacagcgacaaatcagagtctcgaggctataaagaaggttcttgatgtgggtttcgaacttggctttaacagtgattgttccctatgcgtagcatcaaaaggtgcttgtggctttaatcagagctcaaaagcattcgtctgttattgtaaagatgagcctcacgagcatacatgtggaaagatgggtataggcattggacttggctgtggatttttgggtgccactcttattaccgtatgtttgctctgtttctttttccaaaagagacgaacttcacatcatctaagaccaagagacaataacctaaaggggctagtacaactgaaacagtacagttatgccgaagtgaggaaaattacaaaattattttctcacacgcttgggaaaggaggatttggaactgtctatgggggaaacctttgcgatggtcgtaaggttgcagtgaaaatattgaaagattttaagagtaatggtgaagacttcatcaatgaagtcgcaagcatgagccaaacatctcatgttaacattgtttctttgcttggtttttgctatgaagggtccaaaagagctattgtgtatgagtttctagagaatgggtcgctggatcaattcctctctgaaaagaagtcactgaatctagatgtaagtacgctatacagaatcgctctaggtgttgcccggggacttgattacttgcaccatggctgcaaaacaaggattgttcatttcgacatcaaacctcagaatatactattagatgacacattctgccctaaagtctcagactttggccttgctaagctctgcgaaaaaagagaaagcattttgtccttgctagacgcaagaggaacaataggttacattgcacctgaggtgttttcaggaatgtatggaagagtctctcacaagtcagatgtttacagctatggaatgttagtcctcgagatgatcggagcaaagaacaaagaaatagaggaaactgctgcttctaactctagttcagcttattttccagattggatctataaaaatcttgaaaatggagaggatacatggaaatttggtgatgagataagtagagaggataaagaggttgcaaagaagatgaccttggtgggtctctggtgtatacaaccatctccattaaatcgtccaccgatgaacagaattgttgagatgatggaaggaagtttggatgttcttgaagtccctcctaagccttctatacattattctgcagagcctcttccgcaactgtcttctttctcagaagagaattcaatctacactgaggtatttataggatccacaagttga

SEQ ID NO: 80877 - protein, 638 aa, Arabidopsis thaliana
  peptide (1)..(638): Ceres Seq. ID no. 12657519
MINLSLYQTNSLSYTIIWMLFVIPSCVLSVDERQKHCSPTFRCGKQTDLYYPFWSPDREECGHPVFKVNCSGDFAEFTISTVKFHVLEMNYESRIIRLVRTEYLNNLCPWHPENRSINQEVLPFLQDTELGTFYYNCSGPTVDELANGYIRQLGCDEEVGGKSYFVSSPSHPGNRAILDGLSASCERNVDIPVSRSAMETTATNQSLEAIKKVLDVGFELGFNSDCSLCVASKGACGFNQSSKAFVCYCKDEPHEHTCGKMGIGIGLGCGFLGATLITVCLLCFFFQKRRTSHHLRPRDNNLKGLVQLKQYSYAEVRKITKLFSHTLGKGGFGTVYGGNLCDGRKVAVKILKDFKSNGEDFINEVASMSQTSHVNIVSLLGFCYEGSKRAIVYEFLENGSLDQFLSEKKSLNLDVSTLYRIALGVARGLDYLHHGCKTRIVHFDIKPQNILLDDTFCPKVSDFGLAKLCEKRESILSLLDARGTIGYIAPEVFSGMYGRVSHKSDVYSYGMLVLEMIGAKNKEIEETAASNSSSAYFPDWIYKNLENGEDTWKFGDEISREDKEVAKKMTLVGLWCIQPSPLNRPPMNRIVEMMEGSLDVLEVPPKPSIHYSAEPLPQLSSFSEENSIYTEVFIGSTS

SEQ ID NO: 80878 - protein, 620 aa, Arabidopsis thaliana
  peptide (1)..(620): Ceres Seq. ID no. 12657520
MLFVIPSCVLSVDERQKHCSPTFRCGKQTDLYYPFWSPDREECGHPVFKVNCSGDFAEFTISTVKFHVLEMNYESRIIRLVRTEYLNNLCPWHPENRSINQEVLPFLQDTELGTFYYNCSGPTVDELANGYIRQLGCDEEVGGKSYFVSSPSHPGNRAILDGLSASCERNVDIPVSRSAMETTATNQSLEAIKKVLDVGFELGFNSDCSLCVASKGACGFNQSSKAFVCYCKDEPHEHTCGKMGIGIGLGCGFLGATLITVCLLCFFFQKRRTSHHLRPRDNNLKGLVQLKQYSYAEVRKITKLFSHTLGKGGFGTVYGGNLCDGRKVAVKILKDFKSNGEDFINEVASMSQTSHVNIVSLLGFCYEGSKRAIVYEFLENGSLDQFLSEKKSLNLDVSTLYRIALGVARGLDYLHHGCKTRIVHFDIKPQNILLDDTFCPKVSDFGLAKLCEKRESILSLLDARGTIGYIAPEVFSGMYGRVSHKSDVYSYGMLVLEMIGAKNKEIEETAASNSSSAYFPDWIYKNLENGEDTWKFGDEISREDKEVAKKMTLVGLWCIQPSPLNRPPMNRIVEMMEGSLDVLEVPPKPSIHYSAEPLPQLSSFSEENSIYTEVFIGSTS

SEQ ID NO: 80879 - protein, 550 aa, Arabidopsis thaliana
  peptide (1)..(550): Ceres Seq. ID no. 12657521
MNYESRIIRLVRTEYLNNLCPWHPENRSINQEVLPFLQDTELGTFYYNCSGPTVDELANGYIRQLGCDEEVGGKSYFVSSPSHPGNRAILDGLSASCERNVDIPVSRSAMETTATNQSLEAIKKVLDVGFELGFNSDCSLCVASKGACGFNQSSKAFVCYCKDEPHEHTCGKMGIGIGLGCGFLGATLITVCLLCFFFQKRRTSHHLRPRDNNLKGLVQLKQYSYAEVRKITKLFSHTLGKGGFGTVYGGNLCDGRKVAVKILKDFKSNGEDFINEVASMSQTSHVNIVSLLGFCYEGSKRAIVYEFLENGSLDQFLSEKKSLNLDVSTLYRIALGVARGLDYLHHGCKTRIVHFDIKPQNILLDDTFCPKVSDFGLAKLCEKRESILSLLDARGTIGYIAPEVFSGMYGRVSHKSDVYSYGMLVLEMIGAKNKEIEETAASNSSSAYFPDWIYKNLENGEDTWKFGDEISREDKEVAKKMTLVGLWCIQPSPLNRPPMNRIVEMMEGSLDVLEVPPKPSIHYSAEPLPQLSSFSEENSIYTEVFIGSTS

SEQ ID NO: 80880 - DNA, 1215 bp, Arabidopsis thaliana
  misc_feature (1)..(1215): Ceres Seq. ID no. 12657614
  misc_feature (1)..(1215): Ortholog of  Ceres SEQ ID NO 13658153 as cited in SEQ ID NO 66326
gcaatttgctttcatctctttcgttgtaactgagaaattttaagagaataacgatcaaacacagagtcacatgtcaacatcttctcagtcgtacccaatgagtggcggcgatgatcaacacagttacatccataattcctcataccaaaaagcaggcatagatggggttcaagaaaaggcaagacaatacattttagaaaacctcgatctccttaatatgaatcccaatcttagtacttttacaattgcagattttggttgttctattggccctaacacttttcatgctgttcaaaatatcattgatattgtgaaacttaaacacctcaaagaaagccaagaagatagtcgtgtggcgcctctcgagttccaagtttacttcaacgatctaccgaacaatgactttaacacgctctttaggactcaacctccttcctccaaacaagaatatttctcggttggagttccaggttctttctatggaagggtgttaccaagaaatagcatccacatcggaaacacttccttcacgactcactggctttcaaaagttcccgaagaagtttgtgacaagaactctctagcttggaacaaaaattacattcattgtaataatttgatagaagaagttaccgaggcttacaaggtccagttcgaaaaagacatgggggtctttcttaaagctagagccgaagaacttgtgcctggaggattgatgatcacattaggacaatgtttgcctgatggtgtggccatgtatgagacatggtcaggtattgtgaaggataccattggtgattgtcttcaggatatggccactttgggagtaaccaccgaggaaaagatcgaaatgttcaacttgcccgtgtattttcctcaagttagtgaattgaaaggagcgattgaacaaaacataaggtttacaattgagatgatggagattgtaagccatccattggaggctgtgcaattatccaacaacttcatcacttccatgtatcgagcaattctctctacagttatagaaagacactttggaggtagtgtggtagatgaactattccgtcaatttgctaagaaactctccgagcacccgattgattttgaaaagtgtaagaaacaaatggtctatcatatcgttcttaaacgaaagtgaatattgagattatccaaaactttgtgtattgttcaaatccaaactgtttcctcctttgt

SEQ ID NO: 80881 - protein, 361 aa, Arabidopsis thaliana
  peptide (1)..(361): Ceres Seq. ID no. 12657615
MSTSSQSYPMSGGDDQHSYIHNSSYQKAGIDGVQEKARQYILENLDLLNMNPNLSTFTIADFGCSIGPNTFHAVQNIIDIVKLKHLKESQEDSRVAPLEFQVYFNDLPNNDFNTLFRTQPPSSKQEYFSVGVPGSFYGRVLPRNSIHIGNTSFTTHWLSKVPEEVCDKNSLAWNKNYIHCNNLIEEVTEAYKVQFEKDMGVFLKARAEELVPGGLMITLGQCLPDGVAMYETWSGIVKDTIGDCLQDMATLGVTTEEKIEMFNLPVYFPQVSELKGAIEQNIRFTIEMMEIVSHPLEAVQLSNNFITSMYRAILSTVIERHFGGSVVDELFRQFAKKLSEHPIDFEKCKKQMVYHIVLKRK

SEQ ID NO: 80882 - protein, 352 aa, Arabidopsis thaliana
  peptide (1)..(352): Ceres Seq. ID no. 12657616
MSGGDDQHSYIHNSSYQKAGIDGVQEKARQYILENLDLLNMNPNLSTFTIADFGCSIGPNTFHAVQNIIDIVKLKHLKESQEDSRVAPLEFQVYFNDLPNNDFNTLFRTQPPSSKQEYFSVGVPGSFYGRVLPRNSIHIGNTSFTTHWLSKVPEEVCDKNSLAWNKNYIHCNNLIEEVTEAYKVQFEKDMGVFLKARAEELVPGGLMITLGQCLPDGVAMYETWSGIVKDTIGDCLQDMATLGVTTEEKIEMFNLPVYFPQVSELKGAIEQNIRFTIEMMEIVSHPLEAVQLSNNFITSMYRAILSTVIERHFGGSVVDELFRQFAKKLSEHPIDFEKCKKQMVYHIVLKRK

SEQ ID NO: 80883 - protein, 312 aa, Arabidopsis thaliana
  peptide (1)..(312): Ceres Seq. ID no. 12657617
MNPNLSTFTIADFGCSIGPNTFHAVQNIIDIVKLKHLKESQEDSRVAPLEFQVYFNDLPNNDFNTLFRTQPPSSKQEYFSVGVPGSFYGRVLPRNSIHIGNTSFTTHWLSKVPEEVCDKNSLAWNKNYIHCNNLIEEVTEAYKVQFEKDMGVFLKARAEELVPGGLMITLGQCLPDGVAMYETWSGIVKDTIGDCLQDMATLGVTTEEKIEMFNLPVYFPQVSELKGAIEQNIRFTIEMMEIVSHPLEAVQLSNNFITSMYRAILSTVIERHFGGSVVDELFRQFAKKLSEHPIDFEKCKKQMVYHIVLKRK

SEQ ID NO: 80884 - DNA, 1371 bp, Arabidopsis thaliana
  misc_feature (1)..(1371): Ceres Seq. ID no. 12657618
  misc_feature (1)..(1371): Ortholog of  Ceres SEQ ID NO 14310547 as cited in SEQ ID NO 55132
  misc_feature (1)..(1371): Ortholog of  Ceres SEQ ID NO 13596261 as cited in SEQ ID NO 67817
  misc_feature (1)..(1371): Ortholog of  Ceres SEQ ID NO 13662360 as cited in SEQ ID NO 68830
atggagaatctagatgaaatccgtaccgatattgtcgaatctactgctccgttgttgcaagaatcatcatcagagagcaacggaggaggagaattcaacggagcttcgtttagtggtgcggttttcaatctcgctacaacgatcatcggagctggtatcatggcattgcctgcgacgatgaagatcctcggtcttattcccggaatcacgatcatcgttctcatggctttcttaaccgatgcttcgattgagttcttgcttaggtttagtaacattgggaatcaaagatcttacggtggtgttatggatgattcttttggtaaatgtggaaggattatgttgcaagtttcgattctcgttagcaacattggtgttttgatcgtttatatgatcatcattggtgatgttttggctggtaagaatgaatatggaatccatcatgctggtatgcttgaaggatggtttgggattagttggtggaacagaagaacttttgttcttcttgttactactctcactgtctttgctccattgacttgcttcaaacgaattgattctttgagattcacatctgctatatcagttgctttagcggttgtttttcttgtcatcactgctggaattactatcattaagctgtttactgatggtttgatgatgccgagacttctacctaatgtcactgacttgtcgtcgttttggaaactcttcacggttgttcctgtgcttgtcaatgcatacatttgccattacaatgttcatagtatacagaacgagcttgaagacccttctcggataaaacctgttgttcgatcagcacttgcgatgtgttcttctgtttacgttatgacgagtttattcggatacctcttattcggtgatggtactcttgatgatgttcttgcaaactttgacacggatcttggaatcccttttggttcggttcttaatgatgcagtgagatttagctacgcagctcatctcatgcttgtgttccctgttgtcttctatcctctgcggattaacatcgacggtctcatctttcctacggctccaccacttacttcctctgagtctgatctgaggtttggctctattactgctggtctcattgctgtaatcttcttgggagcaaacttcataccaagcatttgggatgctttccaatttactggagcaactgctgctgtctgcatcggtttcatattccctgctgctgttatcttaaaggatcgtcataaccaagcaaccaagcgagacaagactatagccatttgcatgatcgtccttgcggttttctccaatgcaatcgccatttacagtgacgcctacgccttattcaagaagcacacatacgtatatccaatatga

SEQ ID NO: 80885 - protein, 456 aa, Arabidopsis thaliana
  peptide (1)..(456): Ceres Seq. ID no. 12657619
MENLDEIRTDIVESTAPLLQESSSESNGGGEFNGASFSGAVFNLATTIIGAGIMALPATMKILGLIPGITIIVLMAFLTDASIEFLLRFSNIGNQRSYGGVMDDSFGKCGRIMLQVSILVSNIGVLIVYMIIIGDVLAGKNEYGIHHAGMLEGWFGISWWNRRTFVLLVTTLTVFAPLTCFKRIDSLRFTSAISVALAVVFLVITAGITIIKLFTDGLMMPRLLPNVTDLSSFWKLFTVVPVLVNAYICHYNVHSIQNELEDPSRIKPVVRSALAMCSSVYVMTSLFGYLLFGDGTLDDVLANFDTDLGIPFGSVLNDAVRFSYAAHLMLVFPVVFYPLRINIDGLIFPTAPPLTSSESDLRFGSITAGLIAVIFLGANFIPSIWDAFQFTGATAAVCIGFIFPAAVILKDRHNQATKRDKTIAICMIVLAVFSNAIAIYSDAYALFKKHTYVYPI

SEQ ID NO: 80886 - protein, 403 aa, Arabidopsis thaliana
  peptide (1)..(403): Ceres Seq. ID no. 12657620
MALPATMKILGLIPGITIIVLMAFLTDASIEFLLRFSNIGNQRSYGGVMDDSFGKCGRIMLQVSILVSNIGVLIVYMIIIGDVLAGKNEYGIHHAGMLEGWFGISWWNRRTFVLLVTTLTVFAPLTCFKRIDSLRFTSAISVALAVVFLVITAGITIIKLFTDGLMMPRLLPNVTDLSSFWKLFTVVPVLVNAYICHYNVHSIQNELEDPSRIKPVVRSALAMCSSVYVMTSLFGYLLFGDGTLDDVLANFDTDLGIPFGSVLNDAVRFSYAAHLMLVFPVVFYPLRINIDGLIFPTAPPLTSSESDLRFGSITAGLIAVIFLGANFIPSIWDAFQFTGATAAVCIGFIFPAAVILKDRHNQATKRDKTIAICMIVLAVFSNAIAIYSDAYALFKKHTYVYPI

SEQ ID NO: 80887 - protein, 397 aa, Arabidopsis thaliana
  peptide (1)..(397): Ceres Seq. ID no. 12657621
MKILGLIPGITIIVLMAFLTDASIEFLLRFSNIGNQRSYGGVMDDSFGKCGRIMLQVSILVSNIGVLIVYMIIIGDVLAGKNEYGIHHAGMLEGWFGISWWNRRTFVLLVTTLTVFAPLTCFKRIDSLRFTSAISVALAVVFLVITAGITIIKLFTDGLMMPRLLPNVTDLSSFWKLFTVVPVLVNAYICHYNVHSIQNELEDPSRIKPVVRSALAMCSSVYVMTSLFGYLLFGDGTLDDVLANFDTDLGIPFGSVLNDAVRFSYAAHLMLVFPVVFYPLRINIDGLIFPTAPPLTSSESDLRFGSITAGLIAVIFLGANFIPSIWDAFQFTGATAAVCIGFIFPAAVILKDRHNQATKRDKTIAICMIVLAVFSNAIAIYSDAYALFKKHTYVYPI

SEQ ID NO: 80888 - DNA, 669 bp, Arabidopsis thaliana
  misc_feature (1)..(669): Ceres Seq. ID no. 12657642
  misc_feature (1)..(669): Ortholog of  Ceres SEQ ID NO 13599568 as cited in SEQ ID NO 509
  misc_feature (1)..(669): Ortholog of  Ceres SEQ ID NO 13638595 as cited in SEQ ID NO 52050
  misc_feature (1)..(669): Ortholog of  Ceres SEQ ID NO 13594748 as cited in SEQ ID NO 52114
  misc_feature (1)..(669): Ortholog of  Ceres SEQ ID NO 12623490 as cited in SEQ ID NO 61136
  misc_feature (1)..(669): Ortholog of  Ceres SEQ ID NO 12583993 as cited in SEQ ID NO 68098
  misc_feature (1)..(669): Ortholog of  Ceres SEQ ID NO 13654535 as cited in SEQ ID NO 68227
atgaaaagtttctcatttcttgcagttttatctatcttggcaataacactttcattaagcaaggcttcggacccaagctctcttcaggacttttgcgttggtgtcaacaccccagcagatggtgtttttgtgaacggaaagttctgcaaggacccgaagctcgtcacagtagaagacttcttttttacagggctccacgaggcaagaccacctaatccaaaaactgggtctaacgtaacagccgtcaatgttaacaacctaccagggttaaacactcttggaatctcacttgtccgtatcgactatggagtttacggacagaacccacctcacacccacccacgtgcctccgaggtcttgtatgtcgcggttggaacacttttcgttgggtttgtcacgtcaaaccccgaaaatcgccttttcagtaaaacactttacgagggtgatgtctttgtgtttccacagggactcattcatttccaagtgaacgttggaaaatatccggcggttgcattcgctggtctcagcagccaaaaccctggtgtcatcactattgctgacaccgtgtttgggtctaacccacagatagacccaagttttcttgcaagtgcattccaggttgaccctaagattgtcatggatctacagaccaagttcataaaaccataa

SEQ ID NO: 80889 - protein, 222 aa, Arabidopsis thaliana
  peptide (1)..(222): Ceres Seq. ID no. 12657643
MKSFSFLAVLSILAITLSLSKASDPSSLQDFCVGVNTPADGVFVNGKFCKDPKLVTVEDFFFTGLHEARPPNPKTGSNVTAVNVNNLPGLNTLGISLVRIDYGVYGQNPPHTHPRASEVLYVAVGTLFVGFVTSNPENRLFSKTLYEGDVFVFPQGLIHFQVNVGKYPAVAFAGLSSQNPGVITIADTVFGSNPQIDPSFLASAFQVDPKIVMDLQTKFIKP

SEQ ID NO: 80890 - DNA, 1742 bp, Arabidopsis thaliana
  misc_feature (1)..(1742): Ceres Seq. ID no. 12657646
  misc_feature (1)..(1742): Ortholog of  Ceres SEQ ID NO 13597546 as cited in SEQ ID NO 65017
  misc_feature (1)..(1742): Ortholog of  Ceres SEQ ID NO 14308015 as cited in SEQ ID NO 65798
  misc_feature (1)..(1742): Ortholog of  Ceres SEQ ID NO 15176077 as cited in SEQ ID NO 66728
  misc_feature (1)..(1742): Ortholog of  Ceres SEQ ID NO 14307908 as cited in SEQ ID NO 67189
  misc_feature (1)..(1742): Ortholog of  Ceres SEQ ID NO 13654353 as cited in SEQ ID NO 68318
ctttctctctttctctggtctgtttcaaaacatagtacataataatagagacaacaagagaaagaaaaaacagagtgatctgttttaaaacagagcagaaaacagagtgagatgggagcaatgatggtgatgatgggtcttctcttgatcatcgtgtctctctgttccgctctccttcgatggaatcagatgcgatataccaagaatggtcttcctcctggaaccatgggctggccaatctttggcgaaaccaccgagtttctcaaacaaggccccaacttcatgagaaaccaaagactccgatacgggagtttcttcaaatctcatcttctaggttgtccaacgttaatctcaatggactcagaagtaaacagatacattttaaagaacgaatcaaaaggtttggttcctggttacccacaatcgatgcttgatatacttgggacttgtaacatggctgcggttcacggttcgagccaccggcttatgagaggctcgcttctgtctctcataagctcgaccatgatgagagatcatatcttgcctaaagttgatcacttcatgagaagctatcttgatcagtggaatgagcttgaggttattgatatccaagataagaccaaacatatggcatttttatcttcactgacacaaatcgctgggaacttaagaaaaccatttgttgaagaattcaaaactgcattcttcaagcttgttgttgggactttatccgttccgattgatcttccgggcacaaattatcgttgcggaatccaagcaagaaataacattgataggttgctaagagagctgatgcaagaacgtagagattctggagaaacattcacagacatgttaggttacttgatgaagaaggaaggtaaccgatacccgttaaccgatgaagagataagagaccaagttgtgacgattttgtattcgggttacgaaactgtctctacgacctcaatgatggctcttaagtaccttcatgatcacccaaaagctcttcaagaactaagagctgagcatttggcattcagggaaagaaaacgacaggacgaaccactcggtcttgaggacgtgaagtcaatgaagttcactcgagctgtgatttatgagacatcaagattggcaacgatcgttaatggggtcctaaggaaaactactcgtgacttggaaatcaacggttatttaatcccaaaaggatggagaatttatgtatacacgagggaaattaattacgatgcaaatctttatgaagacccattgatctttaatccatggagatggatgaagaagagcttggagtcacaaaactcatgctttgtgtttggaggtgggacaaggctttgtcctggtaaggaactagggattgtcgagatctcgagctttctccattactttgttacgagatacagatgggaggaaataggaggggatgaattaatggtgtttccgagagtttttgcaccaaaaggcttccatcttaggatttcaccctactaatttctaactttttaaataaaataatatagattttatgcacgcagaggatacagaagacgtatatgaagaaacaagagaagataattataaatttttttttttttttgacacatatttttgttctcatttaagagtcttctggtcatatgtacataaccataagcagcataatcttattatatatctatttctgtataactctatttgaacttgaagtatatctctggctattt

SEQ ID NO: 80891 - protein, 465 aa, Arabidopsis thaliana
  peptide (1)..(465): Ceres Seq. ID no. 12657647
MGAMMVMMGLLLIIVSLCSALLRWNQMRYTKNGLPPGTMGWPIFGETTEFLKQGPNFMRNQRLRYGSFFKSHLLGCPTLISMDSEVNRYILKNESKGLVPGYPQSMLDILGTCNMAAVHGSSHRLMRGSLLSLISSTMMRDHILPKVDHFMRSYLDQWNELEVIDIQDKTKHMAFLSSLTQIAGNLRKPFVEEFKTAFFKLVVGTLSVPIDLPGTNYRCGIQARNNIDRLLRELMQERRDSGETFTDMLGYLMKKEGNRYPLTDEEIRDQVVTILYSGYETVSTTSMMALKYLHDHPKALQELRAEHLAFRERKRQDEPLGLEDVKSMKFTRAVIYETSRLATIVNGVLRKTTRDLEINGYLIPKGWRIYVYTREINYDANLYEDPLIFNPWRWMKKSLESQNSCFVFGGGTRLCPGKELGIVEISSFLHYFVTRYRWEEIGGDELMVFPRVFAPKGFHLRISPY

SEQ ID NO: 80892 - protein, 462 aa, Arabidopsis thaliana
  peptide (1)..(462): Ceres Seq. ID no. 12657648
MMVMMGLLLIIVSLCSALLRWNQMRYTKNGLPPGTMGWPIFGETTEFLKQGPNFMRNQRLRYGSFFKSHLLGCPTLISMDSEVNRYILKNESKGLVPGYPQSMLDILGTCNMAAVHGSSHRLMRGSLLSLISSTMMRDHILPKVDHFMRSYLDQWNELEVIDIQDKTKHMAFLSSLTQIAGNLRKPFVEEFKTAFFKLVVGTLSVPIDLPGTNYRCGIQARNNIDRLLRELMQERRDSGETFTDMLGYLMKKEGNRYPLTDEEIRDQVVTILYSGYETVSTTSMMALKYLHDHPKALQELRAEHLAFRERKRQDEPLGLEDVKSMKFTRAVIYETSRLATIVNGVLRKTTRDLEINGYLIPKGWRIYVYTREINYDANLYEDPLIFNPWRWMKKSLESQNSCFVFGGGTRLCPGKELGIVEISSFLHYFVTRYRWEEIGGDELMVFPRVFAPKGFHLRISPY

SEQ ID NO: 80893 - protein, 461 aa, Arabidopsis thaliana
  peptide (1)..(461): Ceres Seq. ID no. 12657649
MVMMGLLLIIVSLCSALLRWNQMRYTKNGLPPGTMGWPIFGETTEFLKQGPNFMRNQRLRYGSFFKSHLLGCPTLISMDSEVNRYILKNESKGLVPGYPQSMLDILGTCNMAAVHGSSHRLMRGSLLSLISSTMMRDHILPKVDHFMRSYLDQWNELEVIDIQDKTKHMAFLSSLTQIAGNLRKPFVEEFKTAFFKLVVGTLSVPIDLPGTNYRCGIQARNNIDRLLRELMQERRDSGETFTDMLGYLMKKEGNRYPLTDEEIRDQVVTILYSGYETVSTTSMMALKYLHDHPKALQELRAEHLAFRERKRQDEPLGLEDVKSMKFTRAVIYETSRLATIVNGVLRKTTRDLEINGYLIPKGWRIYVYTREINYDANLYEDPLIFNPWRWMKKSLESQNSCFVFGGGTRLCPGKELGIVEISSFLHYFVTRYRWEEIGGDELMVFPRVFAPKGFHLRISPY

SEQ ID NO: 80894 - DNA, 2421 bp, Arabidopsis thaliana
  misc_feature (1)..(2421): Ceres Seq. ID no. 12657656
  misc_feature (1)..(2421): Ortholog of  Ceres SEQ ID NO 15176941 as cited in SEQ ID NO 55559
atgatctgtttcattttgtttgttttctcttttctcgtttccgtctccgcaacagcgccatacaagccagacgatgtttttctcatcaactgtggagaaaccgatgtccccttcgacaaccacggtcgaacttggacgcaggaggagaagaatattcttccgaagaattcagacaacgcgtcgttctcttcagttgtatcatacaaagaagaatcagggattcctcaagtgccttacatgactgctcggattttccgatctgatttcacgtacagttttccagtctctcccggctggaaattcctccgcttatacttttaccctacaagttacaaatccggttttgacgccgttaactccttcgtctccgtcaccgtcaatgatttcactctcttgcaaaacttcagcgccgatttaacagtaaaggcttcaataccagaatcaaaatctctaatcaaagaattcatcgttccggtttacctgactctgaatctcacgttcaggccgtctaataattcgttagcttttgttaacggaatcgagattgtctccatgcctgaccggttttactcaaagggaggatttgacgaccttataactaacgtcggtagtttaattgacttcgagatagacaactccactgcttccgagaccgttcacaggttaaacgtaggtggacatatggtggacgaggtcaacgattcagggatgttccgacggtggctttctgatgattatgagttcttaattggtggagtcagtccatatatgccagatgtaaatatcagctacactgagaaaactcccgcgtatgttgcgccagcttacgtgtactccacgtgtcgcatgatggggaacgcccaagacacttatctaaacctgaatttcaacctgacctggctctttacagtcgatgccgggtttagttaccttgtgaggcttcatttctttgagaagtacctgaacaaagccaatcaacgcgtcttctccatcttccttggaaatcagatggctagggaagagatggacgtgattcggttgagtggtggtcctcggattccgatttatctagatttcagaatatatgttggttccgaaagtgggcccagacctgatctacgacttgacttgcatcctctggtgaaggataatccagagtattatgaagctattctgaatggtgtagagattctcaagctaaacaactcaggtaatctcgctatcatccaagacaatgaactaaaaccaaatcctccactatcatcgaacttgacaccaaaccatgtaacgcagcagatcaaaggtaagtcttcacatcttctggtgaaaatcttcatagccgttggtcccggaactgggctggcgactttcgttgttgttctcatgttgtggatgcgtcagatgaagaggaagaataggaaggaagaaagggtcgtcatgttcaagaaactactgaatatgtacacttatgcagaactaaagaaaattacaaagtcattttcttacataattgggaaaggaggatttggaactgtttatggaggaaaccttagtaatggtcgtaaggttgcagtaaaagttttgaaagatttgaagggaagtgctgaagatttcatcaatgaagttgcaagcatgagccaaacatctcatgtgaacattgtttctcttcttggtttctgcttcgaagggtctaagagagccattgtgtatgagtttttggagaatgggtctctcgatcagttcatgtctagaaataagtcattgacacaggatgtaacaacactatatggaatcgcgctaggcatcgctcggggattggagtatttgcattatggctgcaaaacaagaattgtgcatttcgacattaaacctcagaatattctgttagatggcaatctttgtcctaaagtctcagactttggccttgctaagctttgtgagaaaagagaaagtgtattgtcattgatggacacaagaggaactataggttacattgcaccagaggtcttctcaagaatgtatggcagagtctcacataagtctgatgtgtatagctttggaatgcttgtcatcgacatgattggagcaaggagcaaagaaatagtagaaactgttgattccgccgctagttcaacttactttccagattggatttataaggatcttgaggatggagaacaaacatggatatttggtgatgaaataaccaaagaagaaaaagagattgctaagaagatgattgtggtaggactctggtgtatccaaccatgcccatcagatcgtccatcgatgaatagagtcgttgaaatgatggaaggaagtttagatgctcttgaaattcctccaaaaccttctatgcatatctccactgaggttattaccgaatcttcttcactctctgatggcggggaagatgtataa

SEQ ID NO: 80895 - protein, 806 aa, Arabidopsis thaliana
  peptide (1)..(806): Ceres Seq. ID no. 12657657
MICFILFVFSFLVSVSATAPYKPDDVFLINCGETDVPFDNHGRTWTQEEKNILPKNSDNASFSSVVSYKEESGIPQVPYMTARIFRSDFTYSFPVSPGWKFLRLYFYPTSYKSGFDAVNSFVSVTVNDFTLLQNFSADLTVKASIPESKSLIKEFIVPVYLTLNLTFRPSNNSLAFVNGIEIVSMPDRFYSKGGFDDLITNVGSLIDFEIDNSTASETVHRLNVGGHMVDEVNDSGMFRRWLSDDYEFLIGGVSPYMPDVNISYTEKTPAYVAPAYVYSTCRMMGNAQDTYLNLNFNLTWLFTVDAGFSYLVRLHFFEKYLNKANQRVFSIFLGNQMAREEMDVIRLSGGPRIPIYLDFRIYVGSESGPRPDLRLDLHPLVKDNPEYYEAILNGVEILKLNNSGNLAIIQDNELKPNPPLSSNLTPNHVTQQIKGKSSHLLVKIFIAVGPGTGLATFVVVLMLWMRQMKRKNRKEERVVMFKKLLNMYTYAELKKITKSFSYIIGKGGFGTVYGGNLSNGRKVAVKVLKDLKGSAEDFINEVASMSQTSHVNIVSLLGFCFEGSKRAIVYEFLENGSLDQFMSRNKSLTQDVTTLYGIALGIARGLEYLHYGCKTRIVHFDIKPQNILLDGNLCPKVSDFGLAKLCEKRESVLSLMDTRGTIGYIAPEVFSRMYGRVSHKSDVYSFGMLVIDMIGARSKEIVETVDSAASSTYFPDWIYKDLEDGEQTWIFGDEITKEEKEIAKKMIVVGLWCIQPCPSDRPSMNRVVEMMEGSLDALEIPPKPSMHISTEVITESSSLSDGGEDV

SEQ ID NO: 80896 - protein, 727 aa, Arabidopsis thaliana
  peptide (1)..(727): Ceres Seq. ID no. 12657658
MTARIFRSDFTYSFPVSPGWKFLRLYFYPTSYKSGFDAVNSFVSVTVNDFTLLQNFSADLTVKASIPESKSLIKEFIVPVYLTLNLTFRPSNNSLAFVNGIEIVSMPDRFYSKGGFDDLITNVGSLIDFEIDNSTASETVHRLNVGGHMVDEVNDSGMFRRWLSDDYEFLIGGVSPYMPDVNISYTEKTPAYVAPAYVYSTCRMMGNAQDTYLNLNFNLTWLFTVDAGFSYLVRLHFFEKYLNKANQRVFSIFLGNQMAREEMDVIRLSGGPRIPIYLDFRIYVGSESGPRPDLRLDLHPLVKDNPEYYEAILNGVEILKLNNSGNLAIIQDNELKPNPPLSSNLTPNHVTQQIKGKSSHLLVKIFIAVGPGTGLATFVVVLMLWMRQMKRKNRKEERVVMFKKLLNMYTYAELKKITKSFSYIIGKGGFGTVYGGNLSNGRKVAVKVLKDLKGSAEDFINEVASMSQTSHVNIVSLLGFCFEGSKRAIVYEFLENGSLDQFMSRNKSLTQDVTTLYGIALGIARGLEYLHYGCKTRIVHFDIKPQNILLDGNLCPKVSDFGLAKLCEKRESVLSLMDTRGTIGYIAPEVFSRMYGRVSHKSDVYSFGMLVIDMIGARSKEIVETVDSAASSTYFPDWIYKDLEDGEQTWIFGDEITKEEKEIAKKMIVVGLWCIQPCPSDRPSMNRVVEMMEGSLDALEIPPKPSMHISTEVITESSSLSDGGEDV

SEQ ID NO: 80897 - protein, 622 aa, Arabidopsis thaliana
  peptide (1)..(622): Ceres Seq. ID no. 12657659
MPDRFYSKGGFDDLITNVGSLIDFEIDNSTASETVHRLNVGGHMVDEVNDSGMFRRWLSDDYEFLIGGVSPYMPDVNISYTEKTPAYVAPAYVYSTCRMMGNAQDTYLNLNFNLTWLFTVDAGFSYLVRLHFFEKYLNKANQRVFSIFLGNQMAREEMDVIRLSGGPRIPIYLDFRIYVGSESGPRPDLRLDLHPLVKDNPEYYEAILNGVEILKLNNSGNLAIIQDNELKPNPPLSSNLTPNHVTQQIKGKSSHLLVKIFIAVGPGTGLATFVVVLMLWMRQMKRKNRKEERVVMFKKLLNMYTYAELKKITKSFSYIIGKGGFGTVYGGNLSNGRKVAVKVLKDLKGSAEDFINEVASMSQTSHVNIVSLLGFCFEGSKRAIVYEFLENGSLDQFMSRNKSLTQDVTTLYGIALGIARGLEYLHYGCKTRIVHFDIKPQNILLDGNLCPKVSDFGLAKLCEKRESVLSLMDTRGTIGYIAPEVFSRMYGRVSHKSDVYSFGMLVIDMIGARSKEIVETVDSAASSTYFPDWIYKDLEDGEQTWIFGDEITKEEKEIAKKMIVVGLWCIQPCPSDRPSMNRVVEMMEGSLDALEIPPKPSMHISTEVITESSSLSDGGEDV

SEQ ID NO: 80898 - DNA, 833 bp, Arabidopsis thaliana
  misc_feature (1)..(833): Ceres Seq. ID no. 12657663
  misc_feature (1)..(833): Ortholog of  Ceres SEQ ID NO 13599568 as cited in SEQ ID NO 509
  misc_feature (1)..(833): Ortholog of  Ceres SEQ ID NO 13638595 as cited in SEQ ID NO 52050
  misc_feature (1)..(833): Ortholog of  Ceres SEQ ID NO 13594748 as cited in SEQ ID NO 52114
  misc_feature (1)..(833): Ortholog of  Ceres SEQ ID NO 15170313 as cited in SEQ ID NO 59293
  misc_feature (1)..(833): Ortholog of  Ceres SEQ ID NO 12583993 as cited in SEQ ID NO 68098
  misc_feature (1)..(833): Ortholog of  Ceres SEQ ID NO 13654535 as cited in SEQ ID NO 68227
  misc_feature (1)..(833): Ortholog of  Ceres SEQ ID NO 13589319 as cited in SEQ ID NO 0
cacacacatataaaagtctttgaaaagcattagcatatccctttgtttcaaaatgagggtttccaagtctctcatcctgattaccttatcggctttggtcatttcctttgctgaagcttatgatccaagtccacttcaagatttctgtgtggccattgatgacctcaaaaatggtgtttttgtgaatggaaagttctgtaaggatcccaagcaagcgaaggcagaataattcttcttctcaggcctcaaccaggcaggaagcactaataataaagtcagatccaacgtgacaacagtcaatgtcgaccagattccagggttaaacactatgggaatatccttggtccgcatagactatgcaccatatggacaaaacccgcctcacacgcaccctcgtgctactgagatccttgtccttatcgagggaacgttatatgttggttttgtctcttccaatcaagacaataaccgtctattcgccaaagttctgtacccgggtgacgtgtttgtgtttcccataggaatgatccattttcaagtgaatatcgggaaaacgcctgcggtggccttcgctggattgagtagtcagaatgctggtgttatcacgatcgctgatactgtgtttgggtcaacgcctccgattaatccagatattttagctcaagcatttcaattagatgtcaatattgtcgaggatcttgaggccaagtttagaaactaaatctagtcaccacaatacgagtgtttatggttgtaacacttaagtaatgatgtaacaagagttaaagatttatgctcaatataataaagaaaggtgttgttcacctaatttg

SEQ ID NO: 80899 - protein, 130 aa, Arabidopsis thaliana
  peptide (1)..(130): Ceres Seq. ID no. 12657664
MGISLVRIDYAPYGQNPPHTHPRATEILVLIEGTLYVGFVSSNQDNNRLFAKVLYPGDVFVFPIGMIHFQVNIGKTPAVAFAGLSSQNAGVITIADTVFGSTPPINPDILAQAFQLDVNIVEDLEAKFRN

SEQ ID NO: 80900 - protein, 65 aa, Arabidopsis thaliana
  peptide (1)..(65): Ceres Seq. ID no. 12657665
MIHFQVNIGKTPAVAFAGLSSQNAGVITIADTVFGSTPPINPDILAQAFQLDVNIVEDLEAKFRN

SEQ ID NO: 80901 - DNA, 669 bp, Arabidopsis thaliana
  misc_feature (1)..(669): Ceres Seq. ID no. 12657666
  misc_feature (1)..(669): Ortholog of  Ceres SEQ ID NO 13599568 as cited in SEQ ID NO 509
  misc_feature (1)..(669): Ortholog of  Ceres SEQ ID NO 13638595 as cited in SEQ ID NO 52050
  misc_feature (1)..(669): Ortholog of  Ceres SEQ ID NO 13594748 as cited in SEQ ID NO 52114
  misc_feature (1)..(669): Ortholog of  Ceres SEQ ID NO 15170313 as cited in SEQ ID NO 59293
  misc_feature (1)..(669): Ortholog of  Ceres SEQ ID NO 12623490 as cited in SEQ ID NO 61136
  misc_feature (1)..(669): Ortholog of  Ceres SEQ ID NO 12583993 as cited in SEQ ID NO 68098
  misc_feature (1)..(669): Ortholog of  Ceres SEQ ID NO 13654535 as cited in SEQ ID NO 68227
  misc_feature (1)..(669): Ortholog of  Ceres SEQ ID NO 13589319 as cited in SEQ ID NO 0
atgaggttttccaagtctctcatcctgattaccttatcggctttggtcatttcctttgccgaagctaatgatccaagtccacttcaagacttttgtgtggccattggcgacctcaaaaatggtgtttttgtgaatggtaagttttgcaaggatccaaagcaagcaaaggcagaagatttcttttactcaggcctcaaccaagcaggaaccactaataataaagtcaaatccaacgtgacaacagtcaatgtcgatcagattccagggttaaacactttgggaatatccttggtccgcatagactatgcgccatatggtcaaaacccgcctcacacacaccctcgtgccactgagatccttgttcttgttgagggaacattatatgttggttttgtctcttccaatcaagacaacaaccgtttattcgctaaagtgctgaacccgggcgacgtgtttgtgttccccataggaatgatccattttcaagtgaatatcgggaagacccctgcagtggcctttgctggactaagtagtcaaaatgctggtgtcatcacgattgcagatactgtgtttgggtcaacgcctccgattaatccagatattttggctcaggcgtttcagttagacgtcaatgttgttaaagaccttgaggccaagtttaaaaactaa

SEQ ID NO: 80902 - protein, 222 aa, Arabidopsis thaliana
  peptide (1)..(222): Ceres Seq. ID no. 12657667
MRFSKSLILITLSALVISFAEANDPSPLQDFCVAIGDLKNGVFVNGKFCKDPKQAKAEDFFYSGLNQAGTTNNKVKSNVTTVNVDQIPGLNTLGISLVRIDYAPYGQNPPHTHPRATEILVLVEGTLYVGFVSSNQDNNRLFAKVLNPGDVFVFPIGMIHFQVNIGKTPAVAFAGLSSQNAGVITIADTVFGSTPPINPDILAQAFQLDVNVVKDLEAKFKN

SEQ ID NO: 80903 - DNA, 831 bp, Arabidopsis thaliana
  misc_feature (1)..(831): Ceres Seq. ID no. 12657671
  misc_feature (1)..(831): Ortholog of  Ceres SEQ ID NO 13599568 as cited in SEQ ID NO 509
  misc_feature (1)..(831): Ortholog of  Ceres SEQ ID NO 15172903 as cited in SEQ ID NO 51839
  misc_feature (1)..(831): Ortholog of  Ceres SEQ ID NO 15177108 as cited in SEQ ID NO 52015
  misc_feature (1)..(831): Ortholog of  Ceres SEQ ID NO 13638595 as cited in SEQ ID NO 52050
  misc_feature (1)..(831): Ortholog of  Ceres SEQ ID NO 13594748 as cited in SEQ ID NO 52114
  misc_feature (1)..(831): Ortholog of  Ceres SEQ ID NO 15170313 as cited in SEQ ID NO 59293
  misc_feature (1)..(831): Ortholog of  Ceres SEQ ID NO 12623490 as cited in SEQ ID NO 61136
  misc_feature (1)..(831): Ortholog of  Ceres SEQ ID NO 15173596 as cited in SEQ ID NO 63267
  misc_feature (1)..(831): Ortholog of  Ceres SEQ ID NO 12583993 as cited in SEQ ID NO 68098
  misc_feature (1)..(831): Ortholog of  Ceres SEQ ID NO 13654535 as cited in SEQ ID NO 68227
gcataacaaatttagagcgagcaataatgagggtttctcaatctctaatcccttttgccataattgctttggtcctttcctttgtcaatgcttatgatccaagtccactccaagacttctgtgttgccattgatgacctaaaaggcgtttttgtgaatggtaggttttgtaaagacccggagcgagtcgatgcaaaagattttttcttctcaggtctcaatgtgcccgggaacaccaataatcaagttggctctaatgtgaccactgttaatgttgatcagatccccgggctaaacaccatgggaatatcattggtccgcatagactacgcaccgcatggccaaaatccacctcacacgcaccctcgtggctcagagatccttgtccttgtcgaaggaacattatacgtcggttttgtctcttccaatcaagataacaaccggttattcgccaaagtattgcaccccggtgatgtttttgtgttccccataggaatgatccattttcagttaaatatcgggaaaattccagcaattgcttttgcgggattgagtagccagaacgctggtgttatcacaattgcaaacactgtgttcgggtcaaaccctccgatttatccagagcttcttgccagggcgttccagttggatgcaaatgttgtcaaagaacttcaagccaagtttgggtccatatgaactgatcatctaagtcgtttaagagtgtttatcattgaaacacaaattaaaggaatacactactatgaaatatttatgtaacaaagtaaaaatggcttatgtacctatttctatattataatataacaactttaat

SEQ ID NO: 80904 - protein, 230 aa, Arabidopsis thaliana
  peptide (1)..(230): Ceres Seq. ID no. 12657672
ITNLERAIMRVSQSLIPFAIIALVLSFVNAYDPSPLQDFCVAIDDLKGVFVNGRFCKDPERVDAKDFFFSGLNVPGNTNNQVGSNVTTVNVDQIPGLNTMGISLVRIDYAPHGQNPPHTHPRGSEILVLVEGTLYVGFVSSNQDNNRLFAKVLHPGDVFVFPIGMIHFQLNIGKIPAIAFAGLSSQNAGVITIANTVFGSNPPIYPELLARAFQLDANVVKELQAKFGSI

SEQ ID NO: 80905 - protein, 222 aa, Arabidopsis thaliana
  peptide (1)..(222): Ceres Seq. ID no. 12657673
MRVSQSLIPFAIIALVLSFVNAYDPSPLQDFCVAIDDLKGVFVNGRFCKDPERVDAKDFFFSGLNVPGNTNNQVGSNVTTVNVDQIPGLNTMGISLVRIDYAPHGQNPPHTHPRGSEILVLVEGTLYVGFVSSNQDNNRLFAKVLHPGDVFVFPIGMIHFQLNIGKIPAIAFAGLSSQNAGVITIANTVFGSNPPIYPELLARAFQLDANVVKELQAKFGSI

SEQ ID NO: 80906 - protein, 131 aa, Arabidopsis thaliana
  peptide (1)..(131): Ceres Seq. ID no. 12657674
MGISLVRIDYAPHGQNPPHTHPRGSEILVLVEGTLYVGFVSSNQDNNRLFAKVLHPGDVFVFPIGMIHFQLNIGKIPAIAFAGLSSQNAGVITIANTVFGSNPPIYPELLARAFQLDANVVKELQAKFGSI

SEQ ID NO: 80907 - DNA, 666 bp, Arabidopsis thaliana
  misc_feature (1)..(666): Ceres Seq. ID no. 12657678
  misc_feature (1)..(666): Ortholog of  Ceres SEQ ID NO 13599568 as cited in SEQ ID NO 509
  misc_feature (1)..(666): Ortholog of  Ceres SEQ ID NO 13638595 as cited in SEQ ID NO 52050
  misc_feature (1)..(666): Ortholog of  Ceres SEQ ID NO 13594748 as cited in SEQ ID NO 52114
  misc_feature (1)..(666): Ortholog of  Ceres SEQ ID NO 15170313 as cited in SEQ ID NO 59293
  misc_feature (1)..(666): Ortholog of  Ceres SEQ ID NO 12623490 as cited in SEQ ID NO 61136
  misc_feature (1)..(666): Ortholog of  Ceres SEQ ID NO 12583993 as cited in SEQ ID NO 68098
  misc_feature (1)..(666): Ortholog of  Ceres SEQ ID NO 13654535 as cited in SEQ ID NO 68227
  misc_feature (1)..(666): Ortholog of  Ceres SEQ ID NO 13589319 as cited in SEQ ID NO 0
atgaaggtgtccatgtctctcatcctgataaccttatcagctttggtcaccattgccaaagcatatgatccaagtccacttcaagacttctgtgtggccattgatgaccctaaaaatggtgtttttgtgaatggtaagttttgcaaggatccaaagcaagcaaaggcagaagatttcttttcctcaggcctcaaccaagcaggaatcactaataacaaagtccaatccaacgtgacaacagtcaatgtcgatcagattccagggttaaacactttgggaatatccttggtccgcatagactatgcgccatatggtcaaaacccgcctcacacacaccctcgtgccactgagatccttgttcttgttgaaggaacattatatgttggttttgtctcttcgaatcaagacaacaaccgtttattcgccaaagtgctgaacccgggagacgtgttcgtgttccccataggaatgatccattttcaagtgaatatcgggaagacccccgcagtggcctttgctggactaagtagtcaaaatgctggtgtcatcacgatcgcagatacagtgtttggatcaacgcctccgattaatccagatattttggctcaggcgtttcagttagatgtcaatgttgtcaaagaccttgaggccaagtttaaaaactaa

SEQ ID NO: 80908 - protein, 221 aa, Arabidopsis thaliana
  peptide (1)..(221): Ceres Seq. ID no. 12657679
MKVSMSLILITLSALVTIAKAYDPSPLQDFCVAIDDPKNGVFVNGKFCKDPKQAKAEDFFSSGLNQAGITNNKVQSNVTTVNVDQIPGLNTLGISLVRIDYAPYGQNPPHTHPRATEILVLVEGTLYVGFVSSNQDNNRLFAKVLNPGDVFVFPIGMIHFQVNIGKTPAVAFAGLSSQNAGVITIADTVFGSTPPINPDILAQAFQLDVNVVKDLEAKFKN

SEQ ID NO: 80909 - protein, 217 aa, Arabidopsis thaliana
  peptide (1)..(217): Ceres Seq. ID no. 12657680
MSLILITLSALVTIAKAYDPSPLQDFCVAIDDPKNGVFVNGKFCKDPKQAKAEDFFSSGLNQAGITNNKVQSNVTTVNVDQIPGLNTLGISLVRIDYAPYGQNPPHTHPRATEILVLVEGTLYVGFVSSNQDNNRLFAKVLNPGDVFVFPIGMIHFQVNIGKTPAVAFAGLSSQNAGVITIADTVFGSTPPINPDILAQAFQLDVNVVKDLEAKFKN

SEQ ID NO: 80910 - DNA, 669 bp, Arabidopsis thaliana
  misc_feature (1)..(669): Ceres Seq. ID no. 12657681
  misc_feature (1)..(669): Ortholog of  Ceres SEQ ID NO 13599568 as cited in SEQ ID NO 509
  misc_feature (1)..(669): Ortholog of  Ceres SEQ ID NO 15172903 as cited in SEQ ID NO 51839
  misc_feature (1)..(669): Ortholog of  Ceres SEQ ID NO 15177108 as cited in SEQ ID NO 52015
  misc_feature (1)..(669): Ortholog of  Ceres SEQ ID NO 13638595 as cited in SEQ ID NO 52050
  misc_feature (1)..(669): Ortholog of  Ceres SEQ ID NO 13594748 as cited in SEQ ID NO 52114
  misc_feature (1)..(669): Ortholog of  Ceres SEQ ID NO 15170313 as cited in SEQ ID NO 59293
  misc_feature (1)..(669): Ortholog of  Ceres SEQ ID NO 12623490 as cited in SEQ ID NO 61136
  misc_feature (1)..(669): Ortholog of  Ceres SEQ ID NO 15173596 as cited in SEQ ID NO 63267
  misc_feature (1)..(669): Ortholog of  Ceres SEQ ID NO 12583993 as cited in SEQ ID NO 68098
  misc_feature (1)..(669): Ortholog of  Ceres SEQ ID NO 13654535 as cited in SEQ ID NO 68227
  misc_feature (1)..(669): Ortholog of  Ceres SEQ ID NO 13589319 as cited in SEQ ID NO 0
atgagggtttctcaatctcttgtcccttttgccataattgctttggtcctttcctttgtcaatgcttatgatccaagtccactccaagacttctgtgttgccattgatgacctaaaaggcgtttttgtgaatggtaggttttgtaaagacccgaagcgagtcgatgcaaaagattttttcttctcaggtctcaatatgcccgggaacaccaataatcaagttggctctaatgtgaccactgttaatgttgatcagatcccagggctaaacaccatgggaatatcattggtccgcatagactacgcaccgcatggccaaaatccacctcacacgcaccctcgtggctcagagatccttgtccttgtcgaaggaacattatacgtcggttttgtctcttccaatcaagataacaaccggttattcgccaaagtattgcaccccggtgatgttttcgtgttccccataggaatgatccattttcaggtaaatgtggggaaaattccagcagttgcttttgcgggattgagtagccagaacgcaggtgttatcacaattgcaaacactgtgtttgggtccaatcctccgatttatccagagcttcttgccagggcgttccagttggatgcaagtgttgtcaaagaacttcaggccaagtttgggtccatatga

SEQ ID NO: 80911 - protein, 222 aa, Arabidopsis thaliana; identical to SEQ ID NO: 77800
  peptide (1)..(222): Ceres Seq. ID no. 12657682

SEQ ID NO: 80912 - protein, 157 aa, Arabidopsis thaliana; identical to SEQ ID NO: 77801
  peptide (1)..(157): Ceres Seq. ID no. 12657683

SEQ ID NO: 80913 - protein, 131 aa, Arabidopsis thaliana; identical to SEQ ID NO: 77802
  peptide (1)..(131): Ceres Seq. ID no. 12657684

SEQ ID NO: 80914 - DNA, 669 bp, Arabidopsis thaliana
  misc_feature (1)..(669): Ceres Seq. ID no. 12657685
  misc_feature (1)..(669): Ortholog of  Ceres SEQ ID NO 13599568 as cited in SEQ ID NO 509
  misc_feature (1)..(669): Ortholog of  Ceres SEQ ID NO 15172903 as cited in SEQ ID NO 51839
  misc_feature (1)..(669): Ortholog of  Ceres SEQ ID NO 15177108 as cited in SEQ ID NO 52015
  misc_feature (1)..(669): Ortholog of  Ceres SEQ ID NO 13638595 as cited in SEQ ID NO 52050
  misc_feature (1)..(669): Ortholog of  Ceres SEQ ID NO 13594748 as cited in SEQ ID NO 52114
  misc_feature (1)..(669): Ortholog of  Ceres SEQ ID NO 15170313 as cited in SEQ ID NO 59293
  misc_feature (1)..(669): Ortholog of  Ceres SEQ ID NO 12623490 as cited in SEQ ID NO 61136
  misc_feature (1)..(669): Ortholog of  Ceres SEQ ID NO 15173596 as cited in SEQ ID NO 63267
  misc_feature (1)..(669): Ortholog of  Ceres SEQ ID NO 12583993 as cited in SEQ ID NO 68098
  misc_feature (1)..(669): Ortholog of  Ceres SEQ ID NO 13654535 as cited in SEQ ID NO 68227
  misc_feature (1)..(669): Ortholog of  Ceres SEQ ID NO 13589319 as cited in SEQ ID NO 0
atgagggtttctcaatctcttgtcccttttgccataattgctttggtcctttcctttgtcaatgcttatgatccaagtccactccaagacttctgtgttgccattgatgacctaaaaggcgtttttgtgaatggtaggttttgtaaagacccgaagcgagtcgatgcaaaagattttttcttctcaggtctcaatgtgcccgggaacaccaataatcaagttggctctaatgtgaccactgttaatgttgatcagatcccagggctaaacaccatgggaatatcattggtccgcatagactacgcaccgcatggccaaaatccacctcacacgcaccctcgtggctcagagatccttgtccttgtcgaaggaacattatacgtcggttttgtctcttccaatcaagataacaaccggttattcgccaaagtattgcaccccggtgatgttttcgtgttccccataggaatgatccattttcaggtaaatgtggggaaaattccagcagttgcttttgcgggattgagtagccagaacgcaggtgttatcacaattgcaaacactgtgtttgggtccaatcctccgatttatccagagcttcttgccagggcgttccagttggatgcaagtgttgtcaaagaacttcaggccaagtttgggtccatatga

SEQ ID NO: 80915 - protein, 222 aa, Arabidopsis thaliana
  peptide (1)..(222): Ceres Seq. ID no. 12657686
MRVSQSLVPFAIIALVLSFVNAYDPSPLQDFCVAIDDLKGVFVNGRFCKDPKRVDAKDFFFSGLNVPGNTNNQVGSNVTTVNVDQIPGLNTMGISLVRIDYAPHGQNPPHTHPRGSEILVLVEGTLYVGFVSSNQDNNRLFAKVLHPGDVFVFPIGMIHFQVNVGKIPAVAFAGLSSQNAGVITIANTVFGSNPPIYPELLARAFQLDASVVKELQAKFGSI

SEQ ID NO: 80916 - protein, 131 aa, Arabidopsis thaliana; identical to SEQ ID NO: 77802
  peptide (1)..(131): Ceres Seq. ID no. 12657687

SEQ ID NO: 80917 - DNA, 780 bp, Arabidopsis thaliana
  misc_feature (1)..(780): Ceres Seq. ID no. 12657696
  misc_feature (1)..(780): Ortholog of  Ceres SEQ ID NO 13596519 as cited in SEQ ID NO 62572
  misc_feature (1)..(780): Ortholog of  Ceres SEQ ID NO 12625108 as cited in SEQ ID NO 68102
atggctacattgttagtgtccatgagttacggtcatcgagcgatgattaatgatgtagccgaagcacccgtgtttgacgatgtagtcagcccaaacggactcgacagttcttggtatgatgcacgagcaacattttacggtgatatccatggtggagaaactcaacagggagcgtgtggatacggtgatctattcaaacaaggctatggtctagagacagcggcattgagcacagcactcttcaacgaagggtatacatgtggggcttgttaccagatcatgtgtgtgaacgatccacaatggtgtttacccggatccgtcaagatcacagcaactaatttctgtccaccagattacagcaaaaccgaaggcgtttggtgcaacccaccacaaaagcactttgacctctccctaccaatgttcctcaagatcgcccaatacaaagctggagttgtcccagttaaatacagacgtatttcttgtgcaagaactggtggtgtcaagtttgaaaccaaaggaaacccttatttcttaatgatcttgccatacaatgtaggaggagctggagatatcaagttgatgcaagttaaaggagacaagaccgggtggataacaatgcaaaagaactggggacaaaactggaccactggtgttaatttgactggtcagggtatttcattcagggttacgacgagtgatggggttacaaaagattttaataatgtgatgccaaacaattggggatttggacagacttttgatggaaagattaacttttag

SEQ ID NO: 80918 - protein, 259 aa, Arabidopsis thaliana
  peptide (1)..(259): Ceres Seq. ID no. 12657697
MATLLVSMSYGHRAMINDVAEAPVFDDVVSPNGLDSSWYDARATFYGDIHGGETQQGACGYGDLFKQGYGLETAALSTALFNEGYTCGACYQIMCVNDPQWCLPGSVKITATNFCPPDYSKTEGVWCNPPQKHFDLSLPMFLKIAQYKAGVVPVKYRRISCARTGGVKFETKGNPYFLMILPYNVGGAGDIKLMQVKGDKTGWITMQKNWGQNWTTGVNLTGQGISFRVTTSDGVTKDFNNVMPNNWGFGQTFDGKINF

SEQ ID NO: 80919 - protein, 252 aa, Arabidopsis thaliana
  peptide (1)..(252): Ceres Seq. ID no. 12657698
MSYGHRAMINDVAEAPVFDDVVSPNGLDSSWYDARATFYGDIHGGETQQGACGYGDLFKQGYGLETAALSTALFNEGYTCGACYQIMCVNDPQWCLPGSVKITATNFCPPDYSKTEGVWCNPPQKHFDLSLPMFLKIAQYKAGVVPVKYRRISCARTGGVKFETKGNPYFLMILPYNVGGAGDIKLMQVKGDKTGWITMQKNWGQNWTTGVNLTGQGISFRVTTSDGVTKDFNNVMPNNWGFGQTFDGKINF

SEQ ID NO: 80920 - protein, 245 aa, Arabidopsis thaliana
  peptide (1)..(245): Ceres Seq. ID no. 12657699
MINDVAEAPVFDDVVSPNGLDSSWYDARATFYGDIHGGETQQGACGYGDLFKQGYGLETAALSTALFNEGYTCGACYQIMCVNDPQWCLPGSVKITATNFCPPDYSKTEGVWCNPPQKHFDLSLPMFLKIAQYKAGVVPVKYRRISCARTGGVKFETKGNPYFLMILPYNVGGAGDIKLMQVKGDKTGWITMQKNWGQNWTTGVNLTGQGISFRVTTSDGVTKDFNNVMPNNWGFGQTFDGKINF

SEQ ID NO: 80921 - DNA, 891 bp, Arabidopsis thaliana
  misc_feature (1)..(891): Ceres Seq. ID no. 12657700
  misc_feature (1)..(891): Ortholog of  Ceres SEQ ID NO 13596519 as cited in SEQ ID NO 62572
  misc_feature (1)..(891): Ortholog of  Ceres SEQ ID NO 12625108 as cited in SEQ ID NO 68102
atggtgatatggattgcacctatgactaacggtcatgatcatgcaagccacgtacccggtggaagacccggtgcccacccatcccatggcgcccacccagcccatggcgcccacccatcccatggtgctcacccatcccatggtgcccacccatcccatggtgctcacccatcccatggcgccctcccatcccatggtggccaagtgccgcattctggttggggtcatggccgtgccacattctacggtgacatcaatggtggagaaactcaacagggagcttgtggatatggtgatctacacaaacaaggatatggtctagagaccgcagcactaagcaccgcactatttaacaacggctcaaggtgtggggcttgttacgagatcatgtgcgaacacgctccacaatggtgtttgccaggttccatcaagatcacagctacaaacttctgtccaccagattttaccaagcccaatgacaattggtgcaacccgccacaaaaacactttgatctctcgcaaccaatgttcctcaaaatagctaaatacaaagccggggttgtcccggttaaatttagacgtgttccttgtgcgaaaatcggaggtgtcaagtttgaaatcaagggaaatcctcatttcttaatgatcttaccgtacaatgtaggaggagctggagctgttagggctatgcaaattaagggaacaaggacccagtggattgcgatgaagaagaattggggacagatttggagcactggtgttgtgttgaccggacaatgtttatcgtttaggcttaccacaagtgatggagttatgaaagagtttattgatgttacaccgccggactggaaatgtaatggacagagttttgatggaaaggttaatttttag

SEQ ID NO: 80922 - protein, 296 aa, Arabidopsis thaliana
  peptide (1)..(296): Ceres Seq. ID no. 12657701
MVIWIAPMTNGHDHASHVPGGRPGAHPSHGAHPAHGAHPSHGAHPSHGAHPSHGAHPSHGALPSHGGQVPHSGWGHGRATFYGDINGGETQQGACGYGDLHKQGYGLETAALSTALFNNGSRCGACYEIMCEHAPQWCLPGSIKITATNFCPPDFTKPNDNWCNPPQKHFDLSQPMFLKIAKYKAGVVPVKFRRVPCAKIGGVKFEIKGNPHFLMILPYNVGGAGAVRAMQIKGTRTQWIAMKKNWGQIWSTGVVLTGQCLSFRLTTSDGVMKEFIDVTPPDWKCNGQSFDGKVNF

SEQ ID NO: 80923 - protein, 289 aa, Arabidopsis thaliana
  peptide (1)..(289): Ceres Seq. ID no. 12657702
MTNGHDHASHVPGGRPGAHPSHGAHPAHGAHPSHGAHPSHGAHPSHGAHPSHGALPSHGGQVPHSGWGHGRATFYGDINGGETQQGACGYGDLHKQGYGLETAALSTALFNNGSRCGACYEIMCEHAPQWCLPGSIKITATNFCPPDFTKPNDNWCNPPQKHFDLSQPMFLKIAKYKAGVVPVKFRRVPCAKIGGVKFEIKGNPHFLMILPYNVGGAGAVRAMQIKGTRTQWIAMKKNWGQIWSTGVVLTGQCLSFRLTTSDGVMKEFIDVTPPDWKCNGQSFDGKVNF

SEQ ID NO: 80924 - protein, 167 aa, Arabidopsis thaliana
  peptide (1)..(167): Ceres Seq. ID no. 12657703
MCEHAPQWCLPGSIKITATNFCPPDFTKPNDNWCNPPQKHFDLSQPMFLKIAKYKAGVVPVKFRRVPCAKIGGVKFEIKGNPHFLMILPYNVGGAGAVRAMQIKGTRTQWIAMKKNWGQIWSTGVVLTGQCLSFRLTTSDGVMKEFIDVTPPDWKCNGQSFDGKVNF

SEQ ID NO: 80925 - DNA, 1485 bp, Arabidopsis thaliana
  misc_feature (1)..(1485): Ceres Seq. ID no. 12657716
  misc_feature (1)..(1485): Ortholog of  Ceres SEQ ID NO 13599900 as cited in SEQ ID NO 531
  misc_feature (1)..(1485): Ortholog of  Ceres SEQ ID NO 13596509 as cited in SEQ ID NO 62004
  misc_feature (1)..(1485): Ortholog of  Ceres SEQ ID NO 13659971 as cited in SEQ ID NO 67565
  misc_feature (1)..(1485): Ortholog of  Ceres SEQ ID NO 13500385 as cited in SEQ ID NO 67583
atggatggatcatcggaaaaaactaccaataaattagtatcgattctaccaaattataggattggtaagactcttggacatggatcctttgcgaaagtgaaattagcactgcatgtagctactggtcacaaagttgctatcaaaattcttaatcgctctaagattaagaacatgggtattgagatcaaagtacaaagggagatcaaaattctcagatttttgatgcatcctcatatcatccgtcaatatgaagttatagagacgccaaatgacatttatgttgtgatggaatatgttaagtctggagaactatttgactatattgtagagaaaggtaaattacaggaagacgaggctcgtcatctttttcagcagatcatatctggtgtagagtattgtcatcgcaatatgatcgttcatagagatcttaagcccgagaatgtgcttttggattcgcaatgcaacataaagattgttgactttggattgagtaatgtcatgcatgatggtcattttttaaagactagttgtggaagccctaattatgctgctccagaggttatttcaggaaaaccatatggaccagatgtagatatatggagttgtggggtgatattatatgctctgttgtgtggtactcttcctttcgatgacgaaaatattcctaatgtattcgagaaaataaagagaggaatgtatactcttccaaatcatttatcacattttgctagagatttgataccgagaatgcttatggttgatcctactatgagaattagcattactgagattcgtcaacatccttggttcaataatcatcttcctctttatctttctattcctccattagataccatagaccaagctaaaaagattgaggaggagataattcaaaacgtggttaacatagggtttgatagaaaccatgttgttgattctcttgccaatagaatccaaaacgaggctacagttgcataccatctaatcctagacaaccgaaaccaaaattctgttcccaatgaccctttccaatccaagtttaaagagatttcggatggtatatttaattcgacgttaccagttcaaaatattacttcacatgttggccattcattttcggcattgtatggactaaaatccaatgtcaaagatgacaaaacatggacccttggacttcagtctcaagggagtccttatgatatcatgactgaaatttttaaagctcttcaaaatctaaaaatatgctggaaaaaaatcggactctacaatataaaatgtagatgggtccgaagctttgcttactataagaatcatacaattgaggatgaatgtgccatcatcttaccgaccgtcatcaaatttgaaattcagctatacaaagtacgcgaaggcaaatatttgctggacatcctaagaattgatggacctcagtttatcttctttgatctatgtgttgcgtttctcagagagctaggtgtcctctaa

SEQ ID NO: 80926 - protein, 494 aa, Arabidopsis thaliana
  peptide (1)..(494): Ceres Seq. ID no. 12657717
MDGSSEKTTNKLVSILPNYRIGKTLGHGSFAKVKLALHVATGHKVAIKILNRSKIKNMGIEIKVQREIKILRFLMHPHIIRQYEVIETPNDIYVVMEYVKSGELFDYIVEKGKLQEDEARHLFQQIISGVEYCHRNMIVHRDLKPENVLLDSQCNIKIVDFGLSNVMHDGHFLKTSCGSPNYAAPEVISGKPYGPDVDIWSCGVILYALLCGTLPFDDENIPNVFEKIKRGMYTLPNHLSHFARDLIPRMLMVDPTMRISITEIRQHPWFNNHLPLYLSIPPLDTIDQAKKIEEEIIQNVVNIGFDRNHVVDSLANRIQNEATVAYHLILDNRNQNSVPNDPFQSKFKEISDGIFNSTLPVQNITSHVGHSFSALYGLKSNVKDDKTWTLGLQSQGSPYDIMTEIFKALQNLKICWKKIGLYNIKCRWVRSFAYYKNHTIEDECAIILPTVIKFEIQLYKVREGKYLLDILRIDGPQFIFFDLCVAFLRELGVL

SEQ ID NO: 80927 - protein, 437 aa, Arabidopsis thaliana
  peptide (1)..(437): Ceres Seq. ID no. 12657718
MGIEIKVQREIKILRFLMHPHIIRQYEVIETPNDIYVVMEYVKSGELFDYIVEKGKLQEDEARHLFQQIISGVEYCHRNMIVHRDLKPENVLLDSQCNIKIVDFGLSNVMHDGHFLKTSCGSPNYAAPEVISGKPYGPDVDIWSCGVILYALLCGTLPFDDENIPNVFEKIKRGMYTLPNHLSHFARDLIPRMLMVDPTMRISITEIRQHPWFNNHLPLYLSIPPLDTIDQAKKIEEEIIQNVVNIGFDRNHVVDSLANRIQNEATVAYHLILDNRNQNSVPNDPFQSKFKEISDGIFNSTLPVQNITSHVGHSFSALYGLKSNVKDDKTWTLGLQSQGSPYDIMTEIFKALQNLKICWKKIGLYNIKCRWVRSFAYYKNHTIEDECAIILPTVIKFEIQLYKVREGKYLLDILRIDGPQFIFFDLCVAFLRELGVL

SEQ ID NO: 80928 - protein, 420 aa, Arabidopsis thaliana
  peptide (1)..(420): Ceres Seq. ID no. 12657719
MHPHIIRQYEVIETPNDIYVVMEYVKSGELFDYIVEKGKLQEDEARHLFQQIISGVEYCHRNMIVHRDLKPENVLLDSQCNIKIVDFGLSNVMHDGHFLKTSCGSPNYAAPEVISGKPYGPDVDIWSCGVILYALLCGTLPFDDENIPNVFEKIKRGMYTLPNHLSHFARDLIPRMLMVDPTMRISITEIRQHPWFNNHLPLYLSIPPLDTIDQAKKIEEEIIQNVVNIGFDRNHVVDSLANRIQNEATVAYHLILDNRNQNSVPNDPFQSKFKEISDGIFNSTLPVQNITSHVGHSFSALYGLKSNVKDDKTWTLGLQSQGSPYDIMTEIFKALQNLKICWKKIGLYNIKCRWVRSFAYYKNHTIEDECAIILPTVIKFEIQLYKVREGKYLLDILRIDGPQFIFFDLCVAFLRELGVL

SEQ ID NO: 80929 - DNA, 1005 bp, Arabidopsis thaliana
  misc_feature (1)..(1005): Ceres Seq. ID no. 12657769
  misc_feature (1)..(1005): Ortholog of  Ceres SEQ ID NO 12611392 as cited in SEQ ID NO 56826
  misc_feature (1)..(1005): Ortholog of  Ceres SEQ ID NO 13660872 as cited in SEQ ID NO 60830
  misc_feature (1)..(1005): Ortholog of  Ceres SEQ ID NO 12616221 as cited in SEQ ID NO 63291
atggttctagttatggatgatgaagagagtaacaacgttgaaagatatgacgacgtcgtattgccagggtttaggttccatcccactgatgaagaactcgtaagtttctacttgaaacggaaggttttacacaaatctcttccctttgatctcatcaagaaagtcgacatttacaaatacgatccatgggacctcccaacgatgggggaaaaagagtggtacttttattgtcctagagacaggaaataccgcaacagcacaagacctaaccgagtaactggaggtggcttctggaaagcaaccggaacagaccggcctatatactcattggactccactcgatgcatcggtttgaagaaatcacttgtgttctaccgtggtcgagctgctaaaggagtcaaaaccgattggatgatgcatgaatttcgtctcccttctctctctgactctcatcactcatcatatcccaattacaataacaagaagcaacaccttaacaataacaacaacagcaaggagcttccttcaaacgatgcttgggcgatatgtagaatatttaagaagacaaatgcagtatcctcacaaagatcaatcccacaatcttgggtttatccaacgattcctgacaacaatcaacagtcacacaacaacaccgcaactctcttagcttcatcagacgttctcagccacatatcaacaagacaaaactttattccttctccagtcaacgaacccgcaagcttcacagaatcagctgcttcttacttcgcgtctcagatgctcggagtcacgtacaatacagccagaaacaacggaacaggggatgctctgtttctgagaaacaatggaacaggggatgctctggttctgagcaacaatgagaataactacttcaacaacttgactggagggttgactcatgaggttccgaatgtaagatcaatggtgatggaggagactacggggagtgagatgtcggcgacgtcgtattccactaacaattaa

SEQ ID NO: 80930 - protein, 334 aa, Arabidopsis thaliana
  peptide (1)..(334): Ceres Seq. ID no. 12657770
MVLVMDDEESNNVERYDDVVLPGFRFHPTDEELVSFYLKRKVLHKSLPFDLIKKVDIYKYDPWDLPTMGEKEWYFYCPRDRKYRNSTRPNRVTGGGFWKATGTDRPIYSLDSTRCIGLKKSLVFYRGRAAKGVKTDWMMHEFRLPSLSDSHHSSYPNYNNKKQHLNNNNNSKELPSNDAWAICRIFKKTNAVSSQRSIPQSWVYPTIPDNNQQSHNNTATLLASSDVLSHISTRQNFIPSPVNEPASFTESAASYFASQMLGVTYNTARNNGTGDALFLRNNGTGDALVLSNNENNYFNNLTGGLTHEVPNVRSMVMEETTGSEMSATSYSTNN

SEQ ID NO: 80931 - protein, 330 aa, Arabidopsis thaliana
  peptide (1)..(330): Ceres Seq. ID no. 12657771
MDDEESNNVERYDDVVLPGFRFHPTDEELVSFYLKRKVLHKSLPFDLIKKVDIYKYDPWDLPTMGEKEWYFYCPRDRKYRNSTRPNRVTGGGFWKATGTDRPIYSLDSTRCIGLKKSLVFYRGRAAKGVKTDWMMHEFRLPSLSDSHHSSYPNYNNKKQHLNNNNNSKELPSNDAWAICRIFKKTNAVSSQRSIPQSWVYPTIPDNNQQSHNNTATLLASSDVLSHISTRQNFIPSPVNEPASFTESAASYFASQMLGVTYNTARNNGTGDALFLRNNGTGDALVLSNNENNYFNNLTGGLTHEVPNVRSMVMEETTGSEMSATSYSTNN

SEQ ID NO: 80932 - protein, 267 aa, Arabidopsis thaliana; identical to SEQ ID NO: 78615
  peptide (1)..(267): Ceres Seq. ID no. 12657772

SEQ ID NO: 80933 - DNA, 1545 bp, Arabidopsis thaliana
  misc_feature (1)..(1545): Ceres Seq. ID no. 12657785
  misc_feature (1)..(1545): Ortholog of  Ceres SEQ ID NO 12612314 as cited in SEQ ID NO 51420
atggtgaaaatgggtgaagtatggactaatacgggctctgctctcgcaagtttagtgtttatatacacaatcttcgaaagattcttcccttaccgtctcagagagcacttcgaaccattagctcagagcctcatcggttttatctacccttatattcagataacgttccatgaatatagcggtgagcggttcaagcgaagcgatgtctatgacgcgatccagagctatcttagcaaagactcttcttctcgagccaagaaactaacagcaaacacaatcaaaggaaataaatctattatccttagcatggacgaccacgaagagatcactgatgagtttcaaggggtcaaagtttggtggcaatctaagaagcatcaaagtgaaagccgggcgatctccttttaccctaaagccgacgagtcaagattctacatgcttaagtttcatagacgtgacagggaagtaatcacaaagaaatatcttaatcatgttattagtgaaggcaagacaattgaggttaagaacagagaaaggaagctttattcaaataatcctagccagaattggtctggctataagcaaacgaagtggagccacgtcactttcgagcatcctgctacatttgatacacttgctatggaatataagaagaaggaagagatcaagaacgatttgatcaagtttagtaatagcaaagattactacaagaagatcgggaaagcgtggaaacgagggtatctcttgtttggtccaccaggaaccggaaaatcaacaatgatcgctgcgatggcgaatctcttggagtatgatgtttatgatcttgaattgacaacagtcaaggataacacagagctgagaaggttgttgattgagacttcagggaaatcgataattgttattgaagatatcgattgttctcttgacctaactggtcagagaaagcagaagaaggacgaggaggaagacgaagatgagactagcccgattgagaagcagatgaagaaagatcaaggtgagaataaaggaagtaaagtgacattatcagggttactgaatttcattgatgggttatggtcagcttgtggtggtgagaggatcattgtgttcactactaatttcatagataagttagatccggctttgattcgaaaaggaagaatggataagcatatagagatgtcctactgcggttttgaagcgtttaaagtgttggcaaacaattacttggatgctaaggaagaagatgataatgagttgtttgatgagatcaagaggttacttgaggtagaagaaataaagatgactcctgctgatgtgggagagaatctgttgaagaaatcagaagttgagactaaggagatttgtttgaagcgattgattgaagcgttgaaggaggagaaagaggaagcgaagaggaggattgaggatgaggagaagaagaagaaagaagaggaagagattaagaggaagaagagagaggagaagaagataaagaaggaagagaaggaagagaaggaagaaaatgaaacaacgatgaaagattaa

SEQ ID NO: 80934 - protein, 514 aa, Arabidopsis thaliana
  peptide (1)..(514): Ceres Seq. ID no. 12657786
MVKMGEVWTNTGSALASLVFIYTIFERFFPYRLREHFEPLAQSLIGFIYPYIQITFHEYSGERFKRSDVYDAIQSYLSKDSSSRAKKLTANTIKGNKSIILSMDDHEEITDEFQGVKVWWQSKKHQSESRAISFYPKADESRFYMLKFHRRDREVITKKYLNHVISEGKTIEVKNRERKLYSNNPSQNWSGYKQTKWSHVTFEHPATFDTLAMEYKKKEEIKNDLIKFSNSKDYYKKIGKAWKRGYLLFGPPGTGKSTMIAAMANLLEYDVYDLELTTVKDNTELRRLLIETSGKSIIVIEDIDCSLDLTGQRKQKKDEEEDEDETSPIEKQMKKDQGENKGSKVTLSGLLNFIDGLWSACGGERIIVFTTNFIDKLDPALIRKGRMDKHIEMSYCGFEAFKVLANNYLDAKEEDDNELFDEIKRLLEVEEIKMTPADVGENLLKKSEVETKEICLKRLIEALKEEKEEAKRRIEDEEKKKKEEEEIKRKKREEKKIKKEEKEEKEENETTMKD

SEQ ID NO: 80935 - protein, 511 aa, Arabidopsis thaliana
  peptide (1)..(511): Ceres Seq. ID no. 12657787
MGEVWTNTGSALASLVFIYTIFERFFPYRLREHFEPLAQSLIGFIYPYIQITFHEYSGERFKRSDVYDAIQSYLSKDSSSRAKKLTANTIKGNKSIILSMDDHEEITDEFQGVKVWWQSKKHQSESRAISFYPKADESRFYMLKFHRRDREVITKKYLNHVISEGKTIEVKNRERKLYSNNPSQNWSGYKQTKWSHVTFEHPATFDTLAMEYKKKEEIKNDLIKFSNSKDYYKKIGKAWKRGYLLFGPPGTGKSTMIAAMANLLEYDVYDLELTTVKDNTELRRLLIETSGKSIIVIEDIDCSLDLTGQRKQKKDEEEDEDETSPIEKQMKKDQGENKGSKVTLSGLLNFIDGLWSACGGERIIVFTTNFIDKLDPALIRKGRMDKHIEMSYCGFEAFKVLANNYLDAKEEDDNELFDEIKRLLEVEEIKMTPADVGENLLKKSEVETKEICLKRLIEALKEEKEEAKRRIEDEEKKKKEEEEIKRKKREEKKIKKEEKEEKEENETTMKD

SEQ ID NO: 80936 - protein, 412 aa, Arabidopsis thaliana
  peptide (1)..(412): Ceres Seq. ID no. 12657788
MDDHEEITDEFQGVKVWWQSKKHQSESRAISFYPKADESRFYMLKFHRRDREVITKKYLNHVISEGKTIEVKNRERKLYSNNPSQNWSGYKQTKWSHVTFEHPATFDTLAMEYKKKEEIKNDLIKFSNSKDYYKKIGKAWKRGYLLFGPPGTGKSTMIAAMANLLEYDVYDLELTTVKDNTELRRLLIETSGKSIIVIEDIDCSLDLTGQRKQKKDEEEDEDETSPIEKQMKKDQGENKGSKVTLSGLLNFIDGLWSACGGERIIVFTTNFIDKLDPALIRKGRMDKHIEMSYCGFEAFKVLANNYLDAKEEDDNELFDEIKRLLEVEEIKMTPADVGENLLKKSEVETKEICLKRLIEALKEEKEEAKRRIEDEEKKKKEEEEIKRKKREEKKIKKEEKEEKEENETTMKD

SEQ ID NO: 80937 - DNA, 2445 bp, Arabidopsis thaliana
  misc_feature (1)..(2445): Ceres Seq. ID no. 12657825
  misc_feature (1)..(2445): Ortholog of  Ceres SEQ ID NO 13598023 as cited in SEQ ID NO 66487
atccactctttcgcttcttctttcttctgatcatcctcccgtagctgattcatggagtcaatccactgcaatagtttactaaaccctaatttctccttaaaccagcgtcgtcggaggattaatcacgctgttcttaatcggagagatgctcttttgcgatccctcaacgccgtggagttgcggcggagcaggacgttctcggctgtacggacttctaatttctcagttactgcggcggcgacggatgttggtggtcggaattcgacggatgcatcggtaatgacaacggcgatgagcggggtggagagaggtgtgcgagtagggaaatcgagctccgcgcttgagcagctagatattgagcgaggcgtttgcgttccattccgaaagtattctccggagactgtgaggagtaaagtgctggaatcaagaggagcagtcgtgtctctagtttcaaggggtgtggagattgtttggactcttgggttgtattggtctaccttaacgtatgattttttggttggaagggatgaggaagttgtcccctttcgtgctaggcagcttaggaacctgttgtgcaatttgggaccttcatttatcaaagctggacaagttctcgcaaataggcctgatatcatccgtgaagactacatgaacgagctctgcatactccaagatgatgttcctccattcccaaacgaggttgctttcaatatcatcgaggaagagttaggccaacctcttgagaacatatttagcaagatttcttcacaaacaatagcagctgcaagcttaggacaagtttatcgagctactctacgtgccactggagaggatgttgctatcaaggtgcagagaccacaaatagagcctataatttaccgggatctctttcttttccgaaccctcgcctccttcttaaatggcttcagtctacagaaactgggttgcaacgcagagctaatagttgatgaatttggagaaaagcttttggaggagcttgactacaccttggaagccagaaacattgaagactttctggagaacttcaaagatgaccccacagtcaaaattcctggagtatacaagaatctttgtggtccgcgggttctggtaatggagtggattgatggtattcggtgcactgacccacaggccatcaaggatgcagggattgatttaaatggattcttgactgttggcgtaagtgctgctctaaggcagctgttggaatttggattgttccatggagatccacatcctggaaatatctttgcaatgcaagatgggcgtatcgcttatgtggacttcggtaatgttgctgtactgagtcagcaaaacaagcaaattttgattgatgctgttgttcatgcggttaatgaggactatggggagatggcaaatgatttcactaggcttgggttcttggccaaggataccgatgtttctcctatcgttccagctttagaagccatctggcagaactctgcagggaaaggacttgcagatttcaatttccgaagtgttacaggacaattcaacaagcttgtgtacgactttcccatccgtatcccagagcggttctctcttgttattcgttctctgcttacgcaggagggtatatgtttcacactgaagcctgattttaaatttctagaggttgcttatccatatgtagcaaaacggctcctaacggatccaaatcctgcacttcgggaacgcttgatacaggttctattcaaagatggtgttttccaatggaaaaggctagaaaaccttttatcacttgcaaaggaaaacgtcgccaagatgagtagcaatcctaatctacgagtaaagcgtgtggagagtaagcttgacttgacagataccattaaggacggagctcgtcttttcctccttgacgaaggcatccgcaggaaacttattcttgcactcacagaggactcgaagcttcatgtagaagagcttgtggacgtatacagattggttgaagacgaagtagatattcccacactggccatgcaagtcgtgcaagatttaccgaatgttttccgagattttgtgttgtcatggagcaactcagtattatccgacagatgatgaatcagcttctcacttactttttttggctctttttgaagaggaaagaggtaatatatattacagggagtagatggagaagaaaagcgtagattaatatatagtttaatcttcgatgcatacatgttattaacttatacaccaatccatacatgtaattatataaaagcacacacaaacttcacttcacttgttacccagtttgagtcttggtctcttggacgttgtctactgtagttggatatctaaacacattaatcgacgtcatcaaatcaaagttgtagtgttctcacaacacaactgattcacaatctggactcgaatgaattgaatcgttttgcgtct

SEQ ID NO: 80938 - protein, 682 aa, Arabidopsis thaliana
  peptide (1)..(682): Ceres Seq. ID no. 12657826
MESIHCNSLLNPNFSLNQRRRRINHAVLNRRDALLRSLNAVELRRSRTFSAVRTSNFSVTAAATDVGGRNSTDASVMTTAMSGVERGVRVGKSSSALEQLDIERGVCVPFRKYSPETVRSKVLESRGAVVSLVSRGVEIVWTLGLYWSTLTYDFLVGRDEEVVPFRARQLRNLLCNLGPSFIKAGQVLANRPDIIREDYMNELCILQDDVPPFPNEVAFNIIEEELGQPLENIFSKISSQTIAAASLGQVYRATLRATGEDVAIKVQRPQIEPIIYRDLFLFRTLASFLNGFSLQKLGCNAELIVDEFGEKLLEELDYTLEARNIEDFLENFKDDPTVKIPGVYKNLCGPRVLVMEWIDGIRCTDPQAIKDAGIDLNGFLTVGVSAALRQLLEFGLFHGDPHPGNIFAMQDGRIAYVDFGNVAVLSQQNKQILIDAVVHAVNEDYGEMANDFTRLGFLAKDTDVSPIVPALEAIWQNSAGKGLADFNFRSVTGQFNKLVYDFPIRIPERFSLVIRSLLTQEGICFTLKPDFKFLEVAYPYVAKRLLTDPNPALRERLIQVLFKDGVFQWKRLENLLSLAKENVAKMSSNPNLRVKRVESKLDLTDTIKDGARLFLLDEGIRRKLILALTEDSKLHVEELVDVYRLVEDEVDIPTLAMQVVQDLPNVFRDFVLSWSNSVLSDR

SEQ ID NO: 80939 - protein, 606 aa, Arabidopsis thaliana
  peptide (1)..(606): Ceres Seq. ID no. 12657827
MTTAMSGVERGVRVGKSSSALEQLDIERGVCVPFRKYSPETVRSKVLESRGAVVSLVSRGVEIVWTLGLYWSTLTYDFLVGRDEEVVPFRARQLRNLLCNLGPSFIKAGQVLANRPDIIREDYMNELCILQDDVPPFPNEVAFNIIEEELGQPLENIFSKISSQTIAAASLGQVYRATLRATGEDVAIKVQRPQIEPIIYRDLFLFRTLASFLNGFSLQKLGCNAELIVDEFGEKLLEELDYTLEARNIEDFLENFKDDPTVKIPGVYKNLCGPRVLVMEWIDGIRCTDPQAIKDAGIDLNGFLTVGVSAALRQLLEFGLFHGDPHPGNIFAMQDGRIAYVDFGNVAVLSQQNKQILIDAVVHAVNEDYGEMANDFTRLGFLAKDTDVSPIVPALEAIWQNSAGKGLADFNFRSVTGQFNKLVYDFPIRIPERFSLVIRSLLTQEGICFTLKPDFKFLEVAYPYVAKRLLTDPNPALRERLIQVLFKDGVFQWKRLENLLSLAKENVAKMSSNPNLRVKRVESKLDLTDTIKDGARLFLLDEGIRRKLILALTEDSKLHVEELVDVYRLVEDEVDIPTLAMQVVQDLPNVFRDFVLSWSNSVLSDR

SEQ ID NO: 80940 - protein, 602 aa, Arabidopsis thaliana
  peptide (1)..(602): Ceres Seq. ID no. 12657828
MSGVERGVRVGKSSSALEQLDIERGVCVPFRKYSPETVRSKVLESRGAVVSLVSRGVEIVWTLGLYWSTLTYDFLVGRDEEVVPFRARQLRNLLCNLGPSFIKAGQVLANRPDIIREDYMNELCILQDDVPPFPNEVAFNIIEEELGQPLENIFSKISSQTIAAASLGQVYRATLRATGEDVAIKVQRPQIEPIIYRDLFLFRTLASFLNGFSLQKLGCNAELIVDEFGEKLLEELDYTLEARNIEDFLENFKDDPTVKIPGVYKNLCGPRVLVMEWIDGIRCTDPQAIKDAGIDLNGFLTVGVSAALRQLLEFGLFHGDPHPGNIFAMQDGRIAYVDFGNVAVLSQQNKQILIDAVVHAVNEDYGEMANDFTRLGFLAKDTDVSPIVPALEAIWQNSAGKGLADFNFRSVTGQFNKLVYDFPIRIPERFSLVIRSLLTQEGICFTLKPDFKFLEVAYPYVAKRLLTDPNPALRERLIQVLFKDGVFQWKRLENLLSLAKENVAKMSSNPNLRVKRVESKLDLTDTIKDGARLFLLDEGIRRKLILALTEDSKLHVEELVDVYRLVEDEVDIPTLAMQVVQDLPNVFRDFVLSWSNSVLSDR

SEQ ID NO: 80941 - DNA, 1478 bp, Arabidopsis thaliana
  misc_feature (1)..(1478): Ceres Seq. ID no. 12657829
  misc_feature (1)..(1478): Ortholog of  Ceres SEQ ID NO 12563809 as cited in SEQ ID NO 53287
gacgcttttttagagacaaacacgatcgccgatccatttacgagccgtcgttgctctacacatatcaacaacaaatcttatcctcccaactatcttttctctgattttcttttcttctccagtttccatttctagaatcgatcgatattgaaggagagaagatgcctggtttaacatgtaacgcgtgtaacatggagttcaaggacgaagaagaacgtaaccttcattacaaatccgattggcaccgctacaatctcaagcgcaaggtggctggagttcctggagttacagaagccttgtttgaggctagacaatctgctcttgctcaggagaagaataaatcaaatgaagcacctatgctttatacttgtgcaatctgtgctaaaggttacaggagttccaaggctcatgagcagcatcttcagtcgcgtagccatgttttgcgggtttcacaagggacatcaatcaacggagaggaggatatagcgattatcaggcaacttcctcgccgtgttcaacacaggggttccattgatgatgatagtgaagatgaatgggtggaggttgattctgacgaggaattggctgctgaagaagcctctgattctttgtctaagttgaatgtgaatgagtctggatctgctgaagatatggatgatgatggtgatgcagataagtatgagctggatccaacctgctgtttgatgtgtgacaaaaaacataagaccttagagagctgtatgcttcacatgcataagcatcatggtttctttattcccgatattgagtatctcaaggatcctgaagggcttctcacttaccttggtcttaaggtcaagagagacttcatgtgtctgtactgcaatgagctgtgccgtccattcagcagcttagaagctgtaagaaaacatatggaagcaaagagtcattgcaaactgcattatggtgatggtgatgatgaagaagatgctgagctagaagagttttatgactacagcagcagctatgttgatgaagctggaaagcaaattgttgtatctggtgaaacagacaatactgtagaactcgttggtggttctgagctcttgatcacggagaagtccgagaacacaacaacgtctaaaactctcgggtcccgtgaattcatgcgttactacagacagaagccacgcccaacttctcaagacagcaaccagataattgcctctttatcttcaaggtacaagagcctgggtctgaagacagtaccgtcgaaagaggagactttgaggatgaaagtgcgcaaggagatgagcaagagaggcgagacaatgcgtaccaagatcggagtgaagagtaatgtcataagaaacttgcccaataacgtcccatattagtttctgtgtatgtgccacttgttctcaagtgttggattgtatgatgatttcatgtacttttgagtctttgaccaagttgtgttgctacttggtaataagagt

SEQ ID NO: 80942 - protein, 404 aa, Arabidopsis thaliana
  peptide (1)..(404): Ceres Seq. ID no. 12657830
MPGLTCNACNMEFKDEEERNLHYKSDWHRYNLKRKVAGVPGVTEALFEARQSALAQEKNKSNEAPMLYTCAICAKGYRSSKAHEQHLQSRSHVLRVSQGTSINGEEDIAIIRQLPRRVQHRGSIDDDSEDEWVEVDSDEELAAEEASDSLSKLNVNESGSAEDMDDDGDADKYELDPTCCLMCDKKHKTLESCMLHMHKHHGFFIPDIEYLKDPEGLLTYLGLKVKRDFMCLYCNELCRPFSSLEAVRKHMEAKSHCKLHYGDGDDEEDAELEEFYDYSSSYVDEAGKQIVVSGETDNTVELVGGSELLITEKSENTTTSKTLGSREFMRYYRQKPRPTSQDSNQIIASLSSRYKSLGLKTVPSKEETLRMKVRKEMSKRGETMRTKIGVKSNVIRNLPNNVPY

SEQ ID NO: 80943 - protein, 394 aa, Arabidopsis thaliana
  peptide (1)..(394): Ceres Seq. ID no. 12657831
MEFKDEEERNLHYKSDWHRYNLKRKVAGVPGVTEALFEARQSALAQEKNKSNEAPMLYTCAICAKGYRSSKAHEQHLQSRSHVLRVSQGTSINGEEDIAIIRQLPRRVQHRGSIDDDSEDEWVEVDSDEELAAEEASDSLSKLNVNESGSAEDMDDDGDADKYELDPTCCLMCDKKHKTLESCMLHMHKHHGFFIPDIEYLKDPEGLLTYLGLKVKRDFMCLYCNELCRPFSSLEAVRKHMEAKSHCKLHYGDGDDEEDAELEEFYDYSSSYVDEAGKQIVVSGETDNTVELVGGSELLITEKSENTTTSKTLGSREFMRYYRQKPRPTSQDSNQIIASLSSRYKSLGLKTVPSKEETLRMKVRKEMSKRGETMRTKIGVKSNVIRNLPNNVPY

SEQ ID NO: 80944 - protein, 339 aa, Arabidopsis thaliana
  peptide (1)..(339): Ceres Seq. ID no. 12657832
MLYTCAICAKGYRSSKAHEQHLQSRSHVLRVSQGTSINGEEDIAIIRQLPRRVQHRGSIDDDSEDEWVEVDSDEELAAEEASDSLSKLNVNESGSAEDMDDDGDADKYELDPTCCLMCDKKHKTLESCMLHMHKHHGFFIPDIEYLKDPEGLLTYLGLKVKRDFMCLYCNELCRPFSSLEAVRKHMEAKSHCKLHYGDGDDEEDAELEEFYDYSSSYVDEAGKQIVVSGETDNTVELVGGSELLITEKSENTTTSKTLGSREFMRYYRQKPRPTSQDSNQIIASLSSRYKSLGLKTVPSKEETLRMKVRKEMSKRGETMRTKIGVKSNVIRNLPNNVPY

SEQ ID NO: 80945 - DNA, 558 bp, Arabidopsis thaliana
  misc_feature (1)..(558): Ceres Seq. ID no. 12657837
  misc_feature (1)..(558): Ortholog of  Ceres SEQ ID NO 14306299 as cited in SEQ ID NO 56895
  misc_feature (1)..(558): Ortholog of  Ceres SEQ ID NO 13663631 as cited in SEQ ID NO 67073
atggaacaaaaaactctgatattcatcatcattatcatagttatcagcactccacttccttctctctcttttcaaatcccatcaaacagaacaccgacaacatcaacactaattttttctcaagacaaagctctagcccgcaacaccattcagcagcagtttctccgaccacacaacatcttacgagccaagcttcgtctccctcctctcaaatggagcaatagcctcgccctctatgcgagccggtgggccagaacccgccgtggagattgcaaacttatccactccgggggaccttacggggagaatctcttctggggaagcggaaaaggttggactccacgggatgcggtggctgcatgggcctcggagatgaaatactatgaccggaggacttcccactgcaaggcgaatggggattgtttgcattacacgcaacttgtatggaagaagagttcgaggattgggtgtgcaatcagtttttgcaagaccggtgacacatttattatttgtaactatgatcctcctggtaacattgttggacaaccacccttttga

SEQ ID NO: 80946 - protein, 185 aa, Arabidopsis thaliana
  peptide (1)..(185): Ceres Seq. ID no. 12657838
MEQKTLIFIIIIIVISTPLPSLSFQIPSNRTPTTSTLIFSQDKALARNTIQQQFLRPHNILRAKLRLPPLKWSNSLALYASRWARTRRGDCKLIHSGGPYGENLFWGSGKGWTPRDAVAAWASEMKYYDRRTSHCKANGDCLHYTQLVWKKSSRIGCAISFCKTGDTFIICNYDPPGNIVGQPPF

SEQ ID NO: 80947 - DNA, 1437 bp, Arabidopsis thaliana
  misc_feature (1)..(1437): Ceres Seq. ID no. 12657850
  misc_feature (1)..(1437): Ortholog of  Ceres SEQ ID NO 13648124 as cited in SEQ ID NO 20362
atggatgatccagcaatttcctctccaaccaacaagcatttcttcgtcatagttcttcatggacacaaatccagtcccatgattcctgctgagtttttttcgacttacgtggaaggtaaaaaccaccagtctacaaaactgaaactgacctcggacgctttcgatagaacctgggaagtgaaattgaacggccgcagattcgccggcggctgggaaaatttctccaccgtacactctctccaagatgacgacgttgtgattttcagggaaatcggggacatgacctttcacgtcacagcctccggtcgcagtttctgtaagttacagtacatatcctctgacgaagatagggctgatgaagatgatgcatggaacgtgtattcagattccaagaacattgtgtcgaagaagaagccaagaacagaagcagagtcttcatccaaaaactattatcttgttgcgcatgtcacgccttcgaacctaagccgagatagattgtatcttataaaggcttttgcgaggtcaaatggcctgaacgagagatgctgtgagattgatctaatgaataaacatggaaaatcatggacacttggtctgagatacagtacagtcaatgatcaggctagtatcagtggaggctggagagacttctgcttagtaaatgggctagaagctggatcattctacaggtttaagcttgtccaaaacggggaaaggcctttactacggttgtgttacgacactattccagaagaagactgttacaaaggaaacagaaaagttaatctttcagagagtgcttcaatgaagcagggcaagtttctgacaatgacctttaagccttacatgctcaagtcaggtcaacttcgtctctcgagaccctttgcaatagagaatgaaataaaggaggcagaggatataacactagtggacaaaaatggaggaaactggccatcctatgtagcttctggcgatggtcaaggaggaaagtattatttggcaaaaggttggagaagtttttgtgcagccaataggttaaagacgggagagaccttcacgttggagtttgttcgaggagaaggcacaactccaatgctaaagttctgctccaagtccaaggacaagatagaacaagtaccatttgatgaaggaggggagactcaagaagaaacagagactagggtcaaaaagagagctcgagtttctgcagaaagaggatcttctcgccgcaatcaggcatcaaataaacccaatgctgatccacaaaacttgcagcctgggcaaccacattgctcaatctctgatcaagtgcaaaaggtgaaacagattattgttgacactttaaccgggataaaacggattcggtcagagctagaaagaaagggacaaaagttagaagcttcgatactggaaattgatgctttaggtatgatctga

SEQ ID NO: 80948 - protein, 478 aa, Arabidopsis thaliana
  peptide (1)..(478): Ceres Seq. ID no. 12657851
MDDPAISSPTNKHFFVIVLHGHKSSPMIPAEFFSTYVEGKNHQSTKLKLTSDAFDRTWEVKLNGRRFAGGWENFSTVHSLQDDDVVIFREIGDMTFHVTASGRSFCKLQYISSDEDRADEDDAWNVYSDSKNIVSKKKPRTEAESSSKNYYLVAHVTPSNLSRDRLYLIKAFARSNGLNERCCEIDLMNKHGKSWTLGLRYSTVNDQASISGGWRDFCLVNGLEAGSFYRFKLVQNGERPLLRLCYDTIPEEDCYKGNRKVNLSESASMKQGKFLTMTFKPYMLKSGQLRLSRPFAIENEIKEAEDITLVDKNGGNWPSYVASGDGQGGKYYLAKGWRSFCAANRLKTGETFTLEFVRGEGTTPMLKFCSKSKDKIEQVPFDEGGETQEETETRVKKRARVSAERGSSRRNQASNKPNADPQNLQPGQPHCSISDQVQKVKQIIVDTLTGIKRIRSELERKGQKLEASILEIDALGMI

SEQ ID NO: 80949 - protein, 452 aa, Arabidopsis thaliana
  peptide (1)..(452): Ceres Seq. ID no. 12657852
MIPAEFFSTYVEGKNHQSTKLKLTSDAFDRTWEVKLNGRRFAGGWENFSTVHSLQDDDVVIFREIGDMTFHVTASGRSFCKLQYISSDEDRADEDDAWNVYSDSKNIVSKKKPRTEAESSSKNYYLVAHVTPSNLSRDRLYLIKAFARSNGLNERCCEIDLMNKHGKSWTLGLRYSTVNDQASISGGWRDFCLVNGLEAGSFYRFKLVQNGERPLLRLCYDTIPEEDCYKGNRKVNLSESASMKQGKFLTMTFKPYMLKSGQLRLSRPFAIENEIKEAEDITLVDKNGGNWPSYVASGDGQGGKYYLAKGWRSFCAANRLKTGETFTLEFVRGEGTTPMLKFCSKSKDKIEQVPFDEGGETQEETETRVKKRARVSAERGSSRRNQASNKPNADPQNLQPGQPHCSISDQVQKVKQIIVDTLTGIKRIRSELERKGQKLEASILEIDALGMI

SEQ ID NO: 80950 - protein, 385 aa, Arabidopsis thaliana
  peptide (1)..(385): Ceres Seq. ID no. 12657853
MTFHVTASGRSFCKLQYISSDEDRADEDDAWNVYSDSKNIVSKKKPRTEAESSSKNYYLVAHVTPSNLSRDRLYLIKAFARSNGLNERCCEIDLMNKHGKSWTLGLRYSTVNDQASISGGWRDFCLVNGLEAGSFYRFKLVQNGERPLLRLCYDTIPEEDCYKGNRKVNLSESASMKQGKFLTMTFKPYMLKSGQLRLSRPFAIENEIKEAEDITLVDKNGGNWPSYVASGDGQGGKYYLAKGWRSFCAANRLKTGETFTLEFVRGEGTTPMLKFCSKSKDKIEQVPFDEGGETQEETETRVKKRARVSAERGSSRRNQASNKPNADPQNLQPGQPHCSISDQVQKVKQIIVDTLTGIKRIRSELERKGQKLEASILEIDALGMI

SEQ ID NO: 80951 - DNA, 981 bp, Arabidopsis thaliana
  misc_feature (1)..(981): Ceres Seq. ID no. 12657866
  misc_feature (1)..(981): Ortholog of  Ceres SEQ ID NO 13581579 as cited in SEQ ID NO 58361
  misc_feature (1)..(981): Ortholog of  Ceres SEQ ID NO 13596969 as cited in SEQ ID NO 63375
  misc_feature (1)..(981): Ortholog of  Ceres SEQ ID NO 13597519 as cited in SEQ ID NO 64759
  misc_feature (1)..(981): Ortholog of  Ceres SEQ ID NO 13597870 as cited in SEQ ID NO 64982
  misc_feature (1)..(981): Ortholog of  Ceres SEQ ID NO 13595926 as cited in SEQ ID NO 67778
  misc_feature (1)..(981): Ortholog of  Ceres SEQ ID NO 12567001 as cited in SEQ ID NO 0
atggcgtcctcttacagaataaactgttccactcttcttcatctccttatgtttctgtctagtcttctcacttcctccgccaacctctcctttaatttctatgctagttcttgttctgtagccgagtttctagtcagaaacaccgttagatcagctacctcctccgatccaacgatccccgggaaactccttcgtcttttcttccacgactgtttcgtccagggttgtgatgcatcagtgttgatacaagggaatagcacagagaaaagcgatcccggaaacgcatctcttggaggattctcagtcatagacacagccaagaatgccatcgagaatttatgtccggccactgtttcttgcgctgacatagttgcacttgctgctagagacgccgtcgaagctgcaggaggaccggtggttgagattccgacagggaggagagacgggaaagaatcgatggctgcaaacgtgagaccgaacatcatcgacacagattttactctcgatcaaatgatcgatgccttctcttccaaaggcttgtccattcaagatctcgtcgtcctctcaggagcacacacaattggagcatcacactgtaacgcattcaatggaaggtttcaacgagactcgaaaggaaacttcgaggtaattgatgcgtctctcgacaactcctacgcagagacactaatgaacaagtgttcgtcctcggaatcctcatcattgactgtgagcaacgatccagagacatctgccgtattcgataatcagtactataggaatcttgagacgcacaagggtttgtttcagacggattctgctttgatggaggataatcggacgaggacaatggtggaggaattagcgagtgatgaggaaagcttttttcaaagatggagtgagtcgtttgtgaaactgagtatggttggtgtgagagttggtgaagatggtgagataagacgttcttgttcttccgtcaattaa

SEQ ID NO: 80952 - protein, 326 aa, Arabidopsis thaliana
  peptide (1)..(326): Ceres Seq. ID no. 12657867
MASSYRINCSTLLHLLMFLSSLLTSSANLSFNFYASSCSVAEFLVRNTVRSATSSDPTIPGKLLRLFFHDCFVQGCDASVLIQGNSTEKSDPGNASLGGFSVIDTAKNAIENLCPATVSCADIVALAARDAVEAAGGPVVEIPTGRRDGKESMAANVRPNIIDTDFTLDQMIDAFSSKGLSIQDLVVLSGAHTIGASHCNAFNGRFQRDSKGNFEVIDASLDNSYAETLMNKCSSSESSSLTVSNDPETSAVFDNQYYRNLETHKGLFQTDSALMEDNRTRTMVEELASDEESFFQRWSESFVKLSMVGVRVGEDGEIRRSCSSVN

SEQ ID NO: 80953 - protein, 310 aa, Arabidopsis thaliana
  peptide (1)..(310): Ceres Seq. ID no. 12657868
MFLSSLLTSSANLSFNFYASSCSVAEFLVRNTVRSATSSDPTIPGKLLRLFFHDCFVQGCDASVLIQGNSTEKSDPGNASLGGFSVIDTAKNAIENLCPATVSCADIVALAARDAVEAAGGPVVEIPTGRRDGKESMAANVRPNIIDTDFTLDQMIDAFSSKGLSIQDLVVLSGAHTIGASHCNAFNGRFQRDSKGNFEVIDASLDNSYAETLMNKCSSSESSSLTVSNDPETSAVFDNQYYRNLETHKGLFQTDSALMEDNRTRTMVEELASDEESFFQRWSESFVKLSMVGVRVGEDGEIRRSCSSVN

SEQ ID NO: 80954 - protein, 174 aa, Arabidopsis thaliana
  peptide (1)..(174): Ceres Seq. ID no. 12657869
MAANVRPNIIDTDFTLDQMIDAFSSKGLSIQDLVVLSGAHTIGASHCNAFNGRFQRDSKGNFEVIDASLDNSYAETLMNKCSSSESSSLTVSNDPETSAVFDNQYYRNLETHKGLFQTDSALMEDNRTRTMVEELASDEESFFQRWSESFVKLSMVGVRVGEDGEIRRSCSSVN

SEQ ID NO: 80955 - DNA, 3339 bp, Arabidopsis thaliana
  misc_feature (1)..(3339): Ceres Seq. ID no. 12657885
  misc_feature (1)..(3339): Ortholog of  Ceres SEQ ID NO 13657677 as cited in SEQ ID NO 66119
atggtcgcgttactctgctctgcgagtttgtgtggtgatatatcagttggtgatgcttgtcttgttagtaacatcaaagcaaaatgtcgcgataatttggttactggaggattaaagttccacgctttgaagattgggtctcggaagaaacactggagaaggaagagtatgagatgtagtgtagtctccatgaaaagttctgacttttcgggttctatgataagaaagagctcaaaacctgatttgtcatcgagtgaagaagtaacgaggggtttaaagtcgtttcctgatactgattcttcattttcgtatttcaaatcagtggctgggaatttgaatttagttcacactactgagacttgtaactacatgcttgaagctttgagggttgatggtaaacttgaggaaatggcttatgtgtttgatttgatgcagaaaagaatcataaagagggatactaatacttacttgactatcttcaagagtctttctgtgaaaggtggattgaagcaagcaccttatgcacttcggaagatgagagaatttggttttgtgttgaatgcatattcatacaatgggttgattcatcttctgcttaagtctaggttttgcacagaggcaatggaggtttatagaagaatgatcttggaaggttttagacctagtttgcagacttactcttcacttatggtaggtttggggaaaagaagggatattgattctgtgatgggtttacttaaagagatggagactttggggttaaagccgaatgtttacacctttacgatatgtattcgggtgcttggtagggcagggaagattaatgaagcatatgaaatactgaagcggatggatgatgaaggatgtggacctgatgtagttacttacactgttcttattgatgctctgtgtactgctaggaagctcgattgtgcgaaggaggttttcgaaaagatgaaaacaggaagacacaaaccagatcgtgtaacttacattactttgctggacaggtttagtgataacagagatctggattcagtgaagcagttttggagtgaaatggagaaggatggtcatgtacctgatgttgtaacctttaccattctcgtggatgctctgtgcaaagctgggaattttggtgaagcatttgatacattggatgtgatgagggaccaaggtatcttaccgaaccttcatacatataacacattgatttgcggtcttctaagagtccaccggttggatgatgcacttgaactgtttggtaatatggagtctctgggcgtgaagcccactgcctatacgtacatagttttcattgattactatggaaagtctggagattccgtcagtgctcttgagacttttgagaagatgaaaaccaaaggaatagctccgaacattgtagcctgtaatgcgtctctctacagtctagctaaagcgggaagggaccgagaagcgaaacaaatcttctatggcttgaaagacataggactggtccctgattcagtaacttataacatgatgatgaagtgctacagtaaggttggggagatagatgaagccatcaagctgctttctgagatgatggagaatggttgtgaacctgatgttattgttgttaattctttgatcaatacactttacaaagctgatagagtagatgaggcgtggaagatgtttatgagaatgaaggaaatgaagctgaagcctacagttgtgacttacaacacattgctcgcaggtctaggcaaaaatggaaaaattcaagaggccattgagttgttcgaggggatggtgcagaaaggttgtccacctaacacaattactttcaacactctctttgattgcctttgcaaaaatgacgaggtgactctagccttgaagatgttgttcaagatgatggacatgggttgtgtcccagatgtttttacttacaatacgattatctttggtttggtgaagaatggtcaagtcaaagaggcaatgtgtttcttccaccagatgaagaaactggtttaccctgattttgttacactctgcactcttctcccaggtgttgtcaaggccagtttaatcgaagatgcttacaaaatcatcaccaactttctttacaattgtgcagaccaaccggctaatcttttctgggaagacttgataggctctatcttggctgaagctggaatagacaatgccgtttcattttctgagagattggtagctaatgggatttgtcgagatggtgactctatcctggtgccaataatcagatattcttgtaaacataataacgtctcaggtgctcgaactttattcgagaaattcacaaaagatcttggtgtccaacccaaactcccgacttataatctgctaatcggcgggcttcttgaagctgatatgattgaaatagcacaggacgtgttcctacaggtgaagagcactggttgcatcccagatgtggcgacctacaacttcttgcttgatgcttatggaaaatcaggaaaaatcgacgaactgtttgagctatacaaagaaatgtctacccatgagtgcgaagcaaacacaattactcacaacattgtcatctccgggcttgtgaaggcaggaaatgtggacgatgctcttgatttatactacgaccttatgagtgatcgggacttctccccaactgcctgcacgtatggtccccttatcgatggcctctctaagtcaggaagactatatgaagcaaaacaactctttgaaggaatgttggactacggttgcaggccaaactgtgctatctacaacattctcattaacgggtttggaaaagcaggtgaggctgatgcagcgtgtgcattgttcaaaaggatggtaaaagaaggagtaagaccggatctcaagacttactcggttctagtagattgcctttgtatggtcggaagagttgatgaaggcttgcattacttcaaggagctgaaggaatcaggcctcaatcccgatgtagtatgttacaatctcataatcaatggacttgggaaatctcatagacttgaagaagctcttgtgcttttcaacgagatgaagaccagcagaggaatcacccctgatctctacacttacaactccttgattctaaacttgggtatcgccgggatggtggaagaagctgggaagatttacaatgagattcaaagagcaggtcttgaaccgaatgtttttacatttaacgctctgatccgcggatacagtttgtctggaaaacctgagcacgcttacgctgtgtaccagacaatggtgaccggtggttttagccccaacacaggaacatacgaacagctccccaatagagcttga

SEQ ID NO: 80956 - protein, 1112 aa, Arabidopsis thaliana
  peptide (1)..(1112): Ceres Seq. ID no. 12657886
MVALLCSASLCGDISVGDACLVSNIKAKCRDNLVTGGLKFHALKIGSRKKHWRRKSMRCSVVSMKSSDFSGSMIRKSSKPDLSSSEEVTRGLKSFPDTDSSFSYFKSVAGNLNLVHTTETCNYMLEALRVDGKLEEMAYVFDLMQKRIIKRDTNTYLTIFKSLSVKGGLKQAPYALRKMREFGFVLNAYSYNGLIHLLLKSRFCTEAMEVYRRMILEGFRPSLQTYSSLMVGLGKRRDIDSVMGLLKEMETLGLKPNVYTFTICIRVLGRAGKINEAYEILKRMDDEGCGPDVVTYTVLIDALCTARKLDCAKEVFEKMKTGRHKPDRVTYITLLDRFSDNRDLDSVKQFWSEMEKDGHVPDVVTFTILVDALCKAGNFGEAFDTLDVMRDQGILPNLHTYNTLICGLLRVHRLDDALELFGNMESLGVKPTAYTYIVFIDYYGKSGDSVSALETFEKMKTKGIAPNIVACNASLYSLAKAGRDREAKQIFYGLKDIGLVPDSVTYNMMMKCYSKVGEIDEAIKLLSEMMENGCEPDVIVVNSLINTLYKADRVDEAWKMFMRMKEMKLKPTVVTYNTLLAGLGKNGKIQEAIELFEGMVQKGCPPNTITFNTLFDCLCKNDEVTLALKMLFKMMDMGCVPDVFTYNTIIFGLVKNGQVKEAMCFFHQMKKLVYPDFVTLCTLLPGVVKASLIEDAYKIITNFLYNCADQPANLFWEDLIGSILAEAGIDNAVSFSERLVANGICRDGDSILVPIIRYSCKHNNVSGARTLFEKFTKDLGVQPKLPTYNLLIGGLLEADMIEIAQDVFLQVKSTGCIPDVATYNFLLDAYGKSGKIDELFELYKEMSTHECEANTITHNIVISGLVKAGNVDDALDLYYDLMSDRDFSPTACTYGPLIDGLSKSGRLYEAKQLFEGMLDYGCRPNCAIYNILINGFGKAGEADAACALFKRMVKEGVRPDLKTYSVLVDCLCMVGRVDEGLHYFKELKESGLNPDVVCYNLIINGLGKSHRLEEALVLFNEMKTSRGITPDLYTYNSLILNLGIAGMVEEAGKIYNEIQRAGLEPNVFTFNALIRGYSLSGKPEHAYAVYQTMVTGGFSPNTGTYEQLPNRA

SEQ ID NO: 80957 - protein, 1056 aa, Arabidopsis thaliana
  peptide (1)..(1056): Ceres Seq. ID no. 12657887
MRCSVVSMKSSDFSGSMIRKSSKPDLSSSEEVTRGLKSFPDTDSSFSYFKSVAGNLNLVHTTETCNYMLEALRVDGKLEEMAYVFDLMQKRIIKRDTNTYLTIFKSLSVKGGLKQAPYALRKMREFGFVLNAYSYNGLIHLLLKSRFCTEAMEVYRRMILEGFRPSLQTYSSLMVGLGKRRDIDSVMGLLKEMETLGLKPNVYTFTICIRVLGRAGKINEAYEILKRMDDEGCGPDVVTYTVLIDALCTARKLDCAKEVFEKMKTGRHKPDRVTYITLLDRFSDNRDLDSVKQFWSEMEKDGHVPDVVTFTILVDALCKAGNFGEAFDTLDVMRDQGILPNLHTYNTLICGLLRVHRLDDALELFGNMESLGVKPTAYTYIVFIDYYGKSGDSVSALETFEKMKTKGIAPNIVACNASLYSLAKAGRDREAKQIFYGLKDIGLVPDSVTYNMMMKCYSKVGEIDEAIKLLSEMMENGCEPDVIVVNSLINTLYKADRVDEAWKMFMRMKEMKLKPTVVTYNTLLAGLGKNGKIQEAIELFEGMVQKGCPPNTITFNTLFDCLCKNDEVTLALKMLFKMMDMGCVPDVFTYNTIIFGLVKNGQVKEAMCFFHQMKKLVYPDFVTLCTLLPGVVKASLIEDAYKIITNFLYNCADQPANLFWEDLIGSILAEAGIDNAVSFSERLVANGICRDGDSILVPIIRYSCKHNNVSGARTLFEKFTKDLGVQPKLPTYNLLIGGLLEADMIEIAQDVFLQVKSTGCIPDVATYNFLLDAYGKSGKIDELFELYKEMSTHECEANTITHNIVISGLVKAGNVDDALDLYYDLMSDRDFSPTACTYGPLIDGLSKSGRLYEAKQLFEGMLDYGCRPNCAIYNILINGFGKAGEADAACALFKRMVKEGVRPDLKTYSVLVDCLCMVGRVDEGLHYFKELKESGLNPDVVCYNLIINGLGKSHRLEEALVLFNEMKTSRGITPDLYTYNSLILNLGIAGMVEEAGKIYNEIQRAGLEPNVFTFNALIRGYSLSGKPEHAYAVYQTMVTGGFSPNTGTYEQLPNRA

SEQ ID NO: 80958 - protein, 1049 aa, Arabidopsis thaliana
  peptide (1)..(1049): Ceres Seq. ID no. 12657888
MKSSDFSGSMIRKSSKPDLSSSEEVTRGLKSFPDTDSSFSYFKSVAGNLNLVHTTETCNYMLEALRVDGKLEEMAYVFDLMQKRIIKRDTNTYLTIFKSLSVKGGLKQAPYALRKMREFGFVLNAYSYNGLIHLLLKSRFCTEAMEVYRRMILEGFRPSLQTYSSLMVGLGKRRDIDSVMGLLKEMETLGLKPNVYTFTICIRVLGRAGKINEAYEILKRMDDEGCGPDVVTYTVLIDALCTARKLDCAKEVFEKMKTGRHKPDRVTYITLLDRFSDNRDLDSVKQFWSEMEKDGHVPDVVTFTILVDALCKAGNFGEAFDTLDVMRDQGILPNLHTYNTLICGLLRVHRLDDALELFGNMESLGVKPTAYTYIVFIDYYGKSGDSVSALETFEKMKTKGIAPNIVACNASLYSLAKAGRDREAKQIFYGLKDIGLVPDSVTYNMMMKCYSKVGEIDEAIKLLSEMMENGCEPDVIVVNSLINTLYKADRVDEAWKMFMRMKEMKLKPTVVTYNTLLAGLGKNGKIQEAIELFEGMVQKGCPPNTITFNTLFDCLCKNDEVTLALKMLFKMMDMGCVPDVFTYNTIIFGLVKNGQVKEAMCFFHQMKKLVYPDFVTLCTLLPGVVKASLIEDAYKIITNFLYNCADQPANLFWEDLIGSILAEAGIDNAVSFSERLVANGICRDGDSILVPIIRYSCKHNNVSGARTLFEKFTKDLGVQPKLPTYNLLIGGLLEADMIEIAQDVFLQVKSTGCIPDVATYNFLLDAYGKSGKIDELFELYKEMSTHECEANTITHNIVISGLVKAGNVDDALDLYYDLMSDRDFSPTACTYGPLIDGLSKSGRLYEAKQLFEGMLDYGCRPNCAIYNILINGFGKAGEADAACALFKRMVKEGVRPDLKTYSVLVDCLCMVGRVDEGLHYFKELKESGLNPDVVCYNLIINGLGKSHRLEEALVLFNEMKTSRGITPDLYTYNSLILNLGIAGMVEEAGKIYNEIQRAGLEPNVFTFNALIRGYSLSGKPEHAYAVYQTMVTGGFSPNTGTYEQLPNRA

SEQ ID NO: 80959 - DNA, 702 bp, Arabidopsis thaliana
  misc_feature (1)..(702): Ceres Seq. ID no. 12657889
  misc_feature (1)..(702): Ortholog of  Ceres SEQ ID NO 13599287 as cited in SEQ ID NO 338
  misc_feature (1)..(702): Ortholog of  Ceres SEQ ID NO 15172934 as cited in SEQ ID NO 51783
  misc_feature (1)..(702): Ortholog of  Ceres SEQ ID NO 14314817 as cited in SEQ ID NO 52571
  misc_feature (1)..(702): Ortholog of  Ceres SEQ ID NO 15174056 as cited in SEQ ID NO 0
atggctttctcttacgcatcattctctacacccttcaatggtttcgctgcaaatccgtctccgattacttccgcttttctcggcccatcattgagattctccaccagaacatcaaaaactcggaatccgagtaatggggtttcagtgaaatcgtcaaatagtcataggtttctagtcaaatctaaaaatttcagtgtctatgcaagggctgcagcagagaagtctgttcacgatttcactgtaaaggacatcgatggtaatgatgtttctctggacaaattcaaaggaaaacctttgttgatcgttaacgttgcgtcaagatgtggtttgacatcatcaaattactcagagctttctcaactgtacgaaaaatacaagaaccaaggatttgagattcttgctttcccttgcaatcaatttggaggtcaagaacccggttcaaaccctgagatcaagcaatttgcttgcacccggttcaaagcagagttccctatattcgacaaggttgatgtgaatggaccaagcacagctccaatctacaagttcttgaaatccaatgctggtggtttccttggtgatatcatcaaatggaactttgagaaattcttggttgataaaaagggcaaagttgtcgagagataccctcccacaacttctcctttccaaatcgagaaggacatccagaagttgcttgcggcttaa

SEQ ID NO: 80960 - protein, 233 aa, Arabidopsis thaliana
  peptide (1)..(233): Ceres Seq. ID no. 12657890
MAFSYASFSTPFNGFAANPSPITSAFLGPSLRFSTRTSKTRNPSNGVSVKSSNSHRFLVKSKNFSVYARAAAEKSVHDFTVKDIDGNDVSLDKFKGKPLLIVNVASRCGLTSSNYSELSQLYEKYKNQGFEILAFPCNQFGGQEPGSNPEIKQFACTRFKAEFPIFDKVDVNGPSTAPIYKFLKSNAGGFLGDIIKWNFEKFLVDKKGKVVERYPPTTSPFQIEKDIQKLLAA

SEQ ID NO: 80961 - DNA, 1821 bp, Arabidopsis thaliana
  misc_feature (1)..(1821): Ceres Seq. ID no. 12657899
  misc_feature (1)..(1821): Ortholog of  Ceres SEQ ID NO 15227091 as cited in SEQ ID NO 60294
  misc_feature (1)..(1821): Ortholog of  Ceres SEQ ID NO 13502874 as cited in SEQ ID NO 66298
  misc_feature (1)..(1821): Ortholog of  Ceres SEQ ID NO 12614124 as cited in SEQ ID NO 68392
attcaaacaagaaatcaccaaacacacatctcttctgcactctcaaaacactatggatacttccctcttttctttgtttgttccaatccttgttttcgtttttatcgctcttttcaagaaatcaaagaaaccaaaatatgtaaaagctcctgcaccaagtggtgcatggcccatcatcggccatcttcaccttctcggtggcaaggaacagcttctctaccgaaccttaggaaaaatggctgaccactacggtccagccatgtcgctacaacttgggagcaatgaagcatttgttgtgagcagttttgaggtggctaaagattgttttactgtgaacgacaaggccttggcttcacgtcctatgactgcagctgcaaagcacatgggttacaattttgctgttttcgggtttgccccttatagcgctttctggcgtgagatgcgtaaaatcgcaaccatcgagcttctttctaaccggcggcttcagatgctcaagcacgttcgtgtttctgagatcacaatgggtgtgaaagatttgtattccttgtggttcaagaatggcggtacaaaaccagtaatggttgatctaaagagctggttagaggacatgactctgaacatgatcgtgagaatggtggcaggaaaacgatactttggaggcggaggctcagtatcgtcggaggatactgaagaggcaatgcaatgcaaaaaggccatcgcaaagttctttcacctcatcggtatattcactgtgtcagatgcttttccgacactaagtttttttgatttgcaaggacatgagaaggagatgaagcaaacgggaagcgaattagatgtgatccttgaaagatggattgaaaaccatcgacaacaacgcaaattttcaggaacgaaagagaatgattcagacttcatcgacgttatgatgtcgcttgcggaacaaggaaaactctcgcatctccagtatgatgcaaatactagcatcaaatctacctgcctggcactgattcttggaggaagtgacacttcagcatcaacccttacatgggccatttctcttcttctaaacaataaagaaatgttaaagaaagcacaagatgagatcgacatccacgtcggcagagacaggaacgtcgaggattcagacatagaaaatttggtgtatcttcaagcaattatcaaagaaacattgagattgtatccagctggtcctctcttaggccctcgagaggcgatggaagattgcacggtcgctggttactacgttccgtgcggcacaagactcatagtgaacgtatggaaaatccaaagagatccgaaagtttatatggaaccaaacgagttcagaccagagaggttcattacaggagaagcaaaagagtttgatgtgagaggacaaaactttgagctgatgccatttggttcaggaagaagatcatgcccaggctcttcattggccatgcaagtgcttcatttaggtcttgctcgtttccttcattcatttgacgtgaaaactgttatggatatgcctgttgatatgagtgagaaccctggcttaaccattcctaaagccacgcctcttgaggttctgatcagtccacgtattaaggaagaactttttgtgtgattaactattccagaaacatataacttcaatacggttattgaaggtgcattttgatgtgtgtgtgtttttcttttgttgaataaaacctacgtttgtttgttttctctttaaaataaactagattcaaaccgcacatttgtgcggtattatgttcgtaaacgtatttgtttaatatagtatttatattttgaact

SEQ ID NO: 80962 - protein, 541 aa, Arabidopsis thaliana
  peptide (1)..(541): Ceres Seq. ID no. 12657900
FKQEITKHTSLLHSQNTMDTSLFSLFVPILVFVFIALFKKSKKPKYVKAPAPSGAWPIIGHLHLLGGKEQLLYRTLGKMADHYGPAMSLQLGSNEAFVVSSFEVAKDCFTVNDKALASRPMTAAAKHMGYNFAVFGFAPYSAFWREMRKIATIELLSNRRLQMLKHVRVSEITMGVKDLYSLWFKNGGTKPVMVDLKSWLEDMTLNMIVRMVAGKRYFGGGGSVSSEDTEEAMQCKKAIAKFFHLIGIFTVSDAFPTLSFFDLQGHEKEMKQTGSELDVILERWIENHRQQRKFSGTKENDSDFIDVMMSLAEQGKLSHLQYDANTSIKSTCLALILGGSDTSASTLTWAISLLLNNKEMLKKAQDEIDIHVGRDRNVEDSDIENLVYLQAIIKETLRLYPAGPLLGPREAMEDCTVAGYYVPCGTRLIVNVWKIQRDPKVYMEPNEFRPERFITGEAKEFDVRGQNFELMPFGSGRRSCPGSSLAMQVLHLGLARFLHSFDVKTVMDMPVDMSENPGLTIPKATPLEVLISPRIKEELFV

SEQ ID NO: 80963 - protein, 524 aa, Arabidopsis thaliana
  peptide (1)..(524): Ceres Seq. ID no. 12657901
MDTSLFSLFVPILVFVFIALFKKSKKPKYVKAPAPSGAWPIIGHLHLLGGKEQLLYRTLGKMADHYGPAMSLQLGSNEAFVVSSFEVAKDCFTVNDKALASRPMTAAAKHMGYNFAVFGFAPYSAFWREMRKIATIELLSNRRLQMLKHVRVSEITMGVKDLYSLWFKNGGTKPVMVDLKSWLEDMTLNMIVRMVAGKRYFGGGGSVSSEDTEEAMQCKKAIAKFFHLIGIFTVSDAFPTLSFFDLQGHEKEMKQTGSELDVILERWIENHRQQRKFSGTKENDSDFIDVMMSLAEQGKLSHLQYDANTSIKSTCLALILGGSDTSASTLTWAISLLLNNKEMLKKAQDEIDIHVGRDRNVEDSDIENLVYLQAIIKETLRLYPAGPLLGPREAMEDCTVAGYYVPCGTRLIVNVWKIQRDPKVYMEPNEFRPERFITGEAKEFDVRGQNFELMPFGSGRRSCPGSSLAMQVLHLGLARFLHSFDVKTVMDMPVDMSENPGLTIPKATPLEVLISPRIKEELFV

SEQ ID NO: 80964 - protein, 463 aa, Arabidopsis thaliana
  peptide (1)..(463): Ceres Seq. ID no. 12657902
MADHYGPAMSLQLGSNEAFVVSSFEVAKDCFTVNDKALASRPMTAAAKHMGYNFAVFGFAPYSAFWREMRKIATIELLSNRRLQMLKHVRVSEITMGVKDLYSLWFKNGGTKPVMVDLKSWLEDMTLNMIVRMVAGKRYFGGGGSVSSEDTEEAMQCKKAIAKFFHLIGIFTVSDAFPTLSFFDLQGHEKEMKQTGSELDVILERWIENHRQQRKFSGTKENDSDFIDVMMSLAEQGKLSHLQYDANTSIKSTCLALILGGSDTSASTLTWAISLLLNNKEMLKKAQDEIDIHVGRDRNVEDSDIENLVYLQAIIKETLRLYPAGPLLGPREAMEDCTVAGYYVPCGTRLIVNVWKIQRDPKVYMEPNEFRPERFITGEAKEFDVRGQNFELMPFGSGRRSCPGSSLAMQVLHLGLARFLHSFDVKTVMDMPVDMSENPGLTIPKATPLEVLISPRIKEELFV

SEQ ID NO: 80965 - DNA, 1569 bp, Arabidopsis thaliana
  misc_feature (1)..(1569): Ceres Seq. ID no. 12657903
  misc_feature (1)..(1569): Ortholog of  Ceres SEQ ID NO 15227091 as cited in SEQ ID NO 60294
  misc_feature (1)..(1569): Ortholog of  Ceres SEQ ID NO 13502874 as cited in SEQ ID NO 66298
  misc_feature (1)..(1569): Ortholog of  Ceres SEQ ID NO 12614124 as cited in SEQ ID NO 68392
atggatacttccctcttttctttatttgtttcaatccttgttttcgtttttatcgctcttttcaagaaatcaaagaaaccaaaatatgtaaaagctcctgcaccaagtggtgcatggcccatcattggtcatctccaccttctcggtggcaaggaacagcttctttaccgaaccttaggaaaaatggctgaccactacggtccagccatgtcgctacgacttgggagcagtgaaacatttgttgggagcagttttgaggtggctaaagattgttttactgtgaacgacaaagccttggcttctcttatgactgcagccgcaaagcacatgggttacgttttctggctcgagatgcgtaaaatcgcaatgatcgagctcctttctaaccggcgccttcagatgctcaacaacgttcgtgtttctgagatctcaatgggtgtgaaagatttgtattccttatgggtcaagaaaggtggttcagaaccagtaatggttgatctaaagagctggttagaggacatgattgcgaacatgatcatgagaatggtggccggaaagcgatactttggaggcggcggcgcagaatcctcggaacataccgaagaggcaaggcaatggagaaagggcatcgcgaaattctttcacctcgtcggtatattcaccgtgtctgatgcttttccgaaactagggtggcttgatttgcaaggacatgagaaggagatgaagcagacaagaagagagttagatgtgatccttgaaagatggattgaaaaccatcgacaacaacgcaaagtttcaggaacgaaacacaatgattcagacttcgtcgacgttatgttgtcgcttgcagaacaaggcaaactctcgcatcttcaatacgatgccaatacgtgcatcaaaactacctgcctggcactaattcttggaggaagtgagacttcaccatcaacccttacatgggccatttctcttcttctaaacaataaggacatgttaaagaaagtacaagatgagatagacatccacgtcggcagagacaggaacgttgaggattcagacataaaaaatctggtatatcttcaagcgattatcaaagaaacattgagattgtatccagctgctcctctcttaggccatcgagaggcgatggaagattgcacggtcgcaggttacaacgttccgtgcggcacaagactcatagtgaacgtatggaaaatccaaagagatccgaaagtttatatggaaccaaacgagttcagaccagagaggtttatcacaggagaagcaaaagattttgatgttagaggacaaaactttgagctgatgccatttggttcgggaagaagatcatgcccaggcccttcattggccatgcaaatgcttcatttaggtcttgctcgtttccttcattcatttgaagtgaaaactgtattggataggcctgttgacatgagtgagagccctggcttaaccattactaaagctacgcctcttgaggttctgatcaatccacgtcttaagagagagctttttgtgtgattatctattacagaaacatttgacttcaat

SEQ ID NO: 80966 - protein, 512 aa, Arabidopsis thaliana
  peptide (1)..(512): Ceres Seq. ID no. 12657904
MDTSLFSLFVSILVFVFIALFKKSKKPKYVKAPAPSGAWPIIGHLHLLGGKEQLLYRTLGKMADHYGPAMSLRLGSSETFVGSSFEVAKDCFTVNDKALASLMTAAAKHMGYVFWLEMRKIAMIELLSNRRLQMLNNVRVSEISMGVKDLYSLWVKKGGSEPVMVDLKSWLEDMIANMIMRMVAGKRYFGGGGAESSEHTEEARQWRKGIAKFFHLVGIFTVSDAFPKLGWLDLQGHEKEMKQTRRELDVILERWIENHRQQRKVSGTKHNDSDFVDVMLSLAEQGKLSHLQYDANTCIKTTCLALILGGSETSPSTLTWAISLLLNNKDMLKKVQDEIDIHVGRDRNVEDSDIKNLVYLQAIIKETLRLYPAAPLLGHREAMEDCTVAGYNVPCGTRLIVNVWKIQRDPKVYMEPNEFRPERFITGEAKDFDVRGQNFELMPFGSGRRSCPGPSLAMQMLHLGLARFLHSFEVKTVLDRPVDMSESPGLTITKATPLEVLINPRLKRELFV

SEQ ID NO: 80967 - protein, 451 aa, Arabidopsis thaliana
  peptide (1)..(451): Ceres Seq. ID no. 12657905
MADHYGPAMSLRLGSSETFVGSSFEVAKDCFTVNDKALASLMTAAAKHMGYVFWLEMRKIAMIELLSNRRLQMLNNVRVSEISMGVKDLYSLWVKKGGSEPVMVDLKSWLEDMIANMIMRMVAGKRYFGGGGAESSEHTEEARQWRKGIAKFFHLVGIFTVSDAFPKLGWLDLQGHEKEMKQTRRELDVILERWIENHRQQRKVSGTKHNDSDFVDVMLSLAEQGKLSHLQYDANTCIKTTCLALILGGSETSPSTLTWAISLLLNNKDMLKKVQDEIDIHVGRDRNVEDSDIKNLVYLQAIIKETLRLYPAAPLLGHREAMEDCTVAGYNVPCGTRLIVNVWKIQRDPKVYMEPNEFRPERFITGEAKDFDVRGQNFELMPFGSGRRSCPGPSLAMQMLHLGLARFLHSFEVKTVLDRPVDMSESPGLTITKATPLEVLINPRLKRELFV

SEQ ID NO: 80968 - protein, 443 aa, Arabidopsis thaliana
  peptide (1)..(443): Ceres Seq. ID no. 12657906
MSLRLGSSETFVGSSFEVAKDCFTVNDKALASLMTAAAKHMGYVFWLEMRKIAMIELLSNRRLQMLNNVRVSEISMGVKDLYSLWVKKGGSEPVMVDLKSWLEDMIANMIMRMVAGKRYFGGGGAESSEHTEEARQWRKGIAKFFHLVGIFTVSDAFPKLGWLDLQGHEKEMKQTRRELDVILERWIENHRQQRKVSGTKHNDSDFVDVMLSLAEQGKLSHLQYDANTCIKTTCLALILGGSETSPSTLTWAISLLLNNKDMLKKVQDEIDIHVGRDRNVEDSDIKNLVYLQAIIKETLRLYPAAPLLGHREAMEDCTVAGYNVPCGTRLIVNVWKIQRDPKVYMEPNEFRPERFITGEAKDFDVRGQNFELMPFGSGRRSCPGPSLAMQMLHLGLARFLHSFEVKTVLDRPVDMSESPGLTITKATPLEVLINPRLKRELFV

SEQ ID NO: 80969 - DNA, 1086 bp, Arabidopsis thaliana
  misc_feature (1)..(1086): Ceres Seq. ID no. 12657907
  misc_feature (1)..(1086): Ortholog of  Ceres SEQ ID NO 13662367 as cited in SEQ ID NO 67774
atggctcaaatgtcgatgaccgtcgagaagagtatcaaagctgacgtgacggtgagccatgaccgtgtgaaaagggcttacgtcactttccttgctggaaacaaagactactggatgggtgtagttggtctagccaagggacttcgtaaggtgaaatctgcttatcctcttgtggttgcgattctcccggacgtgcctgaggaacaccgtcaaatcctgttggctcagggatgcatcatccgtgagattgaaccggtttatccaccggaaaacaaaaccggttattcaatggcctattacgttatcaactactccaagcttcgtatttgggaggtaaaaaactttcttactatatgtctatatttgtgtttattcatcatccgatcgcatcgtttattttttgttaattttgtggagtatgaaaagatgatttatctagatggagacattcaagtatttagtaacatcgatcatcttttcgatactcctcgtggctacttgtacgctgtcaaagattgcttttgcgagatttcttggtccaaaactcctcaatttaagataggttactgccaacaatgtcctgaaaaggtgacatggcctgttgaaagtcttggttctccaccgccggtatatttcaacgccggtatgttggtttttgaacctaatctcctcacttacgaggatctccttcgtgttgttcaaatcaccactccgacatattttgccgaacaggattttctgaatgaatactttacagacatttacaagcccatcccttcgacctacaaccttgtaatggctatgctttggcgtcatcctgaacacattgaccttgaccaaatcagtgttattcattattgtgcaaatggttcgaagccttggagattcgatgaaactgaagagcatatggatcgtgaggacataaaaatgttggtgaagaaatggtgggatatttatgaagattcgagtttagattacaagaactttgtcgagactgagtccaaactgagtccgatcaatgcaaccttggcttccaaggaatctgttggcgatgtccttattagtcttgccccttccgctgcataa

SEQ ID NO: 80970 - protein, 361 aa, Arabidopsis thaliana
  peptide (1)..(361): Ceres Seq. ID no. 12657908
MAQMSMTVEKSIKADVTVSHDRVKRAYVTFLAGNKDYWMGVVGLAKGLRKVKSAYPLVVAILPDVPEEHRQILLAQGCIIREIEPVYPPENKTGYSMAYYVINYSKLRIWEVKNFLTICLYLCLFIIRSHRLFFVNFVEYEKMIYLDGDIQVFSNIDHLFDTPRGYLYAVKDCFCEISWSKTPQFKIGYCQQCPEKVTWPVESLGSPPPVYFNAGMLVFEPNLLTYEDLLRVVQITTPTYFAEQDFLNEYFTDIYKPIPSTYNLVMAMLWRHPEHIDLDQISVIHYCANGSKPWRFDETEEHMDREDIKMLVKKWWDIYEDSSLDYKNFVETESKLSPINATLASKESVGDVLISLAPSAA

SEQ ID NO: 80971 - protein, 358 aa, Arabidopsis thaliana
  peptide (1)..(358): Ceres Seq. ID no. 12657909
MSMTVEKSIKADVTVSHDRVKRAYVTFLAGNKDYWMGVVGLAKGLRKVKSAYPLVVAILPDVPEEHRQILLAQGCIIREIEPVYPPENKTGYSMAYYVINYSKLRIWEVKNFLTICLYLCLFIIRSHRLFFVNFVEYEKMIYLDGDIQVFSNIDHLFDTPRGYLYAVKDCFCEISWSKTPQFKIGYCQQCPEKVTWPVESLGSPPPVYFNAGMLVFEPNLLTYEDLLRVVQITTPTYFAEQDFLNEYFTDIYKPIPSTYNLVMAMLWRHPEHIDLDQISVIHYCANGSKPWRFDETEEHMDREDIKMLVKKWWDIYEDSSLDYKNFVETESKLSPINATLASKESVGDVLISLAPSAA

SEQ ID NO: 80972 - protein, 356 aa, Arabidopsis thaliana
  peptide (1)..(356): Ceres Seq. ID no. 12657910
MTVEKSIKADVTVSHDRVKRAYVTFLAGNKDYWMGVVGLAKGLRKVKSAYPLVVAILPDVPEEHRQILLAQGCIIREIEPVYPPENKTGYSMAYYVINYSKLRIWEVKNFLTICLYLCLFIIRSHRLFFVNFVEYEKMIYLDGDIQVFSNIDHLFDTPRGYLYAVKDCFCEISWSKTPQFKIGYCQQCPEKVTWPVESLGSPPPVYFNAGMLVFEPNLLTYEDLLRVVQITTPTYFAEQDFLNEYFTDIYKPIPSTYNLVMAMLWRHPEHIDLDQISVIHYCANGSKPWRFDETEEHMDREDIKMLVKKWWDIYEDSSLDYKNFVETESKLSPINATLASKESVGDVLISLAPSAA

SEQ ID NO: 80973 - DNA, 1058 bp, Arabidopsis thaliana
  misc_feature (1)..(1058): Ceres Seq. ID no. 12657971
  misc_feature (1)..(1058): Ortholog of  Ceres SEQ ID NO 15169809 as cited in SEQ ID NO 52839
  misc_feature (1)..(1058): Ortholog of  Ceres SEQ ID NO 15224302 as cited in SEQ ID NO 53942
atagaaaatcgtgtcgaccttttttctctcacttacccaataagagcttttttcgcgttttccaccgcaaccaccgtcaccttcaaccgccggagccgccgcaaggaaggctcatcatccgccgtggcaattttttgaggtgtacaaagcattgcctatttgacgaaccaggaaatggttaaaaggcatggagagttttgatttacaagatatatcatgtcgcagtgcatagacggtttcaagcatgtatgctcctcttttttccggtgttttgatatcgatatttacaaacaatctggaggccttggtgaccctgaacttcttgcgagagagacagtttttagcgtgagtgaaatagaggctctctatgagctgtttaagaaaatcagcagtgctgtgattgatgatgggctaataaacaaggaagaatttcagttagccttgttcaagacaaataaaaaagagagcttgtttgcagaccgggtattcgatttgtttgacacaaagcataatggaatactggggtttgaggagtttgcgcgtgctctctctgtctttcatccaaatgctcccatagaagacaagattgacttttcgtttcagctatatgatcttaagcagcaaggtttcatagagaggcaagaggtgaagcaaatggtggtggctactcttgctgagtccggcatgaacctgtcagacgaaatcatagagagtataatcgacaagacatttgaggaagctgatacaaaacatgacgggaggatcgataaggaagagtggagaacccttgttctcaggcatccttcccttctaaagaatatgactctccagtatcttaaggatataacaactacatttccgagctttgtgttccactcgcaggtggaagatacctgagaaaaacaatagcatattagcagaggagacaatttgggaattgtgtttgttttctgattatgtatcatgtctatttgtttcaatctctctgaacattttcaagattttgttgttacttgtgtgaattaaaagtaaagaaaacaaatctgtatttttgctac

SEQ ID NO: 80974 - protein, 226 aa, Arabidopsis thaliana
  peptide (1)..(226): Ceres Seq. ID no. 12657972
MSQCIDGFKHVCSSFFRCFDIDIYKQSGGLGDPELLARETVFSVSEIEALYELFKKISSAVIDDGLINKEEFQLALFKTNKKESLFADRVFDLFDTKHNGILGFEEFARALSVFHPNAPIEDKIDFSFQLYDLKQQGFIERQEVKQMVVATLAESGMNLSDEIIESIIDKTFEEADTKHDGRIDKEEWRTLVLRHPSLLKNMTLQYLKDITTTFPSFVFHSQVEDT

SEQ ID NO: 80975 - DNA, 2628 bp, Arabidopsis thaliana
  misc_feature (1)..(2628): Ceres Seq. ID no. 12657973
  misc_feature (1)..(2628): Ortholog of  Ceres SEQ ID NO 13647621 as cited in SEQ ID NO 159
  misc_feature (1)..(2628): Ortholog of  Ceres SEQ ID NO 14306279 as cited in SEQ ID NO 56860
aatactagtacatcctctcaaacatcttaactaaaacagaggtctaactttttcctttttcctggaaaaattgcagagaaaatttatttttaatgtcaggtcattaacacaggttgcttacaagaacattacttctacagcaagttattcagaactctggacattatcacccgagtcgatcgacgtcagggccgcctaacagaaaatggtaggctctctcgaagtatccaagcctccagagcacaaggttgagtccaagatcgtcatagccgatgaagaagaagaggatgaaaacgacagtccaatcgaagaggtccgtttaaccgtaccgataaccgacgatccatctctaccagttttgacattccgtacatggttcttaggaatggtttcttgcgtggtactcgcgttcgtgaacaatttcttcggttaccggtcgaacccgctcacggtatcttcagtcgtggctcagatcatcactctccctctaggaaagctcatggccacgactctaccaacaacaaaactccgtttacctggtacaaattggtcgtgttcgttgaaccctggaccattcaacatgaaggaacatgtactgatcactatattcgctaataccggagctggaggagcttatgccaccagcatcctaaccatcgttaaagcattttatcaccggaatctcaatcccgccgccgccatgttgcttgtccaaaccactcagttgttgggatatggatgggcgggtatgttcaggaaatacctagtggactcaccttacatgtggtggcctgcaaatcttgttcaagtctctctctttagagccttacatgagaaggaggagaagcgtgaaggaaaacaaacgaaacttagattcttcttgatagtcttcttcctgagcttcacttactacatagtcccaggctatcttttcccttccatctcatatctctcctttgtctgctggatatggacccgctctgtaaccgctcaacagatcggttcagggctgcacggtctcggcattggctcatttggtcttgattggtccacggttgcaggtttcttaggcagtcctttagctgtaccgttcttcgctatagccaattcctttggcggatttatcatcttcttctacatcatccttcctatcttctactggagcaacgcttacgaggcaaagaagtttcctttctatacctctcacccatttgatcacactggtcagcgttacaacaccactcgtatcctcaaccagaaaacattcaatattgatcttcctgcttacgaaagctatagcaagctttaccttagcattctgtttgctctgatctatgggctcagcttcggtacccttaccgcaaccatttctcatgtcgccctctttgacggaaagtttatctgggagctgtggaagaaggcaacattgacgacaaaggacaagtttggagatgtgcatacaagattgatgaagaagaattataaggaagtacctcaatggtggttcgttgcggttctcgctgcttcctttgtgctagctctttatgcatgtgagggatttggcaaacagcttcagctcccatggtggggacttttactcgcttgtgccatcgcctttaccttcactttgcctattggagttatcctagcgaccacaaaccagcgaatgggtcttaatgttatatcggaactgatcatcgggttcttgtatccgggaaagccacttgccaatgtggcttttaagacttatggttctgtgagtatagctcaagccttgtactttgtcggagacttcaaacttggccactacatgaagattcctccgagatctatgttcatcgttcaactcgttgcgactattgttgcttcaactgtctccttcgggaccacatggtggttgctttcttcagtcgagaacatctgtaacacagatatgctcccaaagagtagtccgtggacttgccctggggatgtagtgttctacaacgcgtcgatcatttggggaatcatcggtcctggaaggatgttcacaagtaaaggtatataccccgggatgaactggttcttcctcattggcttccttgctcctgtcccggtctggttctttgcaaggaaattcccggagaagaagtggatacatcagattcatattcccttgatcttctcaggggctaatgtgatgccaatggccaaggctgtgcattactggtcgtggttcgctgttgggatcgtgttcaactactatatcttcaggaggtacaagggatggtgggcaaggcataactacatcctctctgcagctcttgatgcaggcactgcggttatgggagtgttgatctactttgcgttacagaacaataacataagcttaccagattggtgggggaatgagaacacagaccattgccctttggcaaattgcccaacagagaaagggatcgtcgctaagggctgcccggtgttctaaaaccttgttgcagtttaacattatctctgtagtttctcatacctgcaggtgagggacagttactgcaaagtcgtttggtggccataataataataatgcgtaaagactttgtgagagtttaagtgataaagtaaaaaatggtttgcaaattaagaacaccc

SEQ ID NO: 80976 - protein, 753 aa, Arabidopsis thaliana
  peptide (1)..(753): Ceres Seq. ID no. 12657974
MVGSLEVSKPPEHKVESKIVIADEEEEDENDSPIEEVRLTVPITDDPSLPVLTFRTWFLGMVSCVVLAFVNNFFGYRSNPLTVSSVVAQIITLPLGKLMATTLPTTKLRLPGTNWSCSLNPGPFNMKEHVLITIFANTGAGGAYATSILTIVKAFYHRNLNPAAAMLLVQTTQLLGYGWAGMFRKYLVDSPYMWWPANLVQVSLFRALHEKEEKREGKQTKLRFFLIVFFLSFTYYIVPGYLFPSISYLSFVCWIWTRSVTAQQIGSGLHGLGIGSFGLDWSTVAGFLGSPLAVPFFAIANSFGGFIIFFYIILPIFYWSNAYEAKKFPFYTSHPFDHTGQRYNTTRILNQKTFNIDLPAYESYSKLYLSILFALIYGLSFGTLTATISHVALFDGKFIWELWKKATLTTKDKFGDVHTRLMKKNYKEVPQWWFVAVLAASFVLALYACEGFGKQLQLPWWGLLLACAIAFTFTLPIGVILATTNQRMGLNVISELIIGFLYPGKPLANVAFKTYGSVSIAQALYFVGDFKLGHYMKIPPRSMFIVQLVATIVASTVSFGTTWWLLSSVENICNTDMLPKSSPWTCPGDVVFYNASIIWGIIGPGRMFTSKGIYPGMNWFFLIGFLAPVPVWFFARKFPEKKWIHQIHIPLIFSGANVMPMAKAVHYWSWFAVGIVFNYYIFRRYKGWWARHNYILSAALDAGTAVMGVLIYFALQNNNISLPDWWGNENTDHCPLANCPTEKGIVAKGCPVF

SEQ ID NO: 80977 - protein, 693 aa, Arabidopsis thaliana
  peptide (1)..(693): Ceres Seq. ID no. 12657975
MVSCVVLAFVNNFFGYRSNPLTVSSVVAQIITLPLGKLMATTLPTTKLRLPGTNWSCSLNPGPFNMKEHVLITIFANTGAGGAYATSILTIVKAFYHRNLNPAAAMLLVQTTQLLGYGWAGMFRKYLVDSPYMWWPANLVQVSLFRALHEKEEKREGKQTKLRFFLIVFFLSFTYYIVPGYLFPSISYLSFVCWIWTRSVTAQQIGSGLHGLGIGSFGLDWSTVAGFLGSPLAVPFFAIANSFGGFIIFFYIILPIFYWSNAYEAKKFPFYTSHPFDHTGQRYNTTRILNQKTFNIDLPAYESYSKLYLSILFALIYGLSFGTLTATISHVALFDGKFIWELWKKATLTTKDKFGDVHTRLMKKNYKEVPQWWFVAVLAASFVLALYACEGFGKQLQLPWWGLLLACAIAFTFTLPIGVILATTNQRMGLNVISELIIGFLYPGKPLANVAFKTYGSVSIAQALYFVGDFKLGHYMKIPPRSMFIVQLVATIVASTVSFGTTWWLLSSVENICNTDMLPKSSPWTCPGDVVFYNASIIWGIIGPGRMFTSKGIYPGMNWFFLIGFLAPVPVWFFARKFPEKKWIHQIHIPLIFSGANVMPMAKAVHYWSWFAVGIVFNYYIFRRYKGWWARHNYILSAALDAGTAVMGVLIYFALQNNNISLPDWWGNENTDHCPLANCPTEKGIVAKGCPVF

SEQ ID NO: 80978 - protein, 655 aa, Arabidopsis thaliana
  peptide (1)..(655): Ceres Seq. ID no. 12657976
MATTLPTTKLRLPGTNWSCSLNPGPFNMKEHVLITIFANTGAGGAYATSILTIVKAFYHRNLNPAAAMLLVQTTQLLGYGWAGMFRKYLVDSPYMWWPANLVQVSLFRALHEKEEKREGKQTKLRFFLIVFFLSFTYYIVPGYLFPSISYLSFVCWIWTRSVTAQQIGSGLHGLGIGSFGLDWSTVAGFLGSPLAVPFFAIANSFGGFIIFFYIILPIFYWSNAYEAKKFPFYTSHPFDHTGQRYNTTRILNQKTFNIDLPAYESYSKLYLSILFALIYGLSFGTLTATISHVALFDGKFIWELWKKATLTTKDKFGDVHTRLMKKNYKEVPQWWFVAVLAASFVLALYACEGFGKQLQLPWWGLLLACAIAFTFTLPIGVILATTNQRMGLNVISELIIGFLYPGKPLANVAFKTYGSVSIAQALYFVGDFKLGHYMKIPPRSMFIVQLVATIVASTVSFGTTWWLLSSVENICNTDMLPKSSPWTCPGDVVFYNASIIWGIIGPGRMFTSKGIYPGMNWFFLIGFLAPVPVWFFARKFPEKKWIHQIHIPLIFSGANVMPMAKAVHYWSWFAVGIVFNYYIFRRYKGWWARHNYILSAALDAGTAVMGVLIYFALQNNNISLPDWWGNENTDHCPLANCPTEKGIVAKGCPVF

SEQ ID NO: 80979 - DNA, 1027 bp, Arabidopsis thaliana
  misc_feature (1)..(1027): Ceres Seq. ID no. 12657993
  misc_feature (1)..(1027): Ortholog of  Ceres SEQ ID NO 13661969 as cited in SEQ ID NO 61215
  misc_feature (1)..(1027): Ortholog of  Ceres SEQ ID NO 12614809 as cited in SEQ ID NO 68808
  misc_feature (1)..(1027): Ortholog of  Ceres SEQ ID NO 12634366 as cited in SEQ ID NO 0
  misc_feature (1)..(1027): Ortholog of  Ceres SEQ ID NO 15175257 as cited in SEQ ID NO 0
aaagtgagagagagatggggtcaaagacggagatgatggagagagacgcaatggctacggtggctccctatgcgccggtcacttaccatcgccgtgctcgtgttgacttggatgatagacttcctaaaccttatatgccaagagcattgcaagcaccagacagagaacacccgtacggaactccaggccataagaattacggacttagtgttcttcaacagcatgtctccttcttcgatatcgatgataatggcatcatttacccttgggagacctactctggactgcgaatgcttggtttcaatatcattgggtcgcttataatagccgctgttatcaacctgacccttagctatgccactcttccggggtggttaccttcacctttcttccctatatacatacacaacatacacaagtcaaagcatggaagtgattcaaaaacatatgacaatgaaggaaggtttatgccggtgaatcttgagttgatatttagcaaatatgcgaaaaccttgccagacaagttgagtcttggagaactatgggagatgacagaaggaaaccgtgacgcttgggacatttttggatggatcgcaggcaaaatagagtggggactgttgtacttgctagcaagggatgaagaagggtttttgtcaaaagaagctattaggcggtgtttcgatggaagcttgttcgagtactgtgccaaaatctacgctggtatcagtgaagacaagacagcatactactaaaagtatcctttatgttaagtaattgatcgagccattttaagctaataatcgatcaatgtgaagcttgtgcctatacggtaaatgaaggttcgggtagtagtatggacttttggtctaagagatctatgtttgtttttgtttttccagttctgtatggttatactataagttgcagctctaaagaaaagcttctgtatgttttgttgccttggtctctctttgtaccaacccctttttctgttatttccaattttacactgttagttattattgct

SEQ ID NO: 80980 - protein, 249 aa, Arabidopsis thaliana
  peptide (1)..(249): Ceres Seq. ID no. 12657994
SEREMGSKTEMMERDAMATVAPYAPVTYHRRARVDLDDRLPKPYMPRALQAPDREHPYGTPGHKNYGLSVLQQHVSFFDIDDNGIIYPWETYSGLRMLGFNIIGSLIIAAVINLTLSYATLPGWLPSPFFPIYIHNIHKSKHGSDSKTYDNEGRFMPVNLELIFSKYAKTLPDKLSLGELWEMTEGNRDAWDIFGWIAGKIEWGLLYLLARDEEGFLSKEAIRRCFDGSLFEYCAKIYAGISEDKTAYY

SEQ ID NO: 80981 - protein, 245 aa, Arabidopsis thaliana
  peptide (1)..(245): Ceres Seq. ID no. 12657995
MGSKTEMMERDAMATVAPYAPVTYHRRARVDLDDRLPKPYMPRALQAPDREHPYGTPGHKNYGLSVLQQHVSFFDIDDNGIIYPWETYSGLRMLGFNIIGSLIIAAVINLTLSYATLPGWLPSPFFPIYIHNIHKSKHGSDSKTYDNEGRFMPVNLELIFSKYAKTLPDKLSLGELWEMTEGNRDAWDIFGWIAGKIEWGLLYLLARDEEGFLSKEAIRRCFDGSLFEYCAKIYAGISEDKTAYY

SEQ ID NO: 80982 - protein, 239 aa, Arabidopsis thaliana
  peptide (1)..(239): Ceres Seq. ID no. 12657996
MMERDAMATVAPYAPVTYHRRARVDLDDRLPKPYMPRALQAPDREHPYGTPGHKNYGLSVLQQHVSFFDIDDNGIIYPWETYSGLRMLGFNIIGSLIIAAVINLTLSYATLPGWLPSPFFPIYIHNIHKSKHGSDSKTYDNEGRFMPVNLELIFSKYAKTLPDKLSLGELWEMTEGNRDAWDIFGWIAGKIEWGLLYLLARDEEGFLSKEAIRRCFDGSLFEYCAKIYAGISEDKTAYY

SEQ ID NO: 80983 - DNA, 1347 bp, Arabidopsis thaliana
  misc_feature (1)..(1347): Ceres Seq. ID no. 12658000
  misc_feature (1)..(1347): Ortholog of  Ceres SEQ ID NO 13596816 as cited in SEQ ID NO 62287
atggccgtttctttcttaccttattttctgattctttccttcctctcagccattgacgcacattctggaatggtcggagtcaattatggtcggatagctaacaatctcccgtcgccggagaaagtagtgaacctcctgaaatctcaaggaatcaaccgtatcaaaatcttcgacaccgataagaatgtactaaccgcacttgcaaattccaaaatcaaagtaatcgtcgctctccctaacgagcttctctcctccgccgcctcccaccaatcattcgccgacaactggattaaaacccacataatgccatacttcccagcgacggagatcgaagctatcgccgtcggtaacgaagtattcgtcgatccgacgatcacgccgtatcttgtcaatgcgatgaagaacattcacacctctctggttaagtataaactcgacaaagccatcaagatctcgtctcctattgctcttagcgcgcttgctaattcgtacccgccttcctctggttcttttaaaccggaattaatcgaaccggttgttaaaccaatgcttgctctgcttcaacaaacgtcgtcgtatcttatggtaaatgcttatccgtttttcgcttacgcagcaaacgccgataaaatctctttagactacgctctgtttaaagaaaacgccgggaatatagattccggtaccggattgaagtacaacagtctctttgacgctcaaatagacgccgtttacgcggcattgtccgccgtcggatttaaaggcgttaaggtgatggtgacggaaacagggtggccttccgttggagatgagaatgagattggtgcaagcgaatctaacgcggcggcgtataacgccggacttgtgaagagagtgttaacgggtaaaggaacaccgttaagaccgacggagccacttaacgtctatttattcgctttattcaacgaaaaccagaaaccggggccaacgtctgagagaaactacggtttgttttacccaaacgaagggaaagtgtacaacgttccgttcactaaaaagtcaacgacgccggtcaacggtaacagaggtaaagttccggtgacgcacgagggacatacatggtgcgtttcgaacggagaggtagcgaaggagaaacttcaggaggctcttgattacgcttgcggagaaggaggagctgattgccgcccgattcagccaggtgccacgtgttatcatcctgagtcgttagaagctcacgcttcgtacgccttcaatagttactaccagaagaactcacgtcgtgttggtacgtgcttctttggtggagctgctcacgtcgtcacgcaacctcctcgtacgttaatctaa

SEQ ID NO: 80984 - protein, 448 aa, Arabidopsis thaliana
  peptide (1)..(448): Ceres Seq. ID no. 12658001
MAVSFLPYFLILSFLSAIDAHSGMVGVNYGRIANNLPSPEKVVNLLKSQGINRIKIFDTDKNVLTALANSKIKVIVALPNELLSSAASHQSFADNWIKTHIMPYFPATEIEAIAVGNEVFVDPTITPYLVNAMKNIHTSLVKYKLDKAIKISSPIALSALANSYPPSSGSFKPELIEPVVKPMLALLQQTSSYLMVNAYPFFAYAANADKISLDYALFKENAGNIDSGTGLKYNSLFDAQIDAVYAALSAVGFKGVKVMVTETGWPSVGDENEIGASESNAAAYNAGLVKRVLTGKGTPLRPTEPLNVYLFALFNENQKPGPTSERNYGLFYPNEGKVYNVPFTKKSTTPVNGNRGKVPVTHEGHTWCVSNGEVAKEKLQEALDYACGEGGADCRPIQPGATCYHPESLEAHASYAFNSYYQKNSRRVGTCFFGGAAHVVTQPPRTLI

SEQ ID NO: 80985 - protein, 425 aa, Arabidopsis thaliana
  peptide (1)..(425): Ceres Seq. ID no. 12658002
MVGVNYGRIANNLPSPEKVVNLLKSQGINRIKIFDTDKNVLTALANSKIKVIVALPNELLSSAASHQSFADNWIKTHIMPYFPATEIEAIAVGNEVFVDPTITPYLVNAMKNIHTSLVKYKLDKAIKISSPIALSALANSYPPSSGSFKPELIEPVVKPMLALLQQTSSYLMVNAYPFFAYAANADKISLDYALFKENAGNIDSGTGLKYNSLFDAQIDAVYAALSAVGFKGVKVMVTETGWPSVGDENEIGASESNAAAYNAGLVKRVLTGKGTPLRPTEPLNVYLFALFNENQKPGPTSERNYGLFYPNEGKVYNVPFTKKSTTPVNGNRGKVPVTHEGHTWCVSNGEVAKEKLQEALDYACGEGGADCRPIQPGATCYHPESLEAHASYAFNSYYQKNSRRVGTCFFGGAAHVVTQPPRTLI

SEQ ID NO: 80986 - protein, 347 aa, Arabidopsis thaliana
  peptide (1)..(347): Ceres Seq. ID no. 12658003
MPYFPATEIEAIAVGNEVFVDPTITPYLVNAMKNIHTSLVKYKLDKAIKISSPIALSALANSYPPSSGSFKPELIEPVVKPMLALLQQTSSYLMVNAYPFFAYAANADKISLDYALFKENAGNIDSGTGLKYNSLFDAQIDAVYAALSAVGFKGVKVMVTETGWPSVGDENEIGASESNAAAYNAGLVKRVLTGKGTPLRPTEPLNVYLFALFNENQKPGPTSERNYGLFYPNEGKVYNVPFTKKSTTPVNGNRGKVPVTHEGHTWCVSNGEVAKEKLQEALDYACGEGGADCRPIQPGATCYHPESLEAHASYAFNSYYQKNSRRVGTCFFGGAAHVVTQPPRTLI

SEQ ID NO: 80987 - DNA, 1568 bp, Arabidopsis thaliana
  misc_feature (1)..(1568): Ceres Seq. ID no. 12658006
  misc_feature (1)..(1568): Ortholog of  Ceres SEQ ID NO 13596198 as cited in SEQ ID NO 68488
ggaggagaagaaatcaacaacttaagaataaagaatgtcgtatccgacttcgaaccaaagccccatgccaaagtcacatacacacacttctacataccctaaacacacacactcgaatacataaactcttttctatatataaacttcttataagccatttgcttaaacaactctcaagtaaaaaaaaaaaatcaacaatctctaaactcttctctgttttctgatctgttccaatggagattaattggacaagaggaccaatcatcggtcgaggctctaccgccactgtctctatagcaatctcaagctccggtgagctcttcgccgtcaaatctgccgacttatcttcttcgtccttgttgcagaaagagcaatcaatcttgtctacattgagctctcctcacatggtcaaatacataggcactggtttaacgcgcgagagcaacggattggtgtacaatatactgatggaatacgtttctggtggaaatcttcacgatttaatcaaaaattccggcggtaagttgccggagccggagataagatcatacactcgtcagattcttaacggtttggtgtatcttcacgagagagggattgttcactgcgacttgaagagccataacgttctggttgaggaaaatggcgttttgaaaatcgccgacatgggttgtgctaaatcggttgacaagtcggaattttccggtacaccggcgtttatggccccagaagttgctcgtggtgaagaacagaggtttccggctgatgtgtgggctttgggatgtacgatgatcgagatgatgactggatcaagcccttggccggagttaaacgacgtcgttgctgcaatgtataagattggattttcaggcgagtcgccggcgattcccgcgtggatatcggataaagctaaagactttctgaagaattgtttaaaggaagatcaaaaacagagatggactgtggaagaattacttaaacatccatttcttgatgacgacgaagaatctcagacaagtgattgtttgaagaacaagacttcttctccaagcactgtgttggatcaacgattttgggattcatgcgaaagctccaaaagtcacttagtttcgattgatcatgaagacccttttgctgaatactcggaatctttggattcaccggctgatcggatcgagaaactcgccggagatgagttttcaagcttacttgattgggatacggaagacgatggcggatggattcaagtgagaggcgagaaacataaagaaaccgagaaacgcgacggcgacgaagacgtgatttgcgttgaagcaacgtcatcgtcgcaaacgattgaagaagttgaagattggatttcgaatcaagacagcttgttctcggaatattcctctgacgacatcattaataatttctactctaatgttgctattcaaggaaatttaattgcatttcattattgtactgatgaaggtgaaaatgtatccataaagaatatgtttcgtactaataacaaacatttgtttttcaaattgcaagctcatgttaaattcactaaccaagtctga

SEQ ID NO: 80988 - protein, 444 aa, Arabidopsis thaliana
  peptide (1)..(444): Ceres Seq. ID no. 12658007
MEINWTRGPIIGRGSTATVSIAISSSGELFAVKSADLSSSSLLQKEQSILSTLSSPHMVKYIGTGLTRESNGLVYNILMEYVSGGNLHDLIKNSGGKLPEPEIRSYTRQILNGLVYLHERGIVHCDLKSHNVLVEENGVLKIADMGCAKSVDKSEFSGTPAFMAPEVARGEEQRFPADVWALGCTMIEMMTGSSPWPELNDVVAAMYKIGFSGESPAIPAWISDKAKDFLKNCLKEDQKQRWTVEELLKHPFLDDDEESQTSDCLKNKTSSPSTVLDQRFWDSCESSKSHLVSIDHEDPFAEYSESLDSPADRIEKLAGDEFSSLLDWDTEDDGGWIQVRGEKHKETEKRDGDEDVICVEATSSSQTIEEVEDWISNQDSLFSEYSSDDIINNFYSNVAIQGNLIAFHYCTDEGENVSIKNMFRTNNKHLFFKLQAHVKFTNQV

SEQ ID NO: 80989 - protein, 387 aa, Arabidopsis thaliana
  peptide (1)..(387): Ceres Seq. ID no. 12658008
MVKYIGTGLTRESNGLVYNILMEYVSGGNLHDLIKNSGGKLPEPEIRSYTRQILNGLVYLHERGIVHCDLKSHNVLVEENGVLKIADMGCAKSVDKSEFSGTPAFMAPEVARGEEQRFPADVWALGCTMIEMMTGSSPWPELNDVVAAMYKIGFSGESPAIPAWISDKAKDFLKNCLKEDQKQRWTVEELLKHPFLDDDEESQTSDCLKNKTSSPSTVLDQRFWDSCESSKSHLVSIDHEDPFAEYSESLDSPADRIEKLAGDEFSSLLDWDTEDDGGWIQVRGEKHKETEKRDGDEDVICVEATSSSQTIEEVEDWISNQDSLFSEYSSDDIINNFYSNVAIQGNLIAFHYCTDEGENVSIKNMFRTNNKHLFFKLQAHVKFTNQV

SEQ ID NO: 80990 - protein, 366 aa, Arabidopsis thaliana
  peptide (1)..(366): Ceres Seq. ID no. 12658009
MEYVSGGNLHDLIKNSGGKLPEPEIRSYTRQILNGLVYLHERGIVHCDLKSHNVLVEENGVLKIADMGCAKSVDKSEFSGTPAFMAPEVARGEEQRFPADVWALGCTMIEMMTGSSPWPELNDVVAAMYKIGFSGESPAIPAWISDKAKDFLKNCLKEDQKQRWTVEELLKHPFLDDDEESQTSDCLKNKTSSPSTVLDQRFWDSCESSKSHLVSIDHEDPFAEYSESLDSPADRIEKLAGDEFSSLLDWDTEDDGGWIQVRGEKHKETEKRDGDEDVICVEATSSSQTIEEVEDWISNQDSLFSEYSSDDIINNFYSNVAIQGNLIAFHYCTDEGENVSIKNMFRTNNKHLFFKLQAHVKFTNQV

SEQ ID NO: 80991 - DNA, 1119 bp, Arabidopsis thaliana
  misc_feature (1)..(1119): Ceres Seq. ID no. 12658018
  misc_feature (1)..(1119): Ortholog of  Ceres SEQ ID NO 14305259 as cited in SEQ ID NO 58247
atggctgtatcacttccaaccaagtaccctctacgacctatcaccaacatcccaaaaagccaccgtccctcgcttctccgtgtacgtgtcacctgctctgttactaccaccaagcctcagcctaatcgtgagaagcttctggtagagcaacgcactgtgaatcttcctctgtccaacgaccaatctctgcaatcgaccaagcctcgccctaaccgtgagaagcttgtggttgagcaacgccttgccagccctcctctgtccaatgacccaactttgaaatcgacatggactcaccggttatgggttgcagcgggctgcaccactttgtttgtctctttagctaaatctgtcattggagggtttgattctcatctctgcctcgaaccagctttagccggttatgcagggtacatcttagctgatctaggttccggtgtctaccactgggccattgataactacggtgatgagtcaacacctgtagtaggaacccaaatcgaagcatttcagggtcaccacaagtggccttggacaatcaccagacggcaatttgccaacaatctacacgctctggctcaagtcataaccttcacagttcttccactagaccttgcatttaacgaccctgtgtttcacggctttgtgtgcacatttgcattttgcatattgtttagccagcaattccatgcttgggcacatggaaccaagagcaagcttccacctctcgtggtcgcgttgcaggacatggggttacttgtttcacggagacagcatgcggaacatcatcgagcaccgtataacaacaattactgcatcgtgagtggagcatggaacaatgttctggatgagagtaaggtctttgaggcattggagatggtgttttatttccagcttggggtgagacctaggtcatggagtgagccaaactctgactggatagaagaaaccgaaatctccaacaaccaagcataaatattttttttacagagtgatacatgtacaagaaaatttcagtaatatactgaaaagatttcttcgtaatttatatgtaacgagtgtgactgtatttaatactgtataaaacaagcaaaacaactgagcatgtaccatttaagtatc

SEQ ID NO: 80992 - protein, 323 aa, Arabidopsis thaliana
  peptide (1)..(323): Ceres Seq. ID no. 12658019
MAVSLPTKYPLRPITNIPKSHRPSLLRVRVTCSVTTTKPQPNREKLLVEQRTVNLPLSNDQSLQSTKPRPNREKLVVEQRLASPPLSNDPTLKSTWTHRLWVAAGCTTLFVSLAKSVIGGFDSHLCLEPALAGYAGYILADLGSGVYHWAIDNYGDESTPVVGTQIEAFQGHHKWPWTITRRQFANNLHALAQVITFTVLPLDLAFNDPVFHGFVCTFAFCILFSQQFHAWAHGTKSKLPPLVVALQDMGLLVSRRQHAEHHRAPYNNNYCIVSGAWNNVLDESKVFEALEMVFYFQLGVRPRSWSEPNSDWIEETEISNNQA

SEQ ID NO: 80993 - DNA, 2608 bp, Arabidopsis thaliana
  misc_feature (1)..(2608): Ceres Seq. ID no. 12658046
  misc_feature (1)..(2608): Ortholog of  Ceres SEQ ID NO 13600310 as cited in SEQ ID NO 5086
cgggagagcccaacggagagacatatcgccatttcaaagctaaacaaccagataataatactgaggtttttatgcttataattggggtgaaagagacaaatccagagtgtgtgtaaattaggtacgagaagaatttcagctaactcttttgagagaggagaaaaaagtaatagatggttggggaaatgacgaacaatggaagaatccggccatcttttccggtgaaagatctgaccagtaatgaaggatctgaatatggtggccctgttgagtttaccagagaagatgttgaaactcttcttcatgagcgaatcaagtacaagagcaagtacaattacaaggagagatgtgagaatacgatggactatgtaaaaaggcttaggctttgcattagatggtttcaagaactcgagttagattatgcatttgagcaagagaagttgaagaacgctatggagatgaatgagaagcattgcgccgatttggaggttaatttgaaagtaaaggaagaggagctaaatatggtaattgatgaactgaggaagaactttgcatctgttcaggtgcaacttgccaaagaacaaacagagaaattggctgcaaatgaatctcttggaaaagagagagaagcaagaattgctgttgaaagtttgcaagctgccattacagaagagctagcaaagacgcaaggagagcttcaaacagctaaccagaggattcaagctgtcaatgacatgtacaaactcttgcaagagtataactcgagcttacagttgtacaatagcaaacttcaaggtgatctcgacgaagctcatgaaaatataaagcgaggagagaaagaacggactggcattgtagaaagcattggcaacttaaagggtcagtttaaagcactacaggatcagcttgctgcctcgaaggtgtcacaagatgatgtcatgaagcaaaaagatgaattggtgaatgaaattgtaagtctcaaggttgagattcaacaggtcaaagatgaccgtgaccgccatataacggaaattgaaactctgcaagcagaagcaaccaagcaaaatgacttcaaagacaccataaatgagcttgagagtaagtgttctgttcaaaataaggagatagaagagttgcaggatcaattagtagcttctgagagaaaactgcaggtggctgatttatctacttttgagaaaatgaacgagtttgaagagcaaaaggaaagcattatggagctgaaaggtcgcttagaagaagcggaacttaaactcatcgaaggagaaaaactacggaagaagttgcacaataccatacaggaactgaagggaaacatccgtgtattctgtagggtgagacctctattatcaggagagaattctagtgaggaggccaaaactatatcctaccctacatctctagaagcacttggtcggggcattgacttgttgcaaaatggacaatcgcattgtttcacatttgataaggtttttgtgccaagtgcatcacaagaagatgtttttgtagagatttctcaacttgtccagagcgctcttgatggttacaaggtttgcattttcgcatatggacaaacaggatctggaaaaacttatacaatgatgggtaggccaggaaacccggatgaaaaaggactgattcctcgatgtttggagcaaatatttcaaacaaggcagtctcttcgatcacagggttggaagtatgagttgcaggtgtctatgttagaaatatacaacgaaacgattagggatctcttgtcaacaaacaaggaagctgtgagagcagacaatggcgtttctccgcagaaatatgcaatcaaacatgatgctagtgggaatacacatgttgtggaacttactgttgtagatgttcgaagctcgaaacaggtttcgttcctcttagaccacgcagctcgaaacaggtcagtagggaagaccgcaatgaacgagcaatcttctagaagccatttcgttttcacattgaagatctctggattcaacgagagcacagagcaacaagtacaaggtgtcttgaacctgattgatcttgcgggtagtgagcgtttgtcaaagagcggatcaactggcgatagactgaaagaaactcaagcaatcaacaaaagcttatcgtctctaggcgatgtcatatttgccttagcgaagaaagaagatcacgttcctttcagaaactcaaagctcacttatcttcttcagccctgtttaggtggtgactcgaagacgctaatgtttgtgaacatcacaccagaaccttcctcaaccggtgagtctctgtgctccctcaggtttgcagcaagagtgaatgcttgtgagattggaactgcacaccgtcatgttaacgccaggccgttagattatcgcttgagccttggatgagaattttctccactgaagccaaagaaataaagttatgtttatacccgaatgtgggcactacttgatgttggtactaaatctgtatatagcttgtaatagtttcaaggttctgttatcttctactcttgtcttggatcagaagatttgtgtgctggaaaatcataatgttctgagaccattaaccgcatcatttcatt

SEQ ID NO: 80994 - protein, 745 aa, Arabidopsis thaliana
  peptide (1)..(745): Ceres Seq. ID no. 12658047
MVGEMTNNGRIRPSFPVKDLTSNEGSEYGGPVEFTREDVETLLHERIKYKSKYNYKERCENTMDYVKRLRLCIRWFQELELDYAFEQEKLKNAMEMNEKHCADLEVNLKVKEEELNMVIDELRKNFASVQVQLAKEQTEKLAANESLGKEREARIAVESLQAAITEELAKTQGELQTANQRIQAVNDMYKLLQEYNSSLQLYNSKLQGDLDEAHENIKRGEKERTGIVESIGNLKGQFKALQDQLAASKVSQDDVMKQKDELVNEIVSLKVEIQQVKDDRDRHITEIETLQAEATKQNDFKDTINELESKCSVQNKEIEELQDQLVASERKLQVADLSTFEKMNEFEEQKESIMELKGRLEEAELKLIEGEKLRKKLHNTIQELKGNIRVFCRVRPLLSGENSSEEAKTISYPTSLEALGRGIDLLQNGQSHCFTFDKVFVPSASQEDVFVEISQLVQSALDGYKVCIFAYGQTGSGKTYTMMGRPGNPDEKGLIPRCLEQIFQTRQSLRSQGWKYELQVSMLEIYNETIRDLLSTNKEAVRADNGVSPQKYAIKHDASGNTHVVELTVVDVRSSKQVSFLLDHAARNRSVGKTAMNEQSSRSHFVFTLKISGFNESTEQQVQGVLNLIDLAGSERLSKSGSTGDRLKETQAINKSLSSLGDVIFALAKKEDHVPFRNSKLTYLLQPCLGGDSKTLMFVNITPEPSSTGESLCSLRFAARVNACEIGTAHRHVNARPLDYRLSLG

SEQ ID NO: 80995 - protein, 741 aa, Arabidopsis thaliana
  peptide (1)..(741): Ceres Seq. ID no. 12658048
MTNNGRIRPSFPVKDLTSNEGSEYGGPVEFTREDVETLLHERIKYKSKYNYKERCENTMDYVKRLRLCIRWFQELELDYAFEQEKLKNAMEMNEKHCADLEVNLKVKEEELNMVIDELRKNFASVQVQLAKEQTEKLAANESLGKEREARIAVESLQAAITEELAKTQGELQTANQRIQAVNDMYKLLQEYNSSLQLYNSKLQGDLDEAHENIKRGEKERTGIVESIGNLKGQFKALQDQLAASKVSQDDVMKQKDELVNEIVSLKVEIQQVKDDRDRHITEIETLQAEATKQNDFKDTINELESKCSVQNKEIEELQDQLVASERKLQVADLSTFEKMNEFEEQKESIMELKGRLEEAELKLIEGEKLRKKLHNTIQELKGNIRVFCRVRPLLSGENSSEEAKTISYPTSLEALGRGIDLLQNGQSHCFTFDKVFVPSASQEDVFVEISQLVQSALDGYKVCIFAYGQTGSGKTYTMMGRPGNPDEKGLIPRCLEQIFQTRQSLRSQGWKYELQVSMLEIYNETIRDLLSTNKEAVRADNGVSPQKYAIKHDASGNTHVVELTVVDVRSSKQVSFLLDHAARNRSVGKTAMNEQSSRSHFVFTLKISGFNESTEQQVQGVLNLIDLAGSERLSKSGSTGDRLKETQAINKSLSSLGDVIFALAKKEDHVPFRNSKLTYLLQPCLGGDSKTLMFVNITPEPSSTGESLCSLRFAARVNACEIGTAHRHVNARPLDYRLSLG

SEQ ID NO: 80996 - protein, 683 aa, Arabidopsis thaliana
  peptide (1)..(683): Ceres Seq. ID no. 12658049
MDYVKRLRLCIRWFQELELDYAFEQEKLKNAMEMNEKHCADLEVNLKVKEEELNMVIDELRKNFASVQVQLAKEQTEKLAANESLGKEREARIAVESLQAAITEELAKTQGELQTANQRIQAVNDMYKLLQEYNSSLQLYNSKLQGDLDEAHENIKRGEKERTGIVESIGNLKGQFKALQDQLAASKVSQDDVMKQKDELVNEIVSLKVEIQQVKDDRDRHITEIETLQAEATKQNDFKDTINELESKCSVQNKEIEELQDQLVASERKLQVADLSTFEKMNEFEEQKESIMELKGRLEEAELKLIEGEKLRKKLHNTIQELKGNIRVFCRVRPLLSGENSSEEAKTISYPTSLEALGRGIDLLQNGQSHCFTFDKVFVPSASQEDVFVEISQLVQSALDGYKVCIFAYGQTGSGKTYTMMGRPGNPDEKGLIPRCLEQIFQTRQSLRSQGWKYELQVSMLEIYNETIRDLLSTNKEAVRADNGVSPQKYAIKHDASGNTHVVELTVVDVRSSKQVSFLLDHAARNRSVGKTAMNEQSSRSHFVFTLKISGFNESTEQQVQGVLNLIDLAGSERLSKSGSTGDRLKETQAINKSLSSLGDVIFALAKKEDHVPFRNSKLTYLLQPCLGGDSKTLMFVNITPEPSSTGESLCSLRFAARVNACEIGTAHRHVNARPLDYRLSLG

SEQ ID NO: 80997 - DNA, 1218 bp, Arabidopsis thaliana
  misc_feature (1)..(1218): Ceres Seq. ID no. 12658054
  misc_feature (1)..(1218): Ortholog of  Ceres SEQ ID NO 15169380 as cited in SEQ ID NO 58483
  misc_feature (1)..(1218): Ortholog of  Ceres SEQ ID NO 15177787 as cited in SEQ ID NO 59431
  misc_feature (1)..(1218): Ortholog of  Ceres SEQ ID NO 12617197 as cited in SEQ ID NO 63406
atggaattgcaaggagaggaaagcaaaacggcgacgtattgcgtgacgggtgcaagtggatacatcggttcttggttggttaagtctcttctccaaagaggttacacagtccatgccactctcagagatcttggtattttcttgttttcaaactttgtttatatcgaatcttttaggtactttacacaatcctttgaaataaaaatgatcttcataattaacgacaagcttcttccctcgacagcaaaatctgaatactttcaatctaaatggaaggaaaatgaacggctcagattattccgagcggatcttcgagatgacggcagctttgacgacgccgttaagggttgtgacggcgtcttccatgtcgccgcttccatggagtttgatatctcatcagatcacgttaatctcgagagttatgtccagagcaaagtcatagaaccggcgctaaaaggcgtacggaatgtacttagttcttgtctaaagtcaaagtcagtcaaaagagttgtcttcacatcatccatcagcactctcactgctaaagatgagaatgaacggatgagatctttcgtggatgaaacatgcaaggctcatgttgatcatgtccttaaaacacaagcaagtggatggatttatgtattatcgaagctcgtatcagaggaagaagcatttcggtatgcgaaagagagaggaatggatcttgtttcagtcattacaacaactgtttcaggtccattccttactccatttgtcccatcaagcgttcaagttctcttgtctccaattacaggtgtgtatataattttttccattatcatacataagtttaaatgtgactcaaagttgtttgcgatattatcagctgtgaacaaaagaatgggttcgattgctttagtacacattgaagatatttgcagggctcatctgtttttgatggaacaaccaaaggctaaaggtcaatatatatgttgtgttgacaatattgatatgcatgagttgatgcttcatcacttctctaaggactatctttgtaaagttcaaaaggtaaatgaagacgaggaagagagagaatgtatgaagcctataatttcttcaaagaagttaagagaattggggtttgagtacaaatatggtattgaagaaattgttgatcaaaccattgatgcttctatcaagattaagttccctaccttgaaccacaaactcaggcagtga

SEQ ID NO: 80998 - protein, 405 aa, Arabidopsis thaliana
  peptide (1)..(405): Ceres Seq. ID no. 12658055
MELQGEESKTATYCVTGASGYIGSWLVKSLLQRGYTVHATLRDLGIFLFSNFVYIESFRYFTQSFEIKMIFIINDKLLPSTAKSEYFQSKWKENERLRLFRADLRDDGSFDDAVKGCDGVFHVAASMEFDISSDHVNLESYVQSKVIEPALKGVRNVLSSCLKSKSVKRVVFTSSISTLTAKDENERMRSFVDETCKAHVDHVLKTQASGWIYVLSKLVSEEEAFRYAKERGMDLVSVITTTVSGPFLTPFVPSSVQVLLSPITGVYIIFSIIIHKFKCDSKLFAILSAVNKRMGSIALVHIEDICRAHLFLMEQPKAKGQYICCVDNIDMHELMLHHFSKDYLCKVQKVNEDEEERECMKPIISSKKLRELGFEYKYGIEEIVDQTIDASIKIKFPTLNHKLRQ

SEQ ID NO: 80999 - protein, 337 aa, Arabidopsis thaliana
  peptide (1)..(337): Ceres Seq. ID no. 12658056
MIFIINDKLLPSTAKSEYFQSKWKENERLRLFRADLRDDGSFDDAVKGCDGVFHVAASMEFDISSDHVNLESYVQSKVIEPALKGVRNVLSSCLKSKSVKRVVFTSSISTLTAKDENERMRSFVDETCKAHVDHVLKTQASGWIYVLSKLVSEEEAFRYAKERGMDLVSVITTTVSGPFLTPFVPSSVQVLLSPITGVYIIFSIIIHKFKCDSKLFAILSAVNKRMGSIALVHIEDICRAHLFLMEQPKAKGQYICCVDNIDMHELMLHHFSKDYLCKVQKVNEDEEERECMKPIISSKKLRELGFEYKYGIEEIVDQTIDASIKIKFPTLNHKLRQ

SEQ ID NO: 81000 - protein, 279 aa, Arabidopsis thaliana
  peptide (1)..(279): Ceres Seq. ID no. 12658057
MEFDISSDHVNLESYVQSKVIEPALKGVRNVLSSCLKSKSVKRVVFTSSISTLTAKDENERMRSFVDETCKAHVDHVLKTQASGWIYVLSKLVSEEEAFRYAKERGMDLVSVITTTVSGPFLTPFVPSSVQVLLSPITGVYIIFSIIIHKFKCDSKLFAILSAVNKRMGSIALVHIEDICRAHLFLMEQPKAKGQYICCVDNIDMHELMLHHFSKDYLCKVQKVNEDEEERECMKPIISSKKLRELGFEYKYGIEEIVDQTIDASIKIKFPTLNHKLRQ

SEQ ID NO: 81001 - DNA, 2448 bp, Arabidopsis thaliana
  misc_feature (1)..(2448): Ceres Seq. ID no. 12658062
  misc_feature (1)..(2448): Ortholog of  Ceres SEQ ID NO 13582534 as cited in SEQ ID NO 57409
atgagagaaattcattctctgttttcgttatctctgttcttaatttcatcttctctctctgttgctttggattataatgtcatcactccaaaagaattccttaaggatggagatacccttagttctccagaccaggttttccaacttgggttctttagtcttgaccaagaagagcaacctcaacatcggtttcttggcttgtggtacatggaaccatttgcagtcgtttgggtggccaaccgaaacaaccctctctacggcacatctggattcttaaacttgagttcccttggcgatcttcagctattcgacggtgaacacaaagccttgtggtcatcatcatcatcatcaacaaaagcttctaaaacagcaaataatcctctcttgaagatatcatgttcagggaatctcatatctagtgacggagaagaagctgtgttgtggcagagttttgattatcccatgaatacaatactcgcgggtatgaagcttgggaaaaacttcaagacacaaatggaatggtctctatcatcttggaaaaccctaaaagatccatcaccaggtgatttcacgttgtctctagacactcgaggtttaccacaattgatcttaaggaagaatggagattcgagttattcctatcgcttaggatcttggaacggcttatccttcaccggcgctccagctatgggacgtgagaatagcttattcgactacaaattcacgtcgagtgcgcaagaagtaaactactcgtggactccacggcacagaattgtctcaagattggtattaaacaacacagggaaactccataggtttatccagtcgaagcaaaaccagtggatcttagcaaacactgcaccagaagatgagtgtgactactactctatatgtggagcttacgcagtttgtgggattaatagcaaaaacacaccttcttgttcatgtttacaagggttcaagcctaaatcaggtcgaaagtggaatatttcaagaggagcatacgggtgtgtccatgagattccaaccaactgtgaaaagaaagatgcatttgtgaagtttccaggtctgaaattaccagatacttcatggtcttggtatgatgcaaaaaatgaaatgacacttgaggattgtaagatcaagtgttcaagtaactgctcttgcacggcttatgcgaataccgatattcgcgagggaggaaaaggttgtttgctttggtttggtgacttggttgatatgagagagtattctagctttggacaagatgtttacataagaatgggttttgctaaaatagagtttaaaggaagagaagtggtgggaatggtcgttggatcggtggtggcaattgcagttgttttggttgtagtgtttgcatgtttcagaaagaagataatgaagagatatcgaggtgaaaatttcagaaaagggattgaggaagaggacttggacttgcctatttttgacagaaaaacgatttctatagccactgatgatttttcatacgtgaacttcctaggaagaggaggttttggaccagtttataagggtaagttagaagatggacaagagattgcggtgaagaggttatccgcgaactcaggacaaggagtggaagaattcaagaacgaagtaaaactaatcgcaaaacttcaacatcgtaacctcgtgaggcttttaggttgttgtattcaaggtgaagaatgtatgttgatctatgagtatatgcctaacaaaagtttagacttctttatatttgatgaaaggagaagtacagaattggattggaagaagagaatgaacattatcaatggagtagctcgtgggattctctatcttcatcaagattcaagattgagaatcatacatagagatttaaaagctggaaatgttttactagataatgatatgaaccctaagatctcagattttggattggctaaatcttttgggggagatcagagtgaatcaagcacaaacagagtcgtgggtacttatggttacatgcctccggagtatgcaattgatggacatttctctgtgaaatctgatgtgttcagtttcggtgtattagtacttgagatcataactggcaagacgaatcgagggtttcgtcatgcagatcatgatcttaatcttcttggacacgtgtggaaaatgtgggttgaagacagagaaatagaagtaccagaggaagagtggttggaagagacaagtgttatcccagaggtactaagatgtattcatgttgctttgctttgtgttcaacaaaaaccagaagacagaccaaccatggcttctgttgtcttgatgtttgggagtgatagttctcttcctcaccctacacagcccggttttttcaccaaccggaacgttcctgatatctcttcatctttaagcttacgttcacaaaacgaagtttccatcacaatgttgcagggacggtag

SEQ ID NO: 81002 - protein, 815 aa, Arabidopsis thaliana
  peptide (1)..(815): Ceres Seq. ID no. 12658063
MREIHSLFSLSLFLISSSLSVALDYNVITPKEFLKDGDTLSSPDQVFQLGFFSLDQEEQPQHRFLGLWYMEPFAVVWVANRNNPLYGTSGFLNLSSLGDLQLFDGEHKALWSSSSSSTKASKTANNPLLKISCSGNLISSDGEEAVLWQSFDYPMNTILAGMKLGKNFKTQMEWSLSSWKTLKDPSPGDFTLSLDTRGLPQLILRKNGDSSYSYRLGSWNGLSFTGAPAMGRENSLFDYKFTSSAQEVNYSWTPRHRIVSRLVLNNTGKLHRFIQSKQNQWILANTAPEDECDYYSICGAYAVCGINSKNTPSCSCLQGFKPKSGRKWNISRGAYGCVHEIPTNCEKKDAFVKFPGLKLPDTSWSWYDAKNEMTLEDCKIKCSSNCSCTAYANTDIREGGKGCLLWFGDLVDMREYSSFGQDVYIRMGFAKIEFKGREVVGMVVGSVVAIAVVLVVVFACFRKKIMKRYRGENFRKGIEEEDLDLPIFDRKTISIATDDFSYVNFLGRGGFGPVYKGKLEDGQEIAVKRLSANSGQGVEEFKNEVKLIAKLQHRNLVRLLGCCIQGEECMLIYEYMPNKSLDFFIFDERRSTELDWKKRMNIINGVARGILYLHQDSRLRIIHRDLKAGNVLLDNDMNPKISDFGLAKSFGGDQSESSTNRVVGTYGYMPPEYAIDGHFSVKSDVFSFGVLVLEIITGKTNRGFRHADHDLNLLGHVWKMWVEDREIEVPEEEWLEETSVIPEVLRCIHVALLCVQQKPEDRPTMASVVLMFGSDSSLPHPTQPGFFTNRNVPDISSSLSLRSQNEVSITMLQGR

SEQ ID NO: 81003 - protein, 746 aa, Arabidopsis thaliana
  peptide (1)..(746): Ceres Seq. ID no. 12658064
MEPFAVVWVANRNNPLYGTSGFLNLSSLGDLQLFDGEHKALWSSSSSSTKASKTANNPLLKISCSGNLISSDGEEAVLWQSFDYPMNTILAGMKLGKNFKTQMEWSLSSWKTLKDPSPGDFTLSLDTRGLPQLILRKNGDSSYSYRLGSWNGLSFTGAPAMGRENSLFDYKFTSSAQEVNYSWTPRHRIVSRLVLNNTGKLHRFIQSKQNQWILANTAPEDECDYYSICGAYAVCGINSKNTPSCSCLQGFKPKSGRKWNISRGAYGCVHEIPTNCEKKDAFVKFPGLKLPDTSWSWYDAKNEMTLEDCKIKCSSNCSCTAYANTDIREGGKGCLLWFGDLVDMREYSSFGQDVYIRMGFAKIEFKGREVVGMVVGSVVAIAVVLVVVFACFRKKIMKRYRGENFRKGIEEEDLDLPIFDRKTISIATDDFSYVNFLGRGGFGPVYKGKLEDGQEIAVKRLSANSGQGVEEFKNEVKLIAKLQHRNLVRLLGCCIQGEECMLIYEYMPNKSLDFFIFDERRSTELDWKKRMNIINGVARGILYLHQDSRLRIIHRDLKAGNVLLDNDMNPKISDFGLAKSFGGDQSESSTNRVVGTYGYMPPEYAIDGHFSVKSDVFSFGVLVLEIITGKTNRGFRHADHDLNLLGHVWKMWVEDREIEVPEEEWLEETSVIPEVLRCIHVALLCVQQKPEDRPTMASVVLMFGSDSSLPHPTQPGFFTNRNVPDISSSLSLRSQNEVSITMLQGR

SEQ ID NO: 81004 - protein, 661 aa, Arabidopsis thaliana
  peptide (1)..(661): Ceres Seq. ID no. 12658065
MNTILAGMKLGKNFKTQMEWSLSSWKTLKDPSPGDFTLSLDTRGLPQLILRKNGDSSYSYRLGSWNGLSFTGAPAMGRENSLFDYKFTSSAQEVNYSWTPRHRIVSRLVLNNTGKLHRFIQSKQNQWILANTAPEDECDYYSICGAYAVCGINSKNTPSCSCLQGFKPKSGRKWNISRGAYGCVHEIPTNCEKKDAFVKFPGLKLPDTSWSWYDAKNEMTLEDCKIKCSSNCSCTAYANTDIREGGKGCLLWFGDLVDMREYSSFGQDVYIRMGFAKIEFKGREVVGMVVGSVVAIAVVLVVVFACFRKKIMKRYRGENFRKGIEEEDLDLPIFDRKTISIATDDFSYVNFLGRGGFGPVYKGKLEDGQEIAVKRLSANSGQGVEEFKNEVKLIAKLQHRNLVRLLGCCIQGEECMLIYEYMPNKSLDFFIFDERRSTELDWKKRMNIINGVARGILYLHQDSRLRIIHRDLKAGNVLLDNDMNPKISDFGLAKSFGGDQSESSTNRVVGTYGYMPPEYAIDGHFSVKSDVFSFGVLVLEIITGKTNRGFRHADHDLNLLGHVWKMWVEDREIEVPEEEWLEETSVIPEVLRCIHVALLCVQQKPEDRPTMASVVLMFGSDSSLPHPTQPGFFTNRNVPDISSSLSLRSQNEVSITMLQGR

SEQ ID NO: 81005 - DNA, 528 bp, Arabidopsis thaliana
  misc_feature (1)..(528): Ceres Seq. ID no. 12658074
  misc_feature (1)..(528): Ortholog of  Ceres SEQ ID NO 13638406 as cited in SEQ ID NO 60160
acttgcataaactaacttggttctcttagatatttctttagagttaaataatcatattcaatttttttaaaaaggatgttagaagggaaagcagtaatgggtgatacagatatgaagcaaacaatgaaggaagatgctcttagtttggcctccaaagcccttgattgctttgatgtcaccgaacctactcaaattgcccgtttcatcaagaaggaatttgatagaagttacggatcggggtggcagtgcatcgtggggacgcatttcggatctttcgtgactcattgcagtggctgcttcatccatttctcagttggcagccttaccattttgctttttaagggatcagtcggtgaaccggcccccccggaccgatgctctagctaatttagacagtattgtaaaataatcaagtccttttcgattgatgtagtgttaaagttaaagagtattcaagttctttcactgtaatatcaatcatgattcgtcgttatggatgtcttcaataacaagaaaacactgctttct

SEQ ID NO: 81006 - protein, 103 aa, Arabidopsis thaliana
  peptide (1)..(103): Ceres Seq. ID no. 12658075
MLEGKAVMGDTDMKQTMKEDALSLASKALDCFDVTEPTQIARFIKKEFDRSYGSGWQCIVGTHFGSFVTHCSGCFIHFSVGSLTILLFKGSVGEPAPPDRCSS

SEQ ID NO: 81007 - protein, 96 aa, Arabidopsis thaliana
  peptide (1)..(96): Ceres Seq. ID no. 12658076
MGDTDMKQTMKEDALSLASKALDCFDVTEPTQIARFIKKEFDRSYGSGWQCIVGTHFGSFVTHCSGCFIHFSVGSLTILLFKGSVGEPAPPDRCSS

SEQ ID NO: 81008 - protein, 91 aa, Arabidopsis thaliana
  peptide (1)..(91): Ceres Seq. ID no. 12658077
MKQTMKEDALSLASKALDCFDVTEPTQIARFIKKEFDRSYGSGWQCIVGTHFGSFVTHCSGCFIHFSVGSLTILLFKGSVGEPAPPDRCSS

SEQ ID NO: 81009 - DNA, 1155 bp, Arabidopsis thaliana
  misc_feature (1)..(1155): Ceres Seq. ID no. 12658093
  misc_feature (1)..(1155): Ortholog of  Ceres SEQ ID NO 13657789 as cited in SEQ ID NO 66154
atgggtctcctctcttctgtccgttctattaactcactcatcttctcctacaatctatcgaccaccaacgagacacgagtcgaatttgcagagtcaaagatcaatcagtcctcgcatcctcctccagtacagcctagtcttcctcgctttggttatctagtttcagggtcaagaggtgacttagagagtctgtggagagtgttacgaacattataccatcctaggaatcagtacgttgttcatcttgatctcgagtctcctgctgaagagaggcttgagctggctaaacgtgtgagccaagatcctgtttttagcgatgttggaaatgttcacatgatcacaaaggctaaccttgttacgtatcgaggacccacaatggtggctaacacgctccacgcttgcgctattctcttgaagcagagtaaagaatgggattggttcatcaatctcagtgcctcggattatcctctagtcactcaagatgatctgattgatacattctcgggactggaccggaacctcaactttatcgaccacagtagcaaactaggctggaaagaagaaaaacgagcaaagccgctgatcatagacccggggctttactccacaaagaagtcagatgtcttctgggttacacctcgcagaacaatgccaactgcattcaaactatttaccggtaattcagtgattaaatattgcatttggggatgggacaatcttccacggactcttctaatgtattacaccaatttcctctctacaccggaaggatatttccatactgtcatctgcaacgctccagagtactcttccactgtgctgaaccacgacctgcatttcatctcatgggaccgccctcctaaacagcatcctcgggcgctcaccatcaacgatacagagaggatgattgcaagtggaagtgcgttttcccgcaagttcagacacaatgatcctgccttggataagatcgataaagagctgctcggtagaggtaacggaaacttcacgcctggtggttggtgtgcaggggaaccaaaatgctcgagggttggtgatccgtcgaagatcaagcccggtcctggagctaacaggcttcgtgtgcttgttagcagacttgttttgacatctaaattgactcaaaggcaatgtagatag

SEQ ID NO: 81010 - protein, 384 aa, Arabidopsis thaliana
  peptide (1)..(384): Ceres Seq. ID no. 12658094
MGLLSSVRSINSLIFSYNLSTTNETRVEFAESKINQSSHPPPVQPSLPRFGYLVSGSRGDLESLWRVLRTLYHPRNQYVVHLDLESPAEERLELAKRVSQDPVFSDVGNVHMITKANLVTYRGPTMVANTLHACAILLKQSKEWDWFINLSASDYPLVTQDDLIDTFSGLDRNLNFIDHSSKLGWKEEKRAKPLIIDPGLYSTKKSDVFWVTPRRTMPTAFKLFTGNSVIKYCIWGWDNLPRTLLMYYTNFLSTPEGYFHTVICNAPEYSSTVLNHDLHFISWDRPPKQHPRALTINDTERMIASGSAFSRKFRHNDPALDKIDKELLGRGNGNFTPGGWCAGEPKCSRVGDPSKIKPGPGANRLRVLVSRLVLTSKLTQRQCR

SEQ ID NO: 81011 - protein, 273 aa, Arabidopsis thaliana
  peptide (1)..(273): Ceres Seq. ID no. 12658095
MITKANLVTYRGPTMVANTLHACAILLKQSKEWDWFINLSASDYPLVTQDDLIDTFSGLDRNLNFIDHSSKLGWKEEKRAKPLIIDPGLYSTKKSDVFWVTPRRTMPTAFKLFTGNSVIKYCIWGWDNLPRTLLMYYTNFLSTPEGYFHTVICNAPEYSSTVLNHDLHFISWDRPPKQHPRALTINDTERMIASGSAFSRKFRHNDPALDKIDKELLGRGNGNFTPGGWCAGEPKCSRVGDPSKIKPGPGANRLRVLVSRLVLTSKLTQRQCR

SEQ ID NO: 81012 - protein, 259 aa, Arabidopsis thaliana
  peptide (1)..(259): Ceres Seq. ID no. 12658096
MVANTLHACAILLKQSKEWDWFINLSASDYPLVTQDDLIDTFSGLDRNLNFIDHSSKLGWKEEKRAKPLIIDPGLYSTKKSDVFWVTPRRTMPTAFKLFTGNSVIKYCIWGWDNLPRTLLMYYTNFLSTPEGYFHTVICNAPEYSSTVLNHDLHFISWDRPPKQHPRALTINDTERMIASGSAFSRKFRHNDPALDKIDKELLGRGNGNFTPGGWCAGEPKCSRVGDPSKIKPGPGANRLRVLVSRLVLTSKLTQRQCR

SEQ ID NO: 81013 - DNA, 1436 bp, Arabidopsis thaliana
  misc_feature (1)..(1436): Ceres Seq. ID no. 12658105
  misc_feature (1)..(1436): Ortholog of  Ceres SEQ ID NO 13655382 as cited in SEQ ID NO 68949
tctctgtccttgtgtgtctctggactctgttagtggacataccttgagagatgaagatcgttcgcagggattttgttcgtaatggacccggaagcgttaagatggtggcagaggactctgatgatctctggtatgcttataacttgattgctgtgggcgatagtgtaatggctgtcactttcagaaaagttcagagagagatacctggtgggggaagagactctgaacgtgttaaactgaagctggaagtacaagttgaggaggtggactatgacaaagacggatctgttttgcgcatacgtggcaaaaatatcctggagaatgagcacgtaaagattggtgcattccatactttggaacttgagctgaaacgaccttttgtgttgagaaaggaaatgtgggactcaatggctcttgatacactcaaacaggcctcagatcccgctgctagtgctgatctagctgtagttctaatgcaagaaggactggcacaaatcttccttgtgggcagaagtgtgacaagtagccgtgcacgaatagaaacatccattcctaggaagcatggacctgcaattgctggttacgagtctgctttgaagaaattttttgagaatgttctgcaggcctttgtgaaacatgttgacttcagtgtcgttcgctgtgcagtagttgcaagtcccggcttcacaaaggttttttttttggtcactcaaagactttctaaatttacgtggtttattatttttcaaattgcagctggaccaggcttacaaatttcccatacatatatgacacagaccgtttgattgtttcatgtctccaggatcagtttcatcgccacttattgttggaagcagaaagaagacaactgagacctattattgagaataaatcacgtataatattggtgcacacaaactctggatatagacatagcctgggtgaggttctccatgcccccaacgtgatgaatatgataaaagatacaaaagcagcaaaagaggtcaaagctctcaatgattttcacaacatgctttcaactgaaccagatcgggcatgctatggaccaaaacacgtggaagttgcaaatgaacgaatggcaattcaaacgcttctcataacggacgagcttttcaggaattctgacgtgaaaacaaggaagaagtatgtgaatttggtggagtcggtaaaagattcgggaggagatgcttttatattttcggcgatgcatgtgtcaggagaacaattggcacagctgactggaatagcagctcttctcaggttccctttaccagaactcgaagacattgagatgtaaaaaaatcttcggcttatagaaaacaatacaacaaatcatacacatctctcataatttatagtttatttgtactcagtgtcataaaaagagatttgtaactcattacaaattataagat

SEQ ID NO: 81014 - protein, 251 aa, Arabidopsis thaliana
  peptide (1)..(251): Ceres Seq. ID no. 12658106
MKIVRRDFVRNGPGSVKMVAEDSDDLWYAYNLIAVGDSVMAVTFRKVQREIPGGGRDSERVKLKLEVQVEEVDYDKDGSVLRIRGKNILENEHVKIGAFHTLELELKRPFVLRKEMWDSMALDTLKQASDPAASADLAVVLMQEGLAQIFLVGRSVTSSRARIETSIPRKHGPAIAGYESALKKFFENVLQAFVKHVDFSVVRCAVVASPGFTKVFFLVTQRLSKFTWFIIFQIAAGPGLQISHTYMTQTV

SEQ ID NO: 81015 - protein, 234 aa, Arabidopsis thaliana
  peptide (1)..(234): Ceres Seq. ID no. 12658107
MVAEDSDDLWYAYNLIAVGDSVMAVTFRKVQREIPGGGRDSERVKLKLEVQVEEVDYDKDGSVLRIRGKNILENEHVKIGAFHTLELELKRPFVLRKEMWDSMALDTLKQASDPAASADLAVVLMQEGLAQIFLVGRSVTSSRARIETSIPRKHGPAIAGYESALKKFFENVLQAFVKHVDFSVVRCAVVASPGFTKVFFLVTQRLSKFTWFIIFQIAAGPGLQISHTYMTQTV

SEQ ID NO: 81016 - protein, 212 aa, Arabidopsis thaliana
  peptide (1)..(212): Ceres Seq. ID no. 12658108
MAVTFRKVQREIPGGGRDSERVKLKLEVQVEEVDYDKDGSVLRIRGKNILENEHVKIGAFHTLELELKRPFVLRKEMWDSMALDTLKQASDPAASADLAVVLMQEGLAQIFLVGRSVTSSRARIETSIPRKHGPAIAGYESALKKFFENVLQAFVKHVDFSVVRCAVVASPGFTKVFFLVTQRLSKFTWFIIFQIAAGPGLQISHTYMTQTV

SEQ ID NO: 81017 - DNA, 1038 bp, Arabidopsis thaliana
  misc_feature (1)..(1038): Ceres Seq. ID no. 12658113
  misc_feature (1)..(1038): Ortholog of  Ceres SEQ ID NO 12784444 as cited in SEQ ID NO 67288
atggccaaggtggtggtttacacgatactaaccgccaccatcatcttcctcatcctcctcgctcataagaaacaaaaccagactcaatccattgagggtctcataacccgccgcatcggacggaggcttgaaatgccggtgtttgaccctttggtgacccggattgagaggttgtctcatgagaaagaagctggtacgaagaccgtggaggctgcgaaagaggagaaagatgatatgtttgaggagtattttgcacaagagagaaggcttaacacgacaatgaggatcaagttcttgtttcctctgcttgacgcgtctccaagagatggctttgtgagcttgaaagagcttcagacatggatgatgcaacagacagaagacaacatggtttacagaaccgccaaagagcttgagctacaagataaggacaaggacggtgtcataactttcgaagagtacttgcctcaattctctaaacaagacattgagaaaaacgagaagggtcacggtgaagccggttggtggatggagcaattcaagaattctgattttgatcataatggctctctcgacattgaggagttcaacaatttcttgcaccctgaagacagcagaaacggagatacacaaagatgggttctaaaggagcgaatgacgggcatggacacgaacggtgatgggaagctagagtacaaagagtttgtaaaaaatgcatatgaaatgtataaagaattcgcaaagttcgagaaagaggaggatgagaatgtgccaacacctcagcttctgttcgcagagatggacagagacaaagacagattcctcgtggccgatgagcttcgacccattttgcaatatcttcaacctggtgagatgagttatgccaaattctattctactttcctttgccacgaggcggatgaggataaagatggtaaactatctcttgaagagatgttgcaccacgaagatgtcttttacaaggcagttcatcacgaagacttggacgacgaagactattttgatcatgatgaactctaa

SEQ ID NO: 81018 - protein, 345 aa, Arabidopsis thaliana
  peptide (1)..(345): Ceres Seq. ID no. 12658114
MAKVVVYTILTATIIFLILLAHKKQNQTQSIEGLITRRIGRRLEMPVFDPLVTRIERLSHEKEAGTKTVEAAKEEKDDMFEEYFAQERRLNTTMRIKFLFPLLDASPRDGFVSLKELQTWMMQQTEDNMVYRTAKELELQDKDKDGVITFEEYLPQFSKQDIEKNEKGHGEAGWWMEQFKNSDFDHNGSLDIEEFNNFLHPEDSRNGDTQRWVLKERMTGMDTNGDGKLEYKEFVKNAYEMYKEFAKFEKEEDENVPTPQLLFAEMDRDKDRFLVADELRPILQYLQPGEMSYAKFYSTFLCHEADEDKDGKLSLEEMLHHEDVFYKAVHHEDLDDEDYFDHDEL

SEQ ID NO: 81019 - protein, 301 aa, Arabidopsis thaliana
  peptide (1)..(301): Ceres Seq. ID no. 12658115
MPVFDPLVTRIERLSHEKEAGTKTVEAAKEEKDDMFEEYFAQERRLNTTMRIKFLFPLLDASPRDGFVSLKELQTWMMQQTEDNMVYRTAKELELQDKDKDGVITFEEYLPQFSKQDIEKNEKGHGEAGWWMEQFKNSDFDHNGSLDIEEFNNFLHPEDSRNGDTQRWVLKERMTGMDTNGDGKLEYKEFVKNAYEMYKEFAKFEKEEDENVPTPQLLFAEMDRDKDRFLVADELRPILQYLQPGEMSYAKFYSTFLCHEADEDKDGKLSLEEMLHHEDVFYKAVHHEDLDDEDYFDHDEL

SEQ ID NO: 81020 - protein, 267 aa, Arabidopsis thaliana
  peptide (1)..(267): Ceres Seq. ID no. 12658116
MFEEYFAQERRLNTTMRIKFLFPLLDASPRDGFVSLKELQTWMMQQTEDNMVYRTAKELELQDKDKDGVITFEEYLPQFSKQDIEKNEKGHGEAGWWMEQFKNSDFDHNGSLDIEEFNNFLHPEDSRNGDTQRWVLKERMTGMDTNGDGKLEYKEFVKNAYEMYKEFAKFEKEEDENVPTPQLLFAEMDRDKDRFLVADELRPILQYLQPGEMSYAKFYSTFLCHEADEDKDGKLSLEEMLHHEDVFYKAVHHEDLDDEDYFDHDEL

SEQ ID NO: 81021 - DNA, 1527 bp, Arabidopsis thaliana
  misc_feature (1)..(1527): Ceres Seq. ID no. 12658117
  misc_feature (1)..(1527): Ortholog of  Ceres SEQ ID NO 13600220 as cited in SEQ ID NO 0
atgaaacatttctctctacttttcatttttctggtcatcctcttggcaacaagctacagtgatgcctttaccagaaacagttttccaaaggatttcctcttcggagccgccacttctgcttatcagtgggaaggagctgttgctgaagatggaagaactcctagtgtctgggatactttctccaactcttacgatacaggtaatggagatgtaacatctgatgggtatcacaaatacaaggaagatgttaagctgatggcaacaatgggcttagaatcattcagattctctatctcctggtcaagacttatacctaatggaagaggactcattaatccaaaaggactattgttttacaacaatctcatcaaagacctaaaaagccatggaatcgaaccacatgttacactttaccactatgatcttcctcagtctcttgaagatgagtacggcggatggatcaaccgcaaaatcatagaagacttcactgcttatgcagatgtatgcttcagagagtttggggaggatgtgaagttatggactacaataaacgaagctacaattttcgccattggttcttatgaccaaggaaccgcgccgcctggacattgttctcctaataaattcgtcaattgttctactggaaattcttctacagaaccatatattgcaggccataacatattgctagctcatgcctctgcttcaaagttgtataaactaaagtacaagagtaagcagaaaggatccatagggcttagtatatttgcattcgggttatctccatatacaaactccaaggatgatgaaatcgcaactcaaagagctaaaactttcttatatggctggatgttgaagcctttggtatttggagactatccggatgaaatgaagaaaactgtgggatcgagattaccagttttctcagaggaagagtcagagcaagttaaaggatcatctgactttataggaattattcattacacaacattctatgtcacaaaccaccaaccttcagcttctctctttcccagcatgggtgaaggcttctttaaagacatgggaaattcttcttctttggatagccactgggaattcttcatttcttgtggtaaggctactccatggggtcttgaaggtattcttgagtatataaagcagagctataacaatcctccagtctatattcttgaaaatggtatgccgatggtacgcgattcgacactacaagacacacaaagaattgaatacattcaagcttacattgacgctgtactcaacgcaatgaagaatggatcggacacgagaggttactttgtatggtcgatggttgatgtgtatgagatattgagtggatatacgaccagcttcggaatgtaccatgtgaatttcagcgatcctggtcgcaagaggactccaaagctctctgcttcttggtacactggtttccttaatggtacaattgatgttgcttctcaagatactattcagttgtggagcaacttctctgtctcttcttcattgtaa

SEQ ID NO: 81022 - protein, 508 aa, Arabidopsis thaliana
  peptide (1)..(508): Ceres Seq. ID no. 12658118
MKHFSLLFIFLVILLATSYSDAFTRNSFPKDFLFGAATSAYQWEGAVAEDGRTPSVWDTFSNSYDTGNGDVTSDGYHKYKEDVKLMATMGLESFRFSISWSRLIPNGRGLINPKGLLFYNNLIKDLKSHGIEPHVTLYHYDLPQSLEDEYGGWINRKIIEDFTAYADVCFREFGEDVKLWTTINEATIFAIGSYDQGTAPPGHCSPNKFVNCSTGNSSTEPYIAGHNILLAHASASKLYKLKYKSKQKGSIGLSIFAFGLSPYTNSKDDEIATQRAKTFLYGWMLKPLVFGDYPDEMKKTVGSRLPVFSEEESEQVKGSSDFIGIIHYTTFYVTNHQPSASLFPSMGEGFFKDMGNSSSLDSHWEFFISCGKATPWGLEGILEYIKQSYNNPPVYILENGMPMVRDSTLQDTQRIEYIQAYIDAVLNAMKNGSDTRGYFVWSMVDVYEILSGYTTSFGMYHVNFSDPGRKRTPKLSASWYTGFLNGTIDVASQDTIQLWSNFSVSSSL

SEQ ID NO: 81023 - protein, 423 aa, Arabidopsis thaliana
  peptide (1)..(423): Ceres Seq. ID no. 12658119
MATMGLESFRFSISWSRLIPNGRGLINPKGLLFYNNLIKDLKSHGIEPHVTLYHYDLPQSLEDEYGGWINRKIIEDFTAYADVCFREFGEDVKLWTTINEATIFAIGSYDQGTAPPGHCSPNKFVNCSTGNSSTEPYIAGHNILLAHASASKLYKLKYKSKQKGSIGLSIFAFGLSPYTNSKDDEIATQRAKTFLYGWMLKPLVFGDYPDEMKKTVGSRLPVFSEEESEQVKGSSDFIGIIHYTTFYVTNHQPSASLFPSMGEGFFKDMGNSSSLDSHWEFFISCGKATPWGLEGILEYIKQSYNNPPVYILENGMPMVRDSTLQDTQRIEYIQAYIDAVLNAMKNGSDTRGYFVWSMVDVYEILSGYTTSFGMYHVNFSDPGRKRTPKLSASWYTGFLNGTIDVASQDTIQLWSNFSVSSSL

SEQ ID NO: 81024 - protein, 420 aa, Arabidopsis thaliana
  peptide (1)..(420): Ceres Seq. ID no. 12658120
MGLESFRFSISWSRLIPNGRGLINPKGLLFYNNLIKDLKSHGIEPHVTLYHYDLPQSLEDEYGGWINRKIIEDFTAYADVCFREFGEDVKLWTTINEATIFAIGSYDQGTAPPGHCSPNKFVNCSTGNSSTEPYIAGHNILLAHASASKLYKLKYKSKQKGSIGLSIFAFGLSPYTNSKDDEIATQRAKTFLYGWMLKPLVFGDYPDEMKKTVGSRLPVFSEEESEQVKGSSDFIGIIHYTTFYVTNHQPSASLFPSMGEGFFKDMGNSSSLDSHWEFFISCGKATPWGLEGILEYIKQSYNNPPVYILENGMPMVRDSTLQDTQRIEYIQAYIDAVLNAMKNGSDTRGYFVWSMVDVYEILSGYTTSFGMYHVNFSDPGRKRTPKLSASWYTGFLNGTIDVASQDTIQLWSNFSVSSSL

SEQ ID NO: 81025 - DNA, 1981 bp, Arabidopsis thaliana
  misc_feature (1)..(1981): Ceres Seq. ID no. 12658125
  misc_feature (1)..(1981): Ortholog of  Ceres SEQ ID NO 12587870 as cited in SEQ ID NO 63523
gcttgtctccgatggatcccaccatgaatccaactccaactccaagctccgccggcaacagtgtctgcacagatgaattgaccaaccttcccccggaggactcgccactcgacagcgagaaggatgatagcgttgacttcagccaggagcaaggatcggagtcaaatgaagctattgacactgagaatggttcaagatccgtagacaagaaccaatactctgaaactgaagttgtagttagagcaaaagatttacagacagaacctgattcactggatgatgatgtggagattgtgatcaaaaaccaacataagtattacatatactgcccttgctgtggtgaagatatcaccaaaacagtcaagctcgtgaagatatcagatcccaaacacacaaaagaccatgacaaagctgttgacagtgacactgagaatggttcaaaatccaaagacaagaacacaaaggttccatcatggttctctgattttattcagccgctgttttcttctgaagacagaggaaagaaaggggttgttgattcagagttactaggaacttacgaagatctcggtatcattggtgaggaaccgagcatagatgtcagtaacgagaaagacagaccgagttttccaaagtggtacctcgatgtttttgcttggttattcctctgtattattattgctctttctgtcctttcgacttctccaccgcctttcattcaaccacatctgcaattaccatctatgcctacattgaggatgccttctgcttctgtacttttgttacttcccacatctgcggtgttgcttctcttcattatttcaatgaggtcccgtttcactccgagatatcacaaggagaaaggcgaggtcgttcccaagtctactgattccaagtctcacgatgaccaagctgcaaatactgatcaagattttgacaagaaaacagacaacaaaagaaatcgcctaactcctatatacccttcatcactagagaaaccttccaagcaaactgtcaataaggaaactcaaaatcacgataaagaagctgcagatcctgaccaagatgtagacaaggaaacagagaaccaaaaaagtcacctaactccgatatatccttcaccactggagcaaccttccaagcaaattatcaataaggaaactcaaacagaacctatgttgccacctaatgctcaatcagagatcccaaatagtgttgaaccacgcaaaggcggtaataaagtagaaattctgaaaagtattgtgtatggaggtcttacagaatccatcacaagcctatgcacggtaacatctgcggcagcttctggtgcttcaactctgaacgttttagccttgggagttgccaatttgtcaagcggtcttcttctgactgttcacagcctccaagaactaataaacgagaaacccagaaaacaaaccaacactgatgattctccagaagaaggagaaggagaagaagatcgatacgaggaagtactcgggagaagagagtattcgaggattcacagagtgatcgcaatctcttctttcgtcatcttcggattgatcccacctttagtatacggtttctcgtttcgaaaaaagatggaaaagagacaagagtacaaggttttagctgtttacgcagtgtctctactctgcatcgtcttgctctcaatagcgaaagcttacgtgtcgaagaaacgcgattatgtcaagactctgtttcggtacacgacgacggcgacgacggcgtcgggattctctcaatttgtgggatacttggtgagtcaatggcttgagaaaagcgggttttatgatgattctccagaaactcaacgagtttgaaacgagttcttgttcgtcttctcttcacttcccctgttcttttcgtactctttacgtggcccaatttattttccttaaaagtggtagaattgtttgattttgaccccaagaaaaaaaactttttttgtgtgcta

SEQ ID NO: 81026 - protein, 614 aa, Arabidopsis thaliana
  peptide (1)..(614): Ceres Seq. ID no. 12658126
LSPMDPTMNPTPTPSSAGNSVCTDELTNLPPEDSPLDSEKDDSVDFSQEQGSESNEAIDTENGSRSVDKNQYSETEVVVRAKDLQTEPDSLDDDVEIVIKNQHKYYIYCPCCGEDITKTVKLVKISDPKHTKDHDKAVDSDTENGSKSKDKNTKVPSWFSDFIQPLFSSEDRGKKGVVDSELLGTYEDLGIIGEEPSIDVSNEKDRPSFPKWYLDVFAWLFLCIIIALSVLSTSPPPFIQPHLQLPSMPTLRMPSASVLLLLPTSAVLLLFIISMRSRFTPRYHKEKGEVVPKSTDSKSHDDQAANTDQDFDKKTDNKRNRLTPIYPSSLEKPSKQTVNKETQNHDKEAADPDQDVDKETENQKSHLTPIYPSPLEQPSKQIINKETQTEPMLPPNAQSEIPNSVEPRKGGNKVEILKSIVYGGLTESITSLCTVTSAAASGASTLNVLALGVANLSSGLLLTVHSLQELINEKPRKQTNTDDSPEEGEGEEDRYEEVLGRREYSRIHRVIAISSFVIFGLIPPLVYGFSFRKKMEKRQEYKVLAVYAVSLLCIVLLSIAKAYVSKKRDYVKTLFRYTTTATTASGFSQFVGYLVSQWLEKSGFYDDSPETQRV

SEQ ID NO: 81027 - protein, 611 aa, Arabidopsis thaliana
  peptide (1)..(611): Ceres Seq. ID no. 12658127
MDPTMNPTPTPSSAGNSVCTDELTNLPPEDSPLDSEKDDSVDFSQEQGSESNEAIDTENGSRSVDKNQYSETEVVVRAKDLQTEPDSLDDDVEIVIKNQHKYYIYCPCCGEDITKTVKLVKISDPKHTKDHDKAVDSDTENGSKSKDKNTKVPSWFSDFIQPLFSSEDRGKKGVVDSELLGTYEDLGIIGEEPSIDVSNEKDRPSFPKWYLDVFAWLFLCIIIALSVLSTSPPPFIQPHLQLPSMPTLRMPSASVLLLLPTSAVLLLFIISMRSRFTPRYHKEKGEVVPKSTDSKSHDDQAANTDQDFDKKTDNKRNRLTPIYPSSLEKPSKQTVNKETQNHDKEAADPDQDVDKETENQKSHLTPIYPSPLEQPSKQIINKETQTEPMLPPNAQSEIPNSVEPRKGGNKVEILKSIVYGGLTESITSLCTVTSAAASGASTLNVLALGVANLSSGLLLTVHSLQELINEKPRKQTNTDDSPEEGEGEEDRYEEVLGRREYSRIHRVIAISSFVIFGLIPPLVYGFSFRKKMEKRQEYKVLAVYAVSLLCIVLLSIAKAYVSKKRDYVKTLFRYTTTATTASGFSQFVGYLVSQWLEKSGFYDDSPETQRV

SEQ ID NO: 81028 - protein, 607 aa, Arabidopsis thaliana
  peptide (1)..(607): Ceres Seq. ID no. 12658128
MNPTPTPSSAGNSVCTDELTNLPPEDSPLDSEKDDSVDFSQEQGSESNEAIDTENGSRSVDKNQYSETEVVVRAKDLQTEPDSLDDDVEIVIKNQHKYYIYCPCCGEDITKTVKLVKISDPKHTKDHDKAVDSDTENGSKSKDKNTKVPSWFSDFIQPLFSSEDRGKKGVVDSELLGTYEDLGIIGEEPSIDVSNEKDRPSFPKWYLDVFAWLFLCIIIALSVLSTSPPPFIQPHLQLPSMPTLRMPSASVLLLLPTSAVLLLFIISMRSRFTPRYHKEKGEVVPKSTDSKSHDDQAANTDQDFDKKTDNKRNRLTPIYPSSLEKPSKQTVNKETQNHDKEAADPDQDVDKETENQKSHLTPIYPSPLEQPSKQIINKETQTEPMLPPNAQSEIPNSVEPRKGGNKVEILKSIVYGGLTESITSLCTVTSAAASGASTLNVLALGVANLSSGLLLTVHSLQELINEKPRKQTNTDDSPEEGEGEEDRYEEVLGRREYSRIHRVIAISSFVIFGLIPPLVYGFSFRKKMEKRQEYKVLAVYAVSLLCIVLLSIAKAYVSKKRDYVKTLFRYTTTATTASGFSQFVGYLVSQWLEKSGFYDDSPETQRV

SEQ ID NO: 81029 - DNA, 2179 bp, Arabidopsis thaliana
  misc_feature (1)..(2179): Ceres Seq. ID no. 12658133
  misc_feature (1)..(2179): Ortholog of  Ceres SEQ ID NO 14312605 as cited in SEQ ID NO 0
gaagagacatcagatcttatcaaaaccctagctttcggtgtctctctcgatcctttagctcaatcgaaaactgaatttaggagctgcgatgggttccagatctcgtaatgataatttccagtccggcgatggcgctagtcctgggaaaatattcattggaggattgcacaaagacacgactaatactgtgttcaataagcactttggcaagtacggggagattacagattctgtcattatgcgagatcgacatactggacaacctaggggtttcggtttcatcaccttcgctgacccttctgttgttgacaaagttatcgaagatactcatgtcatcaatggcaaacaggttgagatcaaaaggactattccgaaaggtgctggtggcaatcagtcaaaggacatcaaaacaaagaagattttcgttggtggtataccctcaacggttacagaagatgaacttaaggacttctttgccaagtatgggaacgtggtggagcaccaggttattcgagaccatgaaacaaacaggtccagaggttttggttttgtaatttttgatagcgaagaagtcgtagatgaattattgtccaaaggaaacatgatcgatatggcagacactcaggtaagcttgtacaaatggggattagaattttggttcatgatgacatatttatcttggtttcaatttgatattttctccttgttcctttcattatacacgtttaacttagttagaattctacccactagcttaccaaatgtaaggagcttgtcacagtaagataggaaatccctgctatagtttgggtccttagcatagctaggttaattaagttgctttgttgtaggtggagatcaagaaagctgaaccaaagaaatctctaaaccgttcacctccttcttacggtagtcaccctagaggtcgttcttctaacgatagttatgcaagttatggtggaccttacggaggttttgatggagggtatggtcatcctccaggtcccattaggtcacatggaggtcctgctagtagatatgctgggggatatgggtatggtcgtggcagtgtaggccctgaatttggaggaggttataataattatgggggtggtagtttaggaggttaccggaatgaaccaccccttggctattctagtcgttttggaccctatgggagtgggtttggtggtgagggatatggccgtggaggagaaggagcctatttgggatatcctcgtggaggaggggaaggctatgggggatatggtgggcctggttacggcggtgcatatgaatctggtggcccaggtggcagttatgaaggagcaggtggtccatatgggaggggttatagtagcagtagtcgataccatccgtatgcaaggtagggtcgaggtaatagcaatcagttggagctatagaagcttctctcacaggttcctctagattgttccaattgctctaggtgcattctagagttatcatgtagcgccaacatcaggaagggttgctaaggacaggaagagcatcaaaaagcttttattagtcatcttttagttgtgtgtttacctaatttaagtgttgtcttatctctataacttagattgtgttatgtagactttagcatatttgggcttggagtttgtttctcactggcacaagaatgatttatcatttggtagtcttgttagatgatcaattactcgcttagcttagttttcacaatcatacgaattagcttaagaagctctgcaaaatgtgcactcatctattctttagagctcaagttgaatgctttatgtggtctcttgtatctctgtacattttgttgtgctgaacaaaggtttgacggcagttagtgcatgtgtaagtaggcatatttttgtcagctgcatacgtaggttctagctacaaattggaattgtatgtgtttgaaaacgtaaaatcaattataaatgtttttgaaaatcatctatacaagcatggttatttggttcttgtttccttattttttcgggtaagggccacggataattggttagacattggttctaataatgtgggttttgttatctgtaatttctcgtcaaaatgatgtactgtatcattaaatgaatatcacttattgtacatgcttttataagttaattgaaatccaaactcttttacgttttaa

SEQ ID NO: 81030 - protein, 231 aa, Arabidopsis thaliana
  peptide (1)..(231): Ceres Seq. ID no. 12658134
MGSRSRNDNFQSGDGASPGKIFIGGLHKDTTNTVFNKHFGKYGEITDSVIMRDRHTGQPRGFGFITFADPSVVDKVIEDTHVINGKQVEIKRTIPKGAGGNQSKDIKTKKIFVGGIPSTVTEDELKDFFAKYGNVVEHQVIRDHETNRSRGFGFVIFDSEEVVDELLSKGNMIDMADTQVSLYKWGLEFWFMMTYLSWFQFDIFSLFLSLYTFNLVRILPTSLPNVRSLSQ

SEQ ID NO: 81031 - protein, 181 aa, Arabidopsis thaliana
  peptide (1)..(181): Ceres Seq. ID no. 12658135
MRDRHTGQPRGFGFITFADPSVVDKVIEDTHVINGKQVEIKRTIPKGAGGNQSKDIKTKKIFVGGIPSTVTEDELKDFFAKYGNVVEHQVIRDHETNRSRGFGFVIFDSEEVVDELLSKGNMIDMADTQVSLYKWGLEFWFMMTYLSWFQFDIFSLFLSLYTFNLVRILPTSLPNVRSLSQ

SEQ ID NO: 81032 - protein, 148 aa, Arabidopsis thaliana
  peptide (1)..(148): Ceres Seq. ID no. 12658136
MIISSPAMALVLGKYSLEDCTKTRLILCSISTLASTGRLQILSLCEIDILDNLGVSVSSPSLTLLLLTKLSKILMSSMANRLRSKGLFRKVLVAISQRTSKQRRFSLVVYPQRLQKMNLRTSLPSMGTWWSTRLFETMKQTGPEVLVL

SEQ ID NO: 81033 - DNA, 870 bp, Arabidopsis thaliana
  misc_feature (1)..(870): Ceres Seq. ID no. 12658137
  misc_feature (1)..(870): Ortholog of  Ceres SEQ ID NO 14315989 as cited in SEQ ID NO 57571
atgtttaatcaatccagctctgtctcgttaatctacgtagttgaaatcgccaaaacaccacaaaacgtagacgtcacttggtctaaaaccacctcctcacattctttaaccatcaaaatcgagaacgtcaaagacgagcaacagaatcatcatcaaccggtgaagatagatctttcaggttcttcgttttgggccaaaaagggtctcaagagcttagaagctaacggaactagagtcgacgtatactgggattttcgtcaagccaaattctcgaacttccctgaaccttcctctggcttctacgtctctctcgtatcccaaaacgcaaccgttttaacgatcggggatttaaggaacgaagctttaaagaggacgaagaagaacccttcagctacagaagctgccttggtctccaagcaagaacacgtccacgggaaacgcgttttctacacgcggacggcgtttggcggtggggagtcgaggcgggagaatgaggtggtgatcgaaacatctctgtcgggtcctagcgatccagagatgtggatcacggtggacggtgtgccggcgattaggatcatgaatttgaattggagatttagagggaatgaggttgtgactgtgagtgatggtgtttctttggagatcttttgggacgttcatgattggctgtttgaaccctctggttcgtctagtgggttgtttgttttcaagcctaaagctggatttgaatctaaatgtcttagttttaatggtggctatggtgatggtgaaggtgaggatcatgatgtggaagatgacgattcgtcgcccaagtattgtcatgtcctatatgccgtcaaagaactagaatttccatgtcaaaaaaattag

SEQ ID NO: 81034 - protein, 289 aa, Arabidopsis thaliana
  peptide (1)..(289): Ceres Seq. ID no. 12658138
MFNQSSSVSLIYVVEIAKTPQNVDVTWSKTTSSHSLTIKIENVKDEQQNHHQPVKIDLSGSSFWAKKGLKSLEANGTRVDVYWDFRQAKFSNFPEPSSGFYVSLVSQNATVLTIGDLRNEALKRTKKNPSATEAALVSKQEHVHGKRVFYTRTAFGGGESRRENEVVIETSLSGPSDPEMWITVDGVPAIRIMNLNWRFRGNEVVTVSDGVSLEIFWDVHDWLFEPSGSSSGLFVFKPKAGFESKCLSFNGGYGDGEGEDHDVEDDDSSPKYCHVLYAVKELEFPCQKN

SEQ ID NO: 81035 - DNA, 1791 bp, Arabidopsis thaliana
  misc_feature (1)..(1791): Ceres Seq. ID no. 12658161
  misc_feature (1)..(1791): Ortholog of  Ceres SEQ ID NO 12626078 as cited in SEQ ID NO 69113
atggcatcgacattcactgccacgtcttcccttggttcgttgcttgctcccaatgctatcaagttgtcttctgcgactagcatctcttcaagctcgtttggaaggagacataacgtgtgcgtcagaagatcccgtcctgccatagtatgtgcagccaaggagttgcatttcaataaggatgggactaccataaggaaacttcagactggtgttaacaagctcgcggaccttgttggtgtcacacttggaccaaaagggagaaatgttgttcttgagagcaagtatggatccccaagaattgttaatgatggtgtcactgttgcgagggaggtcgagttggaggacccggttgagaacattggtgcaaagcttgtaaggcaagcagctgcaaagaccaatgacttggctggtgacggtacaacaacatctgttgttcttgcacaaggttttattgctgagggtgtcaaggtggtggctgcaggtgcgaaccctgtattgatcactagggggattgagaagactgcaaaggctttggttaacgagctgaaacttatgtctaaggaggttgaagacagtgaacttgctgatgtggcagctgttagtgcgggtaataaccacgaagttggaagtatgattgctgaagcaatgagcaaagtgggcaggaagggtgtggtgaccctggaggagggaaaaagcgctgagaacaacctttatgttgtggaaggaatgcaatttgaccgtggttatatctccccatactttgtgacagacagtgagaaaatgtctgttgagtatgacaattgcaagttgcttcttgttgacaagaaagtaaccaatgcaagggatcttgttggggttctagaggatgcgattagaggcggatacccaatcctcataattgcagaagatattgaacaagaagccttagctactcttgttgttaacaagcttagaggcacactgaagattgcagctctcaaagctcctggatttggagagcgcaagagccaataccttgacgatattgccattctaactggagcaactgtgatcagagaggaagttggtctttctcttgacaaagctggaaaagaggttctgggtaacgcttccaaggttgtcctgacaaaggaaatgacaacaattgtgggtgatgggaccacacaagaagcagtgaacaagcgtgttgtacagattaggaatcttattgagcaagcggagcaagactacgagaaggaaaaattaaatgagagaattgcgaagctctctggtggagttgctgtaattcaggttggagctcaaactgagacagagctcaaagaaaagaagctgagagtggaagatgctcttaatgctacaaaggctgctgttgaggaaggtattgtcgttggtggtggttgcactctgctccggcttgcatcaaaggtcgatgccatcaaggatacccttgaaaatgatgaagaaaaggttggagcggaaattgttaaaagagcactgagttaccctctgaaattgatagctaagaatgctggtgttaatggaagtgttgtcagcgagaaggtgctggctaacgataatgtgaaatttggatacaatgctgcaaccggcaagtatgaagacctgatggctgcaggcatcatcgacccgacaaaggttgtgagatgttgcttagaacatgccgcctcagttgcaaagacgttcttgatgtctgactgtgtggttgttgagatcccagagccagagccagttcctgctggtaacccaatggacaactcaggttatggatactaa

SEQ ID NO: 81036 - protein, 596 aa, Arabidopsis thaliana
  peptide (1)..(596): Ceres Seq. ID no. 12658162
MASTFTATSSLGSLLAPNAIKLSSATSISSSSFGRRHNVCVRRSRPAIVCAAKELHFNKDGTTIRKLQTGVNKLADLVGVTLGPKGRNVVLESKYGSPRIVNDGVTVAREVELEDPVENIGAKLVRQAAAKTNDLAGDGTTTSVVLAQGFIAEGVKVVAAGANPVLITRGIEKTAKALVNELKLMSKEVEDSELADVAAVSAGNNHEVGSMIAEAMSKVGRKGVVTLEEGKSAENNLYVVEGMQFDRGYISPYFVTDSEKMSVEYDNCKLLLVDKKVTNARDLVGVLEDAIRGGYPILIIAEDIEQEALATLVVNKLRGTLKIAALKAPGFGERKSQYLDDIAILTGATVIREEVGLSLDKAGKEVLGNASKVVLTKEMTTIVGDGTTQEAVNKRVVQIRNLIEQAEQDYEKEKLNERIAKLSGGVAVIQVGAQTETELKEKKLRVEDALNATKAAVEEGIVVGGGCTLLRLASKVDAIKDTLENDEEKVGAEIVKRALSYPLKLIAKNAGVNGSVVSEKVLANDNVKFGYNAATGKYEDLMAAGIIDPTKVVRCCLEHAASVAKTFLMSDCVVVEIPEPEPVPAGNPMDNSGYGY

SEQ ID NO: 81037 - protein, 412 aa, Arabidopsis thaliana
  peptide (1)..(412): Ceres Seq. ID no. 12658163
MSKEVEDSELADVAAVSAGNNHEVGSMIAEAMSKVGRKGVVTLEEGKSAENNLYVVEGMQFDRGYISPYFVTDSEKMSVEYDNCKLLLVDKKVTNARDLVGVLEDAIRGGYPILIIAEDIEQEALATLVVNKLRGTLKIAALKAPGFGERKSQYLDDIAILTGATVIREEVGLSLDKAGKEVLGNASKVVLTKEMTTIVGDGTTQEAVNKRVVQIRNLIEQAEQDYEKEKLNERIAKLSGGVAVIQVGAQTETELKEKKLRVEDALNATKAAVEEGIVVGGGCTLLRLASKVDAIKDTLENDEEKVGAEIVKRALSYPLKLIAKNAGVNGSVVSEKVLANDNVKFGYNAATGKYEDLMAAGIIDPTKVVRCCLEHAASVAKTFLMSDCVVVEIPEPEPVPAGNPMDNSGYGY

SEQ ID NO: 81038 - protein, 386 aa, Arabidopsis thaliana
  peptide (1)..(386): Ceres Seq. ID no. 12658164
MIAEAMSKVGRKGVVTLEEGKSAENNLYVVEGMQFDRGYISPYFVTDSEKMSVEYDNCKLLLVDKKVTNARDLVGVLEDAIRGGYPILIIAEDIEQEALATLVVNKLRGTLKIAALKAPGFGERKSQYLDDIAILTGATVIREEVGLSLDKAGKEVLGNASKVVLTKEMTTIVGDGTTQEAVNKRVVQIRNLIEQAEQDYEKEKLNERIAKLSGGVAVIQVGAQTETELKEKKLRVEDALNATKAAVEEGIVVGGGCTLLRLASKVDAIKDTLENDEEKVGAEIVKRALSYPLKLIAKNAGVNGSVVSEKVLANDNVKFGYNAATGKYEDLMAAGIIDPTKVVRCCLEHAASVAKTFLMSDCVVVEIPEPEPVPAGNPMDNSGYGY

SEQ ID NO: 81039 - DNA, 800 bp, Arabidopsis thaliana
  misc_feature (1)..(800): Ceres Seq. ID no. 12658177
  misc_feature (1)..(800): Ortholog of  Ceres SEQ ID NO 12584790 as cited in SEQ ID NO 62648
gatggagtgcgagcgaaacgatcaagtggtggattggataagcagagagtatcggaagacgacgacgacgggagatgatgacacctggcggaagcgggaggttgagaccgttaccgacggcgatgtacgccggatattcaggaacggcgtcgtcttgggtagcgaagacttcagtttctgcgtcagggaagaggatacagagggagatggctgagcttaacattgatccacctcctgattgctcagctggtccaaaaggagataatctctaccattggatcgccaccatcattggtccttcgggaactccctatgaaggagggatctttttcctggatataattttcccatctgattatccattcaagccacctaagttggtgttcaagactcggatttaccattgcaatgttgatactgcgggagatttaagtgtgaacattctaagagatagttggagtccagcccttacaatcactaaagtcttacaagccatcagatctatcttcttaaaacctgaaccctatagtccagctttaccggtgattgcacggctctacttgacagatagagaaaagcatgacgaggtagccaaagaatggacattgcgatttgccaagtgagatcttcaatacgaggaaaagacaactgatgtattataaatacacctagttctttggttagttaatggtcatcaatgtacattcataaaagtggaaccacaatgttagatggccaagaaaattgtttgctcagataataggcaacaatgtgaggtaggaccaatcctcaacaactcc

SEQ ID NO: 81040 - protein, 182 aa, Arabidopsis thaliana
  peptide (1)..(182): Ceres Seq. ID no. 12658178
MMTPGGSGRLRPLPTAMYAGYSGTASSWVAKTSVSASGKRIQREMAELNIDPPPDCSAGPKGDNLYHWIATIIGPSGTPYEGGIFFLDIIFPSDYPFKPPKLVFKTRIYHCNVDTAGDLSVNILRDSWSPALTITKVLQAIRSIFLKPEPYSPALPVIARLYLTDREKHDEVAKEWTLRFAK

SEQ ID NO: 81041 - protein, 181 aa, Arabidopsis thaliana
  peptide (1)..(181): Ceres Seq. ID no. 12658179
MTPGGSGRLRPLPTAMYAGYSGTASSWVAKTSVSASGKRIQREMAELNIDPPPDCSAGPKGDNLYHWIATIIGPSGTPYEGGIFFLDIIFPSDYPFKPPKLVFKTRIYHCNVDTAGDLSVNILRDSWSPALTITKVLQAIRSIFLKPEPYSPALPVIARLYLTDREKHDEVAKEWTLRFAK

SEQ ID NO: 81042 - protein, 166 aa, Arabidopsis thaliana; identical to SEQ ID NO: 78212
  peptide (1)..(166): Ceres Seq. ID no. 12658180

SEQ ID NO: 81043 - DNA, 1086 bp, Arabidopsis thaliana
  misc_feature (1)..(1086): Ceres Seq. ID no. 12658181
  misc_feature (1)..(1086): Ortholog of  Ceres SEQ ID NO 12578315 as cited in SEQ ID NO 62451
  misc_feature (1)..(1086): Ortholog of  Ceres SEQ ID NO 13597295 as cited in SEQ ID NO 63743
  misc_feature (1)..(1086): Ortholog of  Ceres SEQ ID NO 12617090 as cited in SEQ ID NO 64005
  misc_feature (1)..(1086): Ortholog of  Ceres SEQ ID NO 13597439 as cited in SEQ ID NO 64081
  misc_feature (1)..(1086): Ortholog of  Ceres SEQ ID NO 13597233 as cited in SEQ ID NO 64370
  misc_feature (1)..(1086): Ortholog of  Ceres SEQ ID NO 13584577 as cited in SEQ ID NO 65298
  misc_feature (1)..(1086): Ortholog of  Ceres SEQ ID NO 13598327 as cited in SEQ ID NO 68040
  misc_feature (1)..(1086): Ortholog of  Ceres SEQ ID NO 13599438 as cited in SEQ ID NO 0
atggctccaacactcttgacaacccaattctcaaatccagctgaagtaaccgactttgtagtctacaaaggaaatggtgttaagggtttatcagaaacaggaatcaaagctcttccagaacaatacattcagccacttgaagaacgactcatcaacaaattcgtcaacgaaacagatgaagccattccagttatcgatatgtcgaaccctgatgaggacagagtcgctgaagctgtttgtgatgctgctgagaaatgggggttctttcaagtgatcaatcatggagttcctttggaagttcttgatgacgtcaaggctgcgactcacaagttcttcaatctccctgttgaagagaagcgcaagttcactaaagagaattcgctgtcgacgactgttaggtttgggacgagttttagtcctcttgcagagcaagcgcttgagtggaaagattatctcagcctcttctttgtctctgaagctgaagctgaacagttctggcctgatatctgcaggaatgaaacgttagagtacattaacaagtcaaagaagatggtgaggaggcttctagagtatttgggaaagaatctcaatgttaaagagcttgacgagacgaaagaatcactctttatgggctcgattcgagtcaaccttaactactaccccatctgccctaatccggacctaacagttggtgttggtcgccactcagacgtctcttctctcaccattctcttacaagaccagatcggtggtctacacgtgcgttctctggcttcagggaactgggttcacgtgcctccggttgctggatcttttgtgatcaacatcggagatgcgatgcagatcatgagcaatggtctgtacaagagcgtggagcatcgtgtcttagccaatggttacaataatagaatctctgttcctatctttgtgaacccaaaaccagagtcagttattggtcctctacctgaggtgattgcaaacggagaggaaccgatttacagagacgtcctgtactctgattacgtcaagtatttcttcaggaaggcacacgatggaaagaaaaccgtcgattacgccaagatctga

SEQ ID NO: 81044 - protein, 361 aa, Arabidopsis thaliana
  peptide (1)..(361): Ceres Seq. ID no. 12658182
MAPTLLTTQFSNPAEVTDFVVYKGNGVKGLSETGIKALPEQYIQPLEERLINKFVNETDEAIPVIDMSNPDEDRVAEAVCDAAEKWGFFQVINHGVPLEVLDDVKAATHKFFNLPVEEKRKFTKENSLSTTVRFGTSFSPLAEQALEWKDYLSLFFVSEAEAEQFWPDICRNETLEYINKSKKMVRRLLEYLGKNLNVKELDETKESLFMGSIRVNLNYYPICPNPDLTVGVGRHSDVSSLTILLQDQIGGLHVRSLASGNWVHVPPVAGSFVINIGDAMQIMSNGLYKSVEHRVLANGYNNRISVPIFVNPKPESVIGPLPEVIANGEEPIYRDVLYSDYVKYFFRKAHDGKKTVDYAKI

SEQ ID NO: 81045 - protein, 295 aa, Arabidopsis thaliana
  peptide (1)..(295): Ceres Seq. ID no. 12658183
MSNPDEDRVAEAVCDAAEKWGFFQVINHGVPLEVLDDVKAATHKFFNLPVEEKRKFTKENSLSTTVRFGTSFSPLAEQALEWKDYLSLFFVSEAEAEQFWPDICRNETLEYINKSKKMVRRLLEYLGKNLNVKELDETKESLFMGSIRVNLNYYPICPNPDLTVGVGRHSDVSSLTILLQDQIGGLHVRSLASGNWVHVPPVAGSFVINIGDAMQIMSNGLYKSVEHRVLANGYNNRISVPIFVNPKPESVIGPLPEVIANGEEPIYRDVLYSDYVKYFFRKAHDGKKTVDYAKI

SEQ ID NO: 81046 - DNA, 498 bp, Arabidopsis thaliana
  misc_feature (1)..(498): Ceres Seq. ID no. 12658196
  misc_feature (1)..(498): Ortholog of  Ceres SEQ ID NO 13598935 as cited in SEQ ID NO 1239
  misc_feature (1)..(498): Ortholog of  Ceres SEQ ID NO 13664149 as cited in SEQ ID NO 61490
atgccaaacctcatcctcatcctcgccgctcaaatcctcctctttaccaccgttgcctccgttggagattttgctaaagaaatgaacccgaaaaggttccacaagaaggagaaactcacccatctccgaaaggcggtttcaaactcctcaacctccttcggatcaatcacaatgacggacaacgcactaacatctgatgtgcccgttaactcgactgtggtaggccagtcccaaggtttttacgctggagcggcccaacgtgagctaggcttcttgatggcgatgaatttcgctttcaaaacagggaagtacaatgggagtacgatcacaattcttggccggaacacggtgttctcgaaggttagggaaatgacggtggtcggaggaagtggaatcttccggttagctagaggttatgtcgaggctaggactaagtggttcgatcctaagacaggagacgccactgttgaatacaattgttatgtcttgcattactga

SEQ ID NO: 81047 - protein, 165 aa, Arabidopsis thaliana
  peptide (1)..(165): Ceres Seq. ID no. 12658197
MPNLILILAAQILLFTTVASVGDFAKEMNPKRFHKKEKLTHLRKAVSNSSTSFGSITMTDNALTSDVPVNSTVVGQSQGFYAGAAQRELGFLMAMNFAFKTGKYNGSTITILGRNTVFSKVREMTVVGGSGIFRLARGYVEARTKWFDPKTGDATVEYNCYVLHY

SEQ ID NO: 81048 - protein, 138 aa, Arabidopsis thaliana
  peptide (1)..(138): Ceres Seq. ID no. 12658198
MNPKRFHKKEKLTHLRKAVSNSSTSFGSITMTDNALTSDVPVNSTVVGQSQGFYAGAAQRELGFLMAMNFAFKTGKYNGSTITILGRNTVFSKVREMTVVGGSGIFRLARGYVEARTKWFDPKTGDATVEYNCYVLHY

SEQ ID NO: 81049 - protein, 108 aa, Arabidopsis thaliana
  peptide (1)..(108): Ceres Seq. ID no. 12658199
MTDNALTSDVPVNSTVVGQSQGFYAGAAQRELGFLMAMNFAFKTGKYNGSTITILGRNTVFSKVREMTVVGGSGIFRLARGYVEARTKWFDPKTGDATVEYNCYVLHY

SEQ ID NO: 81050 - DNA, 567 bp, Arabidopsis thaliana
  misc_feature (1)..(567): Ceres Seq. ID no. 12658215
  misc_feature (1)..(567): Ortholog of  Ceres SEQ ID NO 14307484 as cited in SEQ ID NO 59427
atggcgaacaacgacgagattaccacgtcgtctcatgcatctccggcagtgaatcacgagtctatctcacgcgctaagcaacgtatcaaagacggactagccacgcgccgctcctggagggtgatgttcgatttacactccacgggactacctcacggcgtctccgatgttttctcaagaatcaagacaaatcttgcttacttccgtagtaattacgcaatcgtaatcttgaacgtcatattcttcagcttgatttggcatccgacctcgctcatcgtctttaccggtttggttttcctatggatcttcctttattttctccgtgatgtgcctctcaaggtgttcaggtttcaaatcgacgatcgtgcggtcttgattggtctatcggtgattaccatcgttctacttctattgaccaacgcgacgtttaatattgttgcggcgttgatggccggagctgtgttggttctgatccatgcggtgattaggaagacggatgatctttttttggatgaagaagcggcgacgactgagacttcaggactgacgtcacacccttcgtcttaa

SEQ ID NO: 81051 - protein, 188 aa, Arabidopsis thaliana
  peptide (1)..(188): Ceres Seq. ID no. 12658216
MANNDEITTSSHASPAVNHESISRAKQRIKDGLATRRSWRVMFDLHSTGLPHGVSDVFSRIKTNLAYFRSNYAIVILNVIFFSLIWHPTSLIVFTGLVFLWIFLYFLRDVPLKVFRFQIDDRAVLIGLSVITIVLLLLTNATFNIVAALMAGAVLVLIHAVIRKTDDLFLDEEAATTETSGLTSHPSS

SEQ ID NO: 81052 - protein, 147 aa, Arabidopsis thaliana
  peptide (1)..(147): Ceres Seq. ID no. 12658217
MFDLHSTGLPHGVSDVFSRIKTNLAYFRSNYAIVILNVIFFSLIWHPTSLIVFTGLVFLWIFLYFLRDVPLKVFRFQIDDRAVLIGLSVITIVLLLLTNATFNIVAALMAGAVLVLIHAVIRKTDDLFLDEEAATTETSGLTSHPSS

SEQ ID NO: 81053 - DNA, 1710 bp, Arabidopsis thaliana
  misc_feature (1)..(1710): Ceres Seq. ID no. 12658234
  misc_feature (1)..(1710): Ortholog of  Ceres SEQ ID NO 14313636 as cited in SEQ ID NO 64205
atggctaatatagtttggtgtaacattgccatgttcttgttggtctcgttgtttctcactgacgatgctgttgttgttcttgatgccttggacaacgttcccaataatatcaagaaccaaccttaccgaaccggttatcatttccagcctcccaaaaattggatgaacgggcctatgatatacaaaggaatctatcatctattctatcaatggaaccaaaacggcgccgtcatggacgttaacaaaaccgtatggggccatgcaacatcaacggatctaatcaactggatcacactttctccagcaatcagaccatctcgaccgtccgatattaacggatgctggtccggctccgtcacgattctccctaatggcaaacctgtaattctttacaccggcaacgaccgttataaccgccaggtccaaaacttagttaaacctaaaaacctcaccgatccatatctacggcactggaccaaatcgccggaaaatcccctcgtgacacctagccccgtcaaccacatcaactccagcgcgtttcgtgatccaaccaccgcgtggtttggccgtgacgggcgttggcgcataaccaccggaagccaagaaggtcgacgtggattagcgattctacacacgagcaaagatttcgtaatatggaagcaatctccaaagcctcttcattaccacgacggtaccggaatgtgggagtgccctgattttttcccggtggctagaactgattcacggggcctagatacgtctttttcaagtgggccgatggttaaacacgtccttaaagtgagcttaacagatacgtttaatgattactacacgattggtacgtacgatgaagtgagagatgtctacgtaccggacaagggttttgttcaggacgaaacggctccgagatatgattacggcaaattttatgcgtcgaaaacattttacgactctgttaatcagcgcaggattttgtggggttgggttaacgagtcgtcaccggagaaagataacatcaagaagggttgggccggtttacaggctattcctaggaaagtatggcttgatgaatcaggaaagagattggtgcaatggccggttaaggaaatagagaggttacgtacaacgcaagtcaagtggggaaacaaactattgaaaggagggtcggtaatggaggttcatggagtcacagctccacaagcagatgtggaagttttcttcaaagtgagtggttttgacttagagaaagcagatgtgattgaaccgggctggaccgatccgcaattgatctgcagtcagaggaatgcgtcatcaggtttaggtccattcggtttaatggttctagcttccaagaacatggaagagtatacatcggtcaatatcagaatcttcagagctggtgagaatagtaaggagcacgtagtggtcatgtgcagtgaccaaagcacatcaagtttagagaaagggaatgataaaacaacttatggtgcttttttagatatctctccttatcaaccaatctctctcaggactttgattgataaatcaatagtggagagctttggtgggaaagggaaaacatgtattacctcgagagtttatccaaaattggcaataggagaaagaacacatctctttgcttttaacaagggatctcaaaatgttaatgttttaagcctaagtgcttggagcatgaagtcttctctttaa

SEQ ID NO: 81054 - protein, 569 aa, Arabidopsis thaliana
  peptide (1)..(569): Ceres Seq. ID no. 12658235
MANIVWCNIAMFLLVSLFLTDDAVVVLDALDNVPNNIKNQPYRTGYHFQPPKNWMNGPMIYKGIYHLFYQWNQNGAVMDVNKTVWGHATSTDLINWITLSPAIRPSRPSDINGCWSGSVTILPNGKPVILYTGNDRYNRQVQNLVKPKNLTDPYLRHWTKSPENPLVTPSPVNHINSSAFRDPTTAWFGRDGRWRITTGSQEGRRGLAILHTSKDFVIWKQSPKPLHYHDGTGMWECPDFFPVARTDSRGLDTSFSSGPMVKHVLKVSLTDTFNDYYTIGTYDEVRDVYVPDKGFVQDETAPRYDYGKFYASKTFYDSVNQRRILWGWVNESSPEKDNIKKGWAGLQAIPRKVWLDESGKRLVQWPVKEIERLRTTQVKWGNKLLKGGSVMEVHGVTAPQADVEVFFKVSGFDLEKADVIEPGWTDPQLICSQRNASSGLGPFGLMVLASKNMEEYTSVNIRIFRAGENSKEHVVVMCSDQSTSSLEKGNDKTTYGAFLDISPYQPISLRTLIDKSIVESFGGKGKTCITSRVYPKLAIGERTHLFAFNKGSQNVNVLSLSAWSMKSSL

SEQ ID NO: 81055 - protein, 559 aa, Arabidopsis thaliana
  peptide (1)..(559): Ceres Seq. ID no. 12658236
MFLLVSLFLTDDAVVVLDALDNVPNNIKNQPYRTGYHFQPPKNWMNGPMIYKGIYHLFYQWNQNGAVMDVNKTVWGHATSTDLINWITLSPAIRPSRPSDINGCWSGSVTILPNGKPVILYTGNDRYNRQVQNLVKPKNLTDPYLRHWTKSPENPLVTPSPVNHINSSAFRDPTTAWFGRDGRWRITTGSQEGRRGLAILHTSKDFVIWKQSPKPLHYHDGTGMWECPDFFPVARTDSRGLDTSFSSGPMVKHVLKVSLTDTFNDYYTIGTYDEVRDVYVPDKGFVQDETAPRYDYGKFYASKTFYDSVNQRRILWGWVNESSPEKDNIKKGWAGLQAIPRKVWLDESGKRLVQWPVKEIERLRTTQVKWGNKLLKGGSVMEVHGVTAPQADVEVFFKVSGFDLEKADVIEPGWTDPQLICSQRNASSGLGPFGLMVLASKNMEEYTSVNIRIFRAGENSKEHVVVMCSDQSTSSLEKGNDKTTYGAFLDISPYQPISLRTLIDKSIVESFGGKGKTCITSRVYPKLAIGERTHLFAFNKGSQNVNVLSLSAWSMKSSL

SEQ ID NO: 81056 - protein, 515 aa, Arabidopsis thaliana
  peptide (1)..(515): Ceres Seq. ID no. 12658237
MNGPMIYKGIYHLFYQWNQNGAVMDVNKTVWGHATSTDLINWITLSPAIRPSRPSDINGCWSGSVTILPNGKPVILYTGNDRYNRQVQNLVKPKNLTDPYLRHWTKSPENPLVTPSPVNHINSSAFRDPTTAWFGRDGRWRITTGSQEGRRGLAILHTSKDFVIWKQSPKPLHYHDGTGMWECPDFFPVARTDSRGLDTSFSSGPMVKHVLKVSLTDTFNDYYTIGTYDEVRDVYVPDKGFVQDETAPRYDYGKFYASKTFYDSVNQRRILWGWVNESSPEKDNIKKGWAGLQAIPRKVWLDESGKRLVQWPVKEIERLRTTQVKWGNKLLKGGSVMEVHGVTAPQADVEVFFKVSGFDLEKADVIEPGWTDPQLICSQRNASSGLGPFGLMVLASKNMEEYTSVNIRIFRAGENSKEHVVVMCSDQSTSSLEKGNDKTTYGAFLDISPYQPISLRTLIDKSIVESFGGKGKTCITSRVYPKLAIGERTHLFAFNKGSQNVNVLSLSAWSMKSSL

SEQ ID NO: 81057 - DNA, 1955 bp, Arabidopsis thaliana
  misc_feature (1)..(1955): Ceres Seq. ID no. 12658238
  misc_feature (1)..(1955): Ortholog of  Ceres SEQ ID NO 14313636 as cited in SEQ ID NO 64205
aagccacaaagaaattaaatacacacaatgaccaaagaagtttgctccaacattggactttggttattgctcacgttacttattggtaactatgtcgtcaatcttgaagcctcgcaccatgtctacaagagacttacccaaagcactaacaccaaatctccttccgtaaaccagccctaccggaccggtttccatttccaaccccccaaaaattggatgaacgatcctaatgggcctatgatatacaaaggaatatatcatcttttctaccaatggaacccgaaaggagccgtgtggggtaacatcgtgtgggctcattccacgtcaacagacttaatcaattgggatccacatcctccagctatcttcccatctgcacccttcgatatcaacggatgctggtccggttcagctactattctccctaatggaaaaccggttatcctctataccggaatcgaccctaagaaccaacaggtccaaaacatagccgagcctaagaatctctccgatccttatctccgagaatggaaaaagtcgccgttaaatcctctcatggctcctgacgccgttaacggaatcaacgccagctcgttccgtgacccaaccaccgcgtggctaggccaagacaagaaatggagagtgatcatcggaagcaagattcaccgtcgtggactagccattacttacacgagtaaagactttctaaaatgggaaaaatctccagagccgttgcattacgacgacggaagtggaatgtgggaatgtcctgattttttcccggtcacgaggtttggttctaacggcgtggaaacgtcttcgtttggtgaacctaatgagattttgaagcacgtgttgaaaataagtttggacgacacgaaacatgattattacacgattggtacgtacgatcgggttaaagataaattcgtaccggacaatggtttcaagatggacggtacggctccgagatacgattacggaaagtattacgcgtctaaaacgttttttgactcggctaagaaccggagaatcttgtggggttggactaacgagtcatcgtcggttgaggatgatgttgagaaaggctggtccggtattcagacgattccaaggaaaatatggcttgatagatcagggaaacaattaattcagtggccggttagggaagttgaaagattacgtacaaaacaagtcaaaaacttacgcaacaaagttctaaagtcaggatctaggcttgaagtctatggtgtgacagctgcacaggcggatgtagaagtattgttcaaagtgagagacttggagaaagcggatgtgatagaaccaagttggactgatccgcagttgatttgtagcaagatgaatgtatcggttaagtctggtttaggtccattcggtttaatggttttggcatctaagaatttggaagagtacacatctgtttattttagaatcttcaaagcccgtcaaaacagcaataagtacgttgtgctcatgtgcagtgaccaaagcagatcttcgctgaaggaagataatgacaaaacgacatacggagcttttgtggatattaatcctcaccaaccactatccctcagagccttgattgatcattcagtagtggagagtttcggtggaaagggaagagcatgcattacctcaagagtgtatccaaaattggcaataggaaaaagttcacatctctttgcttttaattatggatatcaaagtgttgatgtcttaaacttaaatgcttggagcatgaactctgcccaaatcagttgatcacgtaaagatacacacatgtaaacacattacatctccattgatttagcatttatatgagttgattttggagagatcttatatggtccactttgtttggttgtcaataaaattgtccaatttgtttgtttgaaataattctaaaaggctaatatatatgacattttatttga

SEQ ID NO: 81058 - protein, 584 aa, Arabidopsis thaliana
  peptide (1)..(584): Ceres Seq. ID no. 12658239
MTKEVCSNIGLWLLLTLLIGNYVVNLEASHHVYKRLTQSTNTKSPSVNQPYRTGFHFQPPKNWMNDPNGPMIYKGIYHLFYQWNPKGAVWGNIVWAHSTSTDLINWDPHPPAIFPSAPFDINGCWSGSATILPNGKPVILYTGIDPKNQQVQNIAEPKNLSDPYLREWKKSPLNPLMAPDAVNGINASSFRDPTTAWLGQDKKWRVIIGSKIHRRGLAITYTSKDFLKWEKSPEPLHYDDGSGMWECPDFFPVTRFGSNGVETSSFGEPNEILKHVLKISLDDTKHDYYTIGTYDRVKDKFVPDNGFKMDGTAPRYDYGKYYASKTFFDSAKNRRILWGWTNESSSVEDDVEKGWSGIQTIPRKIWLDRSGKQLIQWPVREVERLRTKQVKNLRNKVLKSGSRLEVYGVTAAQADVEVLFKVRDLEKADVIEPSWTDPQLICSKMNVSVKSGLGPFGLMVLASKNLEEYTSVYFRIFKARQNSNKYVVLMCSDQSRSSLKEDNDKTTYGAFVDINPHQPLSLRALIDHSVVESFGGKGRACITSRVYPKLAIGKSSHLFAFNYGYQSVDVLNLNAWSMNSAQIS

SEQ ID NO: 81059 - protein, 521 aa, Arabidopsis thaliana
  peptide (1)..(521): Ceres Seq. ID no. 12658240
MNDPNGPMIYKGIYHLFYQWNPKGAVWGNIVWAHSTSTDLINWDPHPPAIFPSAPFDINGCWSGSATILPNGKPVILYTGIDPKNQQVQNIAEPKNLSDPYLREWKKSPLNPLMAPDAVNGINASSFRDPTTAWLGQDKKWRVIIGSKIHRRGLAITYTSKDFLKWEKSPEPLHYDDGSGMWECPDFFPVTRFGSNGVETSSFGEPNEILKHVLKISLDDTKHDYYTIGTYDRVKDKFVPDNGFKMDGTAPRYDYGKYYASKTFFDSAKNRRILWGWTNESSSVEDDVEKGWSGIQTIPRKIWLDRSGKQLIQWPVREVERLRTKQVKNLRNKVLKSGSRLEVYGVTAAQADVEVLFKVRDLEKADVIEPSWTDPQLICSKMNVSVKSGLGPFGLMVLASKNLEEYTSVYFRIFKARQNSNKYVVLMCSDQSRSSLKEDNDKTTYGAFVDINPHQPLSLRALIDHSVVESFGGKGRACITSRVYPKLAIGKSSHLFAFNYGYQSVDVLNLNAWSMNSAQIS

SEQ ID NO: 81060 - protein, 514 aa, Arabidopsis thaliana
  peptide (1)..(514): Ceres Seq. ID no. 12658241
MIYKGIYHLFYQWNPKGAVWGNIVWAHSTSTDLINWDPHPPAIFPSAPFDINGCWSGSATILPNGKPVILYTGIDPKNQQVQNIAEPKNLSDPYLREWKKSPLNPLMAPDAVNGINASSFRDPTTAWLGQDKKWRVIIGSKIHRRGLAITYTSKDFLKWEKSPEPLHYDDGSGMWECPDFFPVTRFGSNGVETSSFGEPNEILKHVLKISLDDTKHDYYTIGTYDRVKDKFVPDNGFKMDGTAPRYDYGKYYASKTFFDSAKNRRILWGWTNESSSVEDDVEKGWSGIQTIPRKIWLDRSGKQLIQWPVREVERLRTKQVKNLRNKVLKSGSRLEVYGVTAAQADVEVLFKVRDLEKADVIEPSWTDPQLICSKMNVSVKSGLGPFGLMVLASKNLEEYTSVYFRIFKARQNSNKYVVLMCSDQSRSSLKEDNDKTTYGAFVDINPHQPLSLRALIDHSVVESFGGKGRACITSRVYPKLAIGKSSHLFAFNYGYQSVDVLNLNAWSMNSAQIS

SEQ ID NO: 81061 - DNA, 1104 bp, Arabidopsis thaliana
  misc_feature (1)..(1104): Ceres Seq. ID no. 12658265
  misc_feature (1)..(1104): Ortholog of  Ceres SEQ ID NO 12611159 as cited in SEQ ID NO 59821
atgggtcatcactcatgctgcaacaagcaaaaggtgaagagagggctttggtcacctgaagaagacgaaaagctcatcaactacatcaattcatatggccatggatgttggagctctgttcctaaacatgcaggcacttatacacatatacatgggttttgtttgcagagatgtggaaagagttgtagattaagatggataaattatctaagacctgatcttaaacgtggaagcttctctcctcaagaagctgctcttatcattgagcttcacagcattcttggtaacagatgggctcaaattgctaaacatctacctggaagaacagataacgaggtcaagaatttctggaactcgagcattaaaaagaagctcatgtctcaccatcatcacggtcatcatcatcatcatctctcttccatggcgagtttgctcacaaaccttccttatcacaatggattcaaccctactacagtcgacgatgaaagttcaagattcatgtccaatatcatcacaaacactaaccctaatttcatcactccaagccatctctctcttccttctcctcatgttatgaccccattgatgttcccaacctctagagaaggagatttcaagtttctaaccacaaacaacccaaaccaatctcatcaccatgataataaccattacaacaacctcgacattttgtcacccacaccaactataaacaatcatcatcaaccttcactttcttcttgtcctcatgataataatctccaatggccagcgttaccagatttcccagcgagtaccatttctggtttccaagaaacccttcaagattatgatgatgctaataaactcaacgtgtttgtgacaccattcaacgataatgccaaaaagttattatgtggagaagttctcgaaggcaaagtactatcttcctcctcaccaatttcacaagatcacggcctttttcttcccaccacgtacaactttcaaatgacttctacgagtgatcatcaacatcatcatcgagtggactcatacatcaatcacatgatcataccatcatcatcctcatcgtcgccaatctcttgtggacagtacgtcataacttaa

SEQ ID NO: 81062 - protein, 367 aa, Arabidopsis thaliana
  peptide (1)..(367): Ceres Seq. ID no. 12658266
MGHHSCCNKQKVKRGLWSPEEDEKLINYINSYGHGCWSSVPKHAGTYTHIHGFCLQRCGKSCRLRWINYLRPDLKRGSFSPQEAALIIELHSILGNRWAQIAKHLPGRTDNEVKNFWNSSIKKKLMSHHHHGHHHHHLSSMASLLTNLPYHNGFNPTTVDDESSRFMSNIITNTNPNFITPSHLSLPSPHVMTPLMFPTSREGDFKFLTTNNPNQSHHHDNNHYNNLDILSPTPTINNHHQPSLSSCPHDNNLQWPALPDFPASTISGFQETLQDYDDANKLNVFVTPFNDNAKKLLCGEVLEGKVLSSSSPISQDHGLFLPTTYNFQMTSTSDHQHHHRVDSYINHMIIPSSSSSSPISCGQYVIT

SEQ ID NO: 81063 - protein, 242 aa, Arabidopsis thaliana
  peptide (1)..(242): Ceres Seq. ID no. 12658267
MSHHHHGHHHHHLSSMASLLTNLPYHNGFNPTTVDDESSRFMSNIITNTNPNFITPSHLSLPSPHVMTPLMFPTSREGDFKFLTTNNPNQSHHHDNNHYNNLDILSPTPTINNHHQPSLSSCPHDNNLQWPALPDFPASTISGFQETLQDYDDANKLNVFVTPFNDNAKKLLCGEVLEGKVLSSSSPISQDHGLFLPTTYNFQMTSTSDHQHHHRVDSYINHMIIPSSSSSSPISCGQYVIT

SEQ ID NO: 81064 - protein, 227 aa, Arabidopsis thaliana
  peptide (1)..(227): Ceres Seq. ID no. 12658268
MASLLTNLPYHNGFNPTTVDDESSRFMSNIITNTNPNFITPSHLSLPSPHVMTPLMFPTSREGDFKFLTTNNPNQSHHHDNNHYNNLDILSPTPTINNHHQPSLSSCPHDNNLQWPALPDFPASTISGFQETLQDYDDANKLNVFVTPFNDNAKKLLCGEVLEGKVLSSSSPISQDHGLFLPTTYNFQMTSTSDHQHHHRVDSYINHMIIPSSSSSSPISCGQYVIT

SEQ ID NO: 81065 - DNA, 1932 bp, Arabidopsis thaliana
  misc_feature (1)..(1932): Ceres Seq. ID no. 12658283
  misc_feature (1)..(1932): Ortholog of  Ceres SEQ ID NO 14314096 as cited in SEQ ID NO 63279
atgagcgcggttagttttctttacagctcgaaaacccccaaatttcgaggggttttcaatgggatttgtgctctggttctgttttgcttcttctttgatcggagcgaattactcagaaaccctttgttaaggaacgcgtctttcgtcaatggtggtagtggctcaacctccggaggtatcacccagtttatggtaattcgtagaaatgcgaggcaaattgaaacgaatggttctggtaataatagcagcttgagtagcagtagtactgttttatgctcagggttacacaaacacatgggttatgctgatcaatgcgagttcttaaaagcaaacccaatttgttcccctgatggattctttgattacctcagcttcttttactgctcctgtagagatttcagtatcttgggttacatgatgttaggtgtttggcttgttgctttgttttatctgttgggtaatactgctgctgattacttttgttgttcactggagaagctttcaaagcttttgaggctgcctccaactgttgctggtgttactttacttcctcttgggaatggagcaccagatgtgtttgctagtatagctgcttttgttggtacagataaaggagaagttggtcttaacagcgtcttgggtggtgctgtgtttgttacttctgttgttgtagggattgtttcgctttgtgttgcggataaggaagtcaagatcgataagaattgcttcatcagagacttgagtttcttccttttctcgcttgtgtctttgctggtgattttgatggttggtagagtgacagtccggattgccatcgcgtttgtctcaatatatgtggtttatgctttccttgtggcagcgaatgtgattctgagaaaacatgctaagaggtttaaactagaggctcttactcctttgctacctatgcaaggaagtgtgttttccccgagtgttggagaggatatgccaatgaatacccccttgatagaaactgagactgaggatggtccacctcggctacagagtcttcctcagtggatgtgggcgtcaaatgtggccatctattcaaaccatttcgcaaaagttagtgtacatgatgaagacaggccaccttggggatggattgatgacactgcagaagtagagagctcctcatgtactaaattcacttccttgttggaaattccgctgaccattccaaggagattaacaattccatcggtcgaagaagatacatggtcaaagacatatgctgtggccagcgtctcattagcgcctgtccttttggcgtctctctggagtagccaagacgatgtgagtctccaagcttgtggtgtcgcatactttttcagcgttgttataggctccactcttggctttctggcttacaaaaacacagaacctgatcacccacctcgaagattcttgatcccttgggttcttggtgggtttataatgagcatcgtatggttctacatgatagcaaacgaactcgttgctcttctggtgacatttggtgagatttacggaatcaacccgtcgatacttgcgctaacagtacttgcttggggaaactcaatgggtgacttagtatcgaatatcgcattgacaatgaacggtggggatggtgtacaaatcgctctatcgggatgctacgccggtccaatgttcaacacactcgtcgggctaggtatgtcgatgctttttggcgcatggtccaagagtcctgacacatacatgctaccagaagacaaaagcctattctacacacttgggtttctagtactcggtttggtttgggctatggtgatactcccgcgcaacgacatgcaacctagcagaaccttaggtgttggactcattgcaatatatctgatattcgtcactttcaggctgagctgcgccatgggattcataccatgggctgcttaa

SEQ ID NO: 81066 - protein, 643 aa, Arabidopsis thaliana
  peptide (1)..(643): Ceres Seq. ID no. 12658284
MSAVSFLYSSKTPKFRGVFNGICALVLFCFFFDRSELLRNPLLRNASFVNGGSGSTSGGITQFMVIRRNARQIETNGSGNNSSLSSSSTVLCSGLHKHMGYADQCEFLKANPICSPDGFFDYLSFFYCSCRDFSILGYMMLGVWLVALFYLLGNTAADYFCCSLEKLSKLLRLPPTVAGVTLLPLGNGAPDVFASIAAFVGTDKGEVGLNSVLGGAVFVTSVVVGIVSLCVADKEVKIDKNCFIRDLSFFLFSLVSLLVILMVGRVTVRIAIAFVSIYVVYAFLVAANVILRKHAKRFKLEALTPLLPMQGSVFSPSVGEDMPMNTPLIETETEDGPPRLQSLPQWMWASNVAIYSNHFAKVSVHDEDRPPWGWIDDTAEVESSSCTKFTSLLEIPLTIPRRLTIPSVEEDTWSKTYAVASVSLAPVLLASLWSSQDDVSLQACGVAYFFSVVIGSTLGFLAYKNTEPDHPPRRFLIPWVLGGFIMSIVWFYMIANELVALLVTFGEIYGINPSILALTVLAWGNSMGDLVSNIALTMNGGDGVQIALSGCYAGPMFNTLVGLGMSMLFGAWSKSPDTYMLPEDKSLFYTLGFLVLGLVWAMVILPRNDMQPSRTLGVGLIAIYLIFVTFRLSCAMGFIPWAA

SEQ ID NO: 81067 - protein, 580 aa, Arabidopsis thaliana
  peptide (1)..(580): Ceres Seq. ID no. 12658285
MVIRRNARQIETNGSGNNSSLSSSSTVLCSGLHKHMGYADQCEFLKANPICSPDGFFDYLSFFYCSCRDFSILGYMMLGVWLVALFYLLGNTAADYFCCSLEKLSKLLRLPPTVAGVTLLPLGNGAPDVFASIAAFVGTDKGEVGLNSVLGGAVFVTSVVVGIVSLCVADKEVKIDKNCFIRDLSFFLFSLVSLLVILMVGRVTVRIAIAFVSIYVVYAFLVAANVILRKHAKRFKLEALTPLLPMQGSVFSPSVGEDMPMNTPLIETETEDGPPRLQSLPQWMWASNVAIYSNHFAKVSVHDEDRPPWGWIDDTAEVESSSCTKFTSLLEIPLTIPRRLTIPSVEEDTWSKTYAVASVSLAPVLLASLWSSQDDVSLQACGVAYFFSVVIGSTLGFLAYKNTEPDHPPRRFLIPWVLGGFIMSIVWFYMIANELVALLVTFGEIYGINPSILALTVLAWGNSMGDLVSNIALTMNGGDGVQIALSGCYAGPMFNTLVGLGMSMLFGAWSKSPDTYMLPEDKSLFYTLGFLVLGLVWAMVILPRNDMQPSRTLGVGLIAIYLIFVTFRLSCAMGFIPWAA

SEQ ID NO: 81068 - protein, 545 aa, Arabidopsis thaliana
  peptide (1)..(545): Ceres Seq. ID no. 12658286
MGYADQCEFLKANPICSPDGFFDYLSFFYCSCRDFSILGYMMLGVWLVALFYLLGNTAADYFCCSLEKLSKLLRLPPTVAGVTLLPLGNGAPDVFASIAAFVGTDKGEVGLNSVLGGAVFVTSVVVGIVSLCVADKEVKIDKNCFIRDLSFFLFSLVSLLVILMVGRVTVRIAIAFVSIYVVYAFLVAANVILRKHAKRFKLEALTPLLPMQGSVFSPSVGEDMPMNTPLIETETEDGPPRLQSLPQWMWASNVAIYSNHFAKVSVHDEDRPPWGWIDDTAEVESSSCTKFTSLLEIPLTIPRRLTIPSVEEDTWSKTYAVASVSLAPVLLASLWSSQDDVSLQACGVAYFFSVVIGSTLGFLAYKNTEPDHPPRRFLIPWVLGGFIMSIVWFYMIANELVALLVTFGEIYGINPSILALTVLAWGNSMGDLVSNIALTMNGGDGVQIALSGCYAGPMFNTLVGLGMSMLFGAWSKSPDTYMLPEDKSLFYTLGFLVLGLVWAMVILPRNDMQPSRTLGVGLIAIYLIFVTFRLSCAMGFIPWAA

SEQ ID NO: 81069 - DNA, 1773 bp, Arabidopsis thaliana
  misc_feature (1)..(1773): Ceres Seq. ID no. 12658291
  misc_feature (1)..(1773): Ortholog of  Ceres SEQ ID NO 13598865 as cited in SEQ ID NO 0
ttcctcgaggaaccatcagtctctccgtctttaaccgtcgaagttggagaagataccaccgtaactcccgaagaagaagaattaaattctccaggtggttccggttcaagccggttaactcgtagaagaagcagttacagatccactagcagtatacgagaaatggatctgatttcgccggaagcagtttctgatctaagatcgattgttcaacgaatggtcgccgccggttactctcgtgaatgtatccaagtctatggaactgttcgcaaatcagccatggaagcaatatttaagcagcttgggattgtgaagataagcattggtgatgttcaaaggcttgagtgggaagttgttgaaggaaagatcaggaaatggattcgtgctgctaaagtttgcattagagttgttttctctagtgagaagagactatgtgagcagctctttgatggtatttgcactgccatggatgagacttgtttcatggagacagtgaaggcttctgctctgagacttttcactttccctgaagctataagtatcagtagaagatcacctgagaagctgttcaagattcttgatttacatgatgctttaacggatatgttgccggatattgaagcaatctttgactcagattcatcagatgctattagagctcaggctgttgagattcaatcgaggttagcggaagcagcgagaggtatactttcggagtttgagaatgcggttcttcgcgaaccttcgatagttcctgtccctggaggaacgattcatccattgacaaggtatgtgatgaactacattgttatgatctctgattataagcaaacgttggatgatctcatcatgtcgaatccctctactggttctgatccaaacacaccggatatggatttcacggagttggatagtaaatctccgttggatttgcatttgatatggttgattgtggtcttgcatttcaacttagaagagaaatccaagcactatagagacacatctctagctcacatattcatcatgaacaacatccattacattgttcagaaagtgaaaaggtcaccagaactacgagagatgattggagaccattatttaaggaaactcactgggatatttagacatgctgccacaaactaccagagagctacatgggtcagagtactgaatagtttgagagatgaaggattacatgtgagtgggagtttctcctcaggtgtatcaagaagtgcattaagagagaggtttaaggcattcaatacaatgttcgaagaggttcacaggactcagtccacatggtcggttccagatgctcagcttagagaagaactccgaatatcgctatccgagcatctaatccctgcttatagatcgtttcttggaaggttcaggggtcatatagagagtggaagacaccctgagaactatttgaaatattcggttgaagatatcgagaccatcgttctagatttcttcgaaggatataccacaccaccacacttgaggaggcgataaaagaagatcgaaaacccgagagttctatcttctttctttcgtttttcagtcacattaggatgtcatagaaatagaaccattctttgaatttttattcacgggtttcctgcccggtggaataatctccaggtgaacatatttgtgtgttgttgtttgtgccatatgtcttctatttataaaagtcctgattgatcacagaaccaataagtaccatgtaaattttgcaatgtgcgacgtcctctactcatttgctcc

SEQ ID NO: 81070 - protein, 505 aa, Arabidopsis thaliana
  peptide (1)..(505): Ceres Seq. ID no. 12658292
FLEEPSVSPSLTVEVGEDTTVTPEEEELNSPGGSGSSRLTRRRSSYRSTSSIREMDLISPEAVSDLRSIVQRMVAAGYSRECIQVYGTVRKSAMEAIFKQLGIVKISIGDVQRLEWEVVEGKIRKWIRAAKVCIRVVFSSEKRLCEQLFDGICTAMDETCFMETVKASALRLFTFPEAISISRRSPEKLFKILDLHDALTDMLPDIEAIFDSDSSDAIRAQAVEIQSRLAEAARGILSEFENAVLREPSIVPVPGGTIHPLTRYVMNYIVMISDYKQTLDDLIMSNPSTGSDPNTPDMDFTELDSKSPLDLHLIWLIVVLHFNLEEKSKHYRDTSLAHIFIMNNIHYIVQKVKRSPELREMIGDHYLRKLTGIFRHAATNYQRATWVRVLNSLRDEGLHVSGSFSSGVSRSALRERFKAFNTMFEEVHRTQSTWSVPDAQLREELRISLSEHLIPAYRSFLGRFRGHIESGRHPENYLKYSVEDIETIVLDFFEGYTTPPHLRRR

SEQ ID NO: 81071 - protein, 451 aa, Arabidopsis thaliana
  peptide (1)..(451): Ceres Seq. ID no. 12658293
MDLISPEAVSDLRSIVQRMVAAGYSRECIQVYGTVRKSAMEAIFKQLGIVKISIGDVQRLEWEVVEGKIRKWIRAAKVCIRVVFSSEKRLCEQLFDGICTAMDETCFMETVKASALRLFTFPEAISISRRSPEKLFKILDLHDALTDMLPDIEAIFDSDSSDAIRAQAVEIQSRLAEAARGILSEFENAVLREPSIVPVPGGTIHPLTRYVMNYIVMISDYKQTLDDLIMSNPSTGSDPNTPDMDFTELDSKSPLDLHLIWLIVVLHFNLEEKSKHYRDTSLAHIFIMNNIHYIVQKVKRSPELREMIGDHYLRKLTGIFRHAATNYQRATWVRVLNSLRDEGLHVSGSFSSGVSRSALRERFKAFNTMFEEVHRTQSTWSVPDAQLREELRISLSEHLIPAYRSFLGRFRGHIESGRHPENYLKYSVEDIETIVLDFFEGYTTPPHLRRR

SEQ ID NO: 81072 - protein, 433 aa, Arabidopsis thaliana
  peptide (1)..(433): Ceres Seq. ID no. 12658294
MVAAGYSRECIQVYGTVRKSAMEAIFKQLGIVKISIGDVQRLEWEVVEGKIRKWIRAAKVCIRVVFSSEKRLCEQLFDGICTAMDETCFMETVKASALRLFTFPEAISISRRSPEKLFKILDLHDALTDMLPDIEAIFDSDSSDAIRAQAVEIQSRLAEAARGILSEFENAVLREPSIVPVPGGTIHPLTRYVMNYIVMISDYKQTLDDLIMSNPSTGSDPNTPDMDFTELDSKSPLDLHLIWLIVVLHFNLEEKSKHYRDTSLAHIFIMNNIHYIVQKVKRSPELREMIGDHYLRKLTGIFRHAATNYQRATWVRVLNSLRDEGLHVSGSFSSGVSRSALRERFKAFNTMFEEVHRTQSTWSVPDAQLREELRISLSEHLIPAYRSFLGRFRGHIESGRHPENYLKYSVEDIETIVLDFFEGYTTPPHLRRR

SEQ ID NO: 81073 - DNA, 2959 bp, Arabidopsis thaliana
  misc_feature (1)..(2959): Ceres Seq. ID no. 12658303
  misc_feature (1)..(2959): Ortholog of  Ceres SEQ ID NO 13597957 as cited in SEQ ID NO 60744
aaacccagaaatcaccaaaaaaaaaaaaagtacatttcctttttttttgttcttaaatttttctgtggttccggtcaccgcagctctgtcatcatcttcttcttcttcatttaccaatctgaaatctactcagattctttgtgattttctccttaaaatctcgatctgtatcgtacagtgacttgtgaaattaggatcgttgtgtctgtgttttctggttacagtttgtaaaatttgaatatttgtgtgtgaagtcagattcagtttcgtgagctgttcggatttggtttgggggtatatatatagcgttgtgtgatctatttggggggttttggtttccctttttttctctcttgtgaattcgtttattgttgtatcgtcggcccgagtttatcggaactccgggtctgacgtgagttttccaaatggcggcgtcagagagatcgattgacaaagaagtcgacatgggttcttcctttcttcaaaaattcaggctttacgagacccgctcgagcttctatatgattggaagagataaaaatcgaacgtcttggagggtcctgaagttagataggacagagccagcagaggtcaatatctacgaagattcaacggcttacacagaagctgaatgctttgaaactttgagaaggatacacgagggaaacagatcatctggtggtttgaaatttgtcaccacctgctacgggatcatcggattcataaggttcttgggaccttattacatgctgataatcactaaaagaaagaagcttggtgaaatttgtgggcacactgtttatggtgttgcgaagagcaagatcatcacgattccacatgcctctgtgctatccaatgtggcttattctaaggacgagaaaaggtacaagaggctgctctgcactgttgatctcacaaaggacttcttcttcagctattcctatcacatcatgcatacacttcagaggaatctgtctaacaatgtggaaggacacacttactacgaatcgatgtttgtctggaacgaatacttaactcgaaggattcggaataacgtgaaggactgtatgtggacagttgccttggtatatggatttttcaaacaggtcaaactatcagtttctgagaagaactttagattgactctaatttctcgcagatctcggcattatgctggtacaagatatctgaaacgtggtgtaaacgagaaaggcagggtagctaatgatgttgagacagagcagattgttttcgaggaagctcaagatggtaatcccggccgaataagttctgtagttcagaatcggggttcaattcctttgttctggtctcaggagacctcacgcttgaatatcaaacctgatataatattgtcaccgaaagaccccaactttgaggcaaccagactgcattttgaaaatcttggaaggagatatgggaatccaatcatcatactgaacttgataaagacgcgtgaaaagaggcctcgggagactattctgcgtgcagagtttgcaaatgcaattagatttattaataaagggttaagcaaagaggatcgtctaaggcctcttcactgggacttgcataaacactccagaaaaaaaggcacaaacgtgttggcaattctcggcaggttggctacttatgctctgaacttgaccagcatcttctactgtcaattaactccagatcttagaggagaaggatttcagaaccagaatccatccaccttggagaacgacgatggtgaatgttctacttatgatccacccagtaaagatgaaactgcaccaaatttggtggtggaaaacggtaatgatagtaaggatgctaaggaagatcagcaaaaggaagttaccatgctgcagaaaggagtcctgaggaccaattgcatagactgtttagatcgcaccaatgttgctcaatatgcctatgggttggtagcatttgggcgtcaactccatgctttgggattgacagagtctactaatattgatctagacaatcccctcgctgaagatttgatgggaatttatgagacgatgggagatacacttgcacttcagtatggaggatccgcggcacacaacaagatattttgtgaaaggcgtggtcaatggagagcagcgactcaatcacaggaattcttcagaactttacaacgttactacagtaacgcctatatggatgccgaaaagcaagatgcaattaacgtgttcttgggatactttcagccacaatcagataagccagcgctatgggaattgggttctgatcagcattacaacgcagcaagatttcttgccaattctgtaccagagacttcaagatcgacgatgaaacgatctctatcagaaagtagcatcattagcgagagcagtccagccgcattgggaccagtaggtagacatggtttagctgaaaaagatgaagaagttaaaggtctttcagattcagcaccggagatctcaacgtctgaaactgccaagattgctgctagtttgagtgctccaccaccgatattagaggaattaggtttagatgatattcttgaaaacgattgcttctgctgtgatgggaatggtgagcaatgtacatgtgcagcttttgatatggattgggtatcttcttcaggaaactcttgtgaagatgagagttgcggaagagccacagtggttagatcctttgaaaccatccctgaaagtagaaaaatagagtcagaaatttgtgttgttgaaacagttggttccaacagtagaaagggaaataaagaagaagaagaagccatttccgggattcctgaaggttatgtgaggtgggtgatggatgaagacggtcatttctggtgatgagagaacaaagcttttcaacaacacctacaagccatatgaaacaaaaccaaaaaaagcaaaacaaaaacaagaaagagcatactctttagtctttagtgggtgac

SEQ ID NO: 81074 - protein, 808 aa, Arabidopsis thaliana
  peptide (1)..(808): Ceres Seq. ID no. 12658304
MAASERSIDKEVDMGSSFLQKFRLYETRSSFYMIGRDKNRTSWRVLKLDRTEPAEVNIYEDSTAYTEAECFETLRRIHEGNRSSGGLKFVTTCYGIIGFIRFLGPYYMLIITKRKKLGEICGHTVYGVAKSKIITIPHASVLSNVAYSKDEKRYKRLLCTVDLTKDFFFSYSYHIMHTLQRNLSNNVEGHTYYESMFVWNEYLTRRIRNNVKDCMWTVALVYGFFKQVKLSVSEKNFRLTLISRRSRHYAGTRYLKRGVNEKGRVANDVETEQIVFEEAQDGNPGRISSVVQNRGSIPLFWSQETSRLNIKPDIILSPKDPNFEATRLHFENLGRRYGNPIIILNLIKTREKRPRETILRAEFANAIRFINKGLSKEDRLRPLHWDLHKHSRKKGTNVLAILGRLATYALNLTSIFYCQLTPDLRGEGFQNQNPSTLENDDGECSTYDPPSKDETAPNLVVENGNDSKDAKEDQQKEVTMLQKGVLRTNCIDCLDRTNVAQYAYGLVAFGRQLHALGLTESTNIDLDNPLAEDLMGIYETMGDTLALQYGGSAAHNKIFCERRGQWRAATQSQEFFRTLQRYYSNAYMDAEKQDAINVFLGYFQPQSDKPALWELGSDQHYNAARFLANSVPETSRSTMKRSLSESSIISESSPAALGPVGRHGLAEKDEEVKGLSDSAPEISTSETAKIAASLSAPPPILEELGLDDILENDCFCCDGNGEQCTCAAFDMDWVSSSGNSCEDESCGRATVVRSFETIPESRKIESEICVVETVGSNSRKGNKEEEEAISGIPEGYVRWVMDEDGHFW

SEQ ID NO: 81075 - protein, 795 aa, Arabidopsis thaliana
  peptide (1)..(795): Ceres Seq. ID no. 12658305
MGSSFLQKFRLYETRSSFYMIGRDKNRTSWRVLKLDRTEPAEVNIYEDSTAYTEAECFETLRRIHEGNRSSGGLKFVTTCYGIIGFIRFLGPYYMLIITKRKKLGEICGHTVYGVAKSKIITIPHASVLSNVAYSKDEKRYKRLLCTVDLTKDFFFSYSYHIMHTLQRNLSNNVEGHTYYESMFVWNEYLTRRIRNNVKDCMWTVALVYGFFKQVKLSVSEKNFRLTLISRRSRHYAGTRYLKRGVNEKGRVANDVETEQIVFEEAQDGNPGRISSVVQNRGSIPLFWSQETSRLNIKPDIILSPKDPNFEATRLHFENLGRRYGNPIIILNLIKTREKRPRETILRAEFANAIRFINKGLSKEDRLRPLHWDLHKHSRKKGTNVLAILGRLATYALNLTSIFYCQLTPDLRGEGFQNQNPSTLENDDGECSTYDPPSKDETAPNLVVENGNDSKDAKEDQQKEVTMLQKGVLRTNCIDCLDRTNVAQYAYGLVAFGRQLHALGLTESTNIDLDNPLAEDLMGIYETMGDTLALQYGGSAAHNKIFCERRGQWRAATQSQEFFRTLQRYYSNAYMDAEKQDAINVFLGYFQPQSDKPALWELGSDQHYNAARFLANSVPETSRSTMKRSLSESSIISESSPAALGPVGRHGLAEKDEEVKGLSDSAPEISTSETAKIAASLSAPPPILEELGLDDILENDCFCCDGNGEQCTCAAFDMDWVSSSGNSCEDESCGRATVVRSFETIPESRKIESEICVVETVGSNSRKGNKEEEEAISGIPEGYVRWVMDEDGHFW

SEQ ID NO: 81076 - protein, 776 aa, Arabidopsis thaliana
  peptide (1)..(776): Ceres Seq. ID no. 12658306
MIGRDKNRTSWRVLKLDRTEPAEVNIYEDSTAYTEAECFETLRRIHEGNRSSGGLKFVTTCYGIIGFIRFLGPYYMLIITKRKKLGEICGHTVYGVAKSKIITIPHASVLSNVAYSKDEKRYKRLLCTVDLTKDFFFSYSYHIMHTLQRNLSNNVEGHTYYESMFVWNEYLTRRIRNNVKDCMWTVALVYGFFKQVKLSVSEKNFRLTLISRRSRHYAGTRYLKRGVNEKGRVANDVETEQIVFEEAQDGNPGRISSVVQNRGSIPLFWSQETSRLNIKPDIILSPKDPNFEATRLHFENLGRRYGNPIIILNLIKTREKRPRETILRAEFANAIRFINKGLSKEDRLRPLHWDLHKHSRKKGTNVLAILGRLATYALNLTSIFYCQLTPDLRGEGFQNQNPSTLENDDGECSTYDPPSKDETAPNLVVENGNDSKDAKEDQQKEVTMLQKGVLRTNCIDCLDRTNVAQYAYGLVAFGRQLHALGLTESTNIDLDNPLAEDLMGIYETMGDTLALQYGGSAAHNKIFCERRGQWRAATQSQEFFRTLQRYYSNAYMDAEKQDAINVFLGYFQPQSDKPALWELGSDQHYNAARFLANSVPETSRSTMKRSLSESSIISESSPAALGPVGRHGLAEKDEEVKGLSDSAPEISTSETAKIAASLSAPPPILEELGLDDILENDCFCCDGNGEQCTCAAFDMDWVSSSGNSCEDESCGRATVVRSFETIPESRKIESEICVVETVGSNSRKGNKEEEEAISGIPEGYVRWVMDEDGHFW

SEQ ID NO: 81077 - DNA, 2043 bp, Arabidopsis thaliana
  misc_feature (1)..(2043): Ceres Seq. ID no. 12658332
  misc_feature (1)..(2043): Ortholog of  Ceres SEQ ID NO 13584744 as cited in SEQ ID NO 69137
atgttcagctccatgaattctccaggacagctctcacaatggacagcatcaggaggtgatccttgtggccaaaactggaaaggcataacttgctctggctctcgagttacacaaataaagttaccaagtcttggactttctggatcacttggattcatgcttgataaattgacttctgttactgagtttgatatgagcaacaataaccttggaggcgatttgccttatcagcttcctccaaacttggagcgattgaatcttgctaataaccagttcactggatctgctcaatattccatttctatgatggctcctcttaagtacctcaaccttgctcacaaccagttgaagcagctagctattgacttcacaaaactcacctctctctctatattggacctctcttccaatgcttttatagggtctctcccaaacacttgtagctctcttacgagtgcaaaatcaatttatcttcagaacaatcagttctcaggcaccattgatattctagccacccttcctctcgaaaatctgaatattgcaaacaatcggttcacaggctggatccctgattctttgaaaggcattaacttgcaaaaagatggcaatttattaaattccgggcctgcacctccaccacctcctggtacaccaccgatcagtaaatcatcacctactccgaaatccgggaaccgtggaaaccgttccaatggtgattccagcaatagcaaagactccagcaaatcagggcttggagctggtggagtagcaggaatagtcatttctttgatagttgtaacagcagtcatagctttcttcttgatcaagagaaaaagatcaaagcggtcatcatccacggacattgaaaagactgataataacattaaccaacccattatactagcgtccaatgactttcatcaagagaataagtctgtacagaatccaccattggttgagacaaagaaactggatacgtcattgtcgatgaatctacgtcctccaccatctgagcgacataagtcgtttgatgacgatgattcaacaatgagaaaacctattgttgcaaagaaagctgctgttgttgttccttcaaatgtgaacacatatacggtttcagatcttcaagtagctaccaacagtttcagcgtagataatcttctcggtgaaggaacatttggaagagtatacagagctcagtttgaagatggaaaggtacttgctgtgaagaaaatcgactcatctgcgcttcccacggatactgctgatgattttaccgaaattgtatcgaaaatagcgcatttggatcacgaaaatgtcacaaagcttgatggttactgttctgaacacgggcaacacttggtggtctatgagttccatagaaacggctcattgcatgactttttacatcttgcagaagaggaaagcaaaccgttgatatggaatccccgtgtcaagatcgctcttggcactgcacgtgcattggagtacttgcatgaagtttgctcaccatctatagtccacaagaacattaaatcagcaaatattttacttgactcagagctgaatccacacctctcagactcaggtctcgctagcttccttcccactgcaaacgagctactaaaccaaaacgatgaaggatacagcgcaccagaaacttcaatgtcaggccaatactctttgaagagcgatgtttacagttttggagtagtgatgctcgagcttttaaccggaagaaaaccattcgacagcacaaggtcaagatcggaacaatcattggtaagatgggcaacacctcagcttcacgacattgatgctttgggcaaaatggttgatccagctctcaaagggctatacccggttaaatccctctcccgatttgcagatgttatcgccctttgcgtccagccggagccagagtttagaccacccatgtctgaagtggtgcaagcattggttgtattggtgcagagagctaacatgagcaagagaactgttggagtcggctccggtagctccggcgtcaatgattacatgtaa

SEQ ID NO: 81078 - protein, 680 aa, Arabidopsis thaliana; identical to SEQ ID NO: 39645
  peptide (1)..(680): Ceres Seq. ID no. 12658333

SEQ ID NO: 81079 - protein, 676 aa, Arabidopsis thaliana
  peptide (1)..(676): Ceres Seq. ID no. 12658334
MNSPGQLSQWTASGGDPCGQNWKGITCSGSRVTQIKLPSLGLSGSLGFMLDKLTSVTEFDMSNNNLGGDLPYQLPPNLERLNLANNQFTGSAQYSISMMAPLKYLNLAHNQLKQLAIDFTKLTSLSILDLSSNAFIGSLPNTCSSLTSAKSIYLQNNQFSGTIDILATLPLENLNIANNRFTGWIPDSLKGINLQKDGNLLNSGPAPPPPPGTPPISKSSPTPKSGNRGNRSNGDSSNSKDSSKSGLGAGGVAGIVISLIVVTAVIAFFLIKRKRSKRSSSTDIEKTDNNINQPIILASNDFHQENKSVQNPPLVETKKLDTSLSMNLRPPPSERHKSFDDDDSTMRKPIVAKKAAVVVPSNVNTYTVSDLQVATNSFSVDNLLGEGTFGRVYRAQFEDGKVLAVKKIDSSALPTDTADDFTEIVSKIAHLDHENVTKLDGYCSEHGQHLVVYEFHRNGSLHDFLHLAEEESKPLIWNPRVKIALGTARALEYLHEVCSPSIVHKNIKSANILLDSELNPHLSDSGLASFLPTANELLNQNDEGYSAPETSMSGQYSLKSDVYSFGVVMLELLTGRKPFDSTRSRSEQSLVRWATPQLHDIDALGKMVDPALKGLYPVKSLSRFADVIALCVQPEPEFRPPMSEVVQALVVLVQRANMSKRTVGVGSGSSGVNDYM

SEQ ID NO: 81080 - protein, 628 aa, Arabidopsis thaliana
  peptide (1)..(628): Ceres Seq. ID no. 12658335
MLDKLTSVTEFDMSNNNLGGDLPYQLPPNLERLNLANNQFTGSAQYSISMMAPLKYLNLAHNQLKQLAIDFTKLTSLSILDLSSNAFIGSLPNTCSSLTSAKSIYLQNNQFSGTIDILATLPLENLNIANNRFTGWIPDSLKGINLQKDGNLLNSGPAPPPPPGTPPISKSSPTPKSGNRGNRSNGDSSNSKDSSKSGLGAGGVAGIVISLIVVTAVIAFFLIKRKRSKRSSSTDIEKTDNNINQPIILASNDFHQENKSVQNPPLVETKKLDTSLSMNLRPPPSERHKSFDDDDSTMRKPIVAKKAAVVVPSNVNTYTVSDLQVATNSFSVDNLLGEGTFGRVYRAQFEDGKVLAVKKIDSSALPTDTADDFTEIVSKIAHLDHENVTKLDGYCSEHGQHLVVYEFHRNGSLHDFLHLAEEESKPLIWNPRVKIALGTARALEYLHEVCSPSIVHKNIKSANILLDSELNPHLSDSGLASFLPTANELLNQNDEGYSAPETSMSGQYSLKSDVYSFGVVMLELLTGRKPFDSTRSRSEQSLVRWATPQLHDIDALGKMVDPALKGLYPVKSLSRFADVIALCVQPEPEFRPPMSEVVQALVVLVQRANMSKRTVGVGSGSSGVNDYM

SEQ ID NO: 81081 - DNA, 537 bp, Arabidopsis thaliana
  misc_feature (1)..(537): Ceres Seq. ID no. 12658340
  misc_feature (1)..(537): Ortholog of  Ceres SEQ ID NO 13596325 as cited in SEQ ID NO 67987
atggacaagactgatcaaaccgccattgacgaatcagctttagtgcttaatcgcactgagaaatcggcagaggcggtcctgcgagtagcatcaatggctctaagtattacgggtctcgtcatcatgatcaagaactctatctccaacgaatttggctctgtttcttactcaaatattggagctttcatgtatttggtgagtgctaatggcgtttgtgctgcttattctcttctctcggctctcgcaatattagcgcttccgtgtccaataagcaaggtccaagtcaggacattgttcttgcttgaccaggtggtcacatacgtggttctagcggctggggctgtatctgcagagacggtttacttagcatactatggaaacatacccattacttggagctctgcttgtgactcctatggatccttctgtcataatgcattgatttcggttgttttcacattcgttgtctcccttctctacatgttgctctcgcttatctcttcctatcgactcttcaccagatttgaagcaccctaa

SEQ ID NO: 81082 - protein, 178 aa, Arabidopsis thaliana
  peptide (1)..(178): Ceres Seq. ID no. 12658341
MDKTDQTAIDESALVLNRTEKSAEAVLRVASMALSITGLVIMIKNSISNEFGSVSYSNIGAFMYLVSANGVCAAYSLLSALAILALPCPISKVQVRTLFLLDQVVTYVVLAAGAVSAETVYLAYYGNIPITWSSACDSYGSFCHNALISVVFTFVVSLLYMLLSLISSYRLFTRFEAP

SEQ ID NO: 81083 - protein, 147 aa, Arabidopsis thaliana
  peptide (1)..(147): Ceres Seq. ID no. 12658342
MALSITGLVIMIKNSISNEFGSVSYSNIGAFMYLVSANGVCAAYSLLSALAILALPCPISKVQVRTLFLLDQVVTYVVLAAGAVSAETVYLAYYGNIPITWSSACDSYGSFCHNALISVVFTFVVSLLYMLLSLISSYRLFTRFEAP

SEQ ID NO: 81084 - protein, 137 aa, Arabidopsis thaliana
  peptide (1)..(137): Ceres Seq. ID no. 12658343
MIKNSISNEFGSVSYSNIGAFMYLVSANGVCAAYSLLSALAILALPCPISKVQVRTLFLLDQVVTYVVLAAGAVSAETVYLAYYGNIPITWSSACDSYGSFCHNALISVVFTFVVSLLYMLLSLISSYRLFTRFEAP

SEQ ID NO: 81085 - DNA, 984 bp, Arabidopsis thaliana
  misc_feature (1)..(984): Ceres Seq. ID no. 12658352
  misc_feature (1)..(984): Ortholog of  Ceres SEQ ID NO 15168476 as cited in SEQ ID NO 60262
atggctacggtcactgagatgcccactgatgttgttgttgtcgacgatgttaaggaagttagtaccaaaagcgaaaagatcatcgatgagggaattgagaagagctcgatcacggattctaaaaccgaaactgaatctcggcttgatatgcacaagcttgtggctatgttcaagaaactgaatcctttggccaaggagtttttcccttcttactacgatccgaagaagaacaatcaggtagctaaggctaaccaatttctgccggctgacgattttgagaccaccaagaagcaatctggtgaagaatttgatcttgatgccaagaaggatgacaatacccgcaagagaagaaactatagccaagggagaaggaggttaactggaagaatttctaaggctcaaagagaggatagtattagaagaacagtttatgtttctgacattgaccagagtgtgactgaggagggtcttgctggcttgtttagtaactgtggacaagttgttgactgtagaatttgtggcgatccacattcggttcttcgatttgcgtttgttgagtttgctgatgaccagggcgcacatgaagctttaagccttggtggaacaatgctcgggttctacccggtgagggtcttaccctcaaaaactgccatcctaccagtgaatcccacatttcttccaaggtcagaagatgaaagggagatgtgcacaaggacaatctattgcaccaacatcgacaagaaagtttctcaagctgatgtgagaaacttctttgaatctgcatgtggtgaggtaactcgtctgaggcttcttggcgatcaattgcattcaactcgcatagcttttgttgaatttgctctggcagatagtgcacttagcgcgctcaattgcagcggaatggtcgttggatcacaaccgataagggtaagtccatcaaagacaccagtgaggccaagaatcactcgaccaccatcgacaaactag

SEQ ID NO: 81086 - protein, 327 aa, Arabidopsis thaliana
  peptide (1)..(327): Ceres Seq. ID no. 12658353
MATVTEMPTDVVVVDDVKEVSTKSEKIIDEGIEKSSITDSKTETESRLDMHKLVAMFKKLNPLAKEFFPSYYDPKKNNQVAKANQFLPADDFETTKKQSGEEFDLDAKKDDNTRKRRNYSQGRRRLTGRISKAQREDSIRRTVYVSDIDQSVTEEGLAGLFSNCGQVVDCRICGDPHSVLRFAFVEFADDQGAHEALSLGGTMLGFYPVRVLPSKTAILPVNPTFLPRSEDEREMCTRTIYCTNIDKKVSQADVRNFFESACGEVTRLRLLGDQLHSTRIAFVEFALADSALSALNCSGMVVGSQPIRVSPSKTPVRPRITRPPSTN

SEQ ID NO: 81087 - protein, 321 aa, Arabidopsis thaliana
  peptide (1)..(321): Ceres Seq. ID no. 12658354
MPTDVVVVDDVKEVSTKSEKIIDEGIEKSSITDSKTETESRLDMHKLVAMFKKLNPLAKEFFPSYYDPKKNNQVAKANQFLPADDFETTKKQSGEEFDLDAKKDDNTRKRRNYSQGRRRLTGRISKAQREDSIRRTVYVSDIDQSVTEEGLAGLFSNCGQVVDCRICGDPHSVLRFAFVEFADDQGAHEALSLGGTMLGFYPVRVLPSKTAILPVNPTFLPRSEDEREMCTRTIYCTNIDKKVSQADVRNFFESACGEVTRLRLLGDQLHSTRIAFVEFALADSALSALNCSGMVVGSQPIRVSPSKTPVRPRITRPPSTN

SEQ ID NO: 81088 - protein, 278 aa, Arabidopsis thaliana
  peptide (1)..(278): Ceres Seq. ID no. 12658355
MHKLVAMFKKLNPLAKEFFPSYYDPKKNNQVAKANQFLPADDFETTKKQSGEEFDLDAKKDDNTRKRRNYSQGRRRLTGRISKAQREDSIRRTVYVSDIDQSVTEEGLAGLFSNCGQVVDCRICGDPHSVLRFAFVEFADDQGAHEALSLGGTMLGFYPVRVLPSKTAILPVNPTFLPRSEDEREMCTRTIYCTNIDKKVSQADVRNFFESACGEVTRLRLLGDQLHSTRIAFVEFALADSALSALNCSGMVVGSQPIRVSPSKTPVRPRITRPPSTN

SEQ ID NO: 81089 - DNA, 1784 bp, Arabidopsis thaliana
  misc_feature (1)..(1784): Ceres Seq. ID no. 12658395
  misc_feature (1)..(1784): Ortholog of  Ceres SEQ ID NO 14311175 as cited in SEQ ID NO 60223
  misc_feature (1)..(1784): Ortholog of  Ceres SEQ ID NO 15170175 as cited in SEQ ID NO 67138
  misc_feature (1)..(1784): Ortholog of  Ceres SEQ ID NO 12614670 as cited in SEQ ID NO 68565
agttcagtaaaatagaagaaagcatctaacgaattttacaagtaagtgcgtttatgagtgatacaaagatatcagcagtagcagttgctgctgctgtagtggtggtaactacggttacggtatggatatggaaaggtctgaatgtagcttggcttagaccaaagaaaaatgaggcttatctaaagagacaaggtctctctggaactcctttcacctttcttgtcggagacattaaaagggaagccagtatggtggagcaagaaaagtccagacccatcaatctaactgatgattacacgcatcgtgtcatgcctctgatacaacagaccgttaaggatcatgggaagacatcttacatgtggatgggacctatagcgagtgtgattgtgacgaaaccagaacacatcaaagatgttctaaacagagtttacgatttcccgaagccgccagtgcacccaatcgttgagctcttcgcgactggagtcgcgctgtatgaaggagagaaatggtctaagcacaggaagattataaacccttcttttcatcttgaaaagctcaagattatgatacctgcattctacgagagctgcagcgagatgataagtaaatgggagaagttggtgaccgagcaaggatcatcgaatgagatcgatgtttggccatatcttggagatttaacatcagatgtaatttcacgtactgcatttggtagtagctacgaggaaggtaagagaatctttgagcttcaagaagaacaaggccggcgagtgttaaaagctcttgagttggcttttatccctggaatgaggtttctaccaacaaagaacaatttgaggatgagacaaattaacaaagaagtgaaatctagactgagagagatcatcatgaaaagacagaggggtatggatacaggggaggctccaaagaatgatctgttaggaatacttttggaatcgaattctggagatcatggtatgagtatcgaagatgtggtagaagagtgcaggctgtttcacttcgcgggccaagaaaccaccgcggtgctgctcgtgtggactatgataatgctgagccatcaccaaaaatggcaggatcaagctagagaagagatattaaaagtcattgggaagaacaacaaacctaattttgatgcactctctcgactcaaaacaatgagcatgatcttgaacgaagttttgaggttatacccaccagggatactacttggtcgaaccgtagagaaagaaacaaagcttggtgaagacatgacactaccaggtggtgcacaagtagtgattcctgttcttatggttcatcgtgatcccgagctctggggtgaagatgtgcatgaattcaatcctgaaagattcgcagatggtatctcaaaagccacaaagaaccaagtttcgtttcttccgtttggatggggaccaagattctgtcctggccagaattttgctttgatggaagctaagatggcacttgtcttgattctgcagagattctcctttgagctgtctccttcgtacactcacgcacctcatacggttcttacacttcatcctcagtttggtgctccgttgatcttccacatgctctgaaatcgagtcacagagtacaccaaatttcgaaattcctctgtcttttttgtttttcttaaatcaaatttcagtagcatatataacccaataataccacgatgaaatcaagttcgattcaaacatttagggaatattctcagagaacatatcataaacatttgagcatgaacacgtgatttctat

SEQ ID NO: 81090 - protein, 515 aa, Arabidopsis thaliana
  peptide (1)..(515): Ceres Seq. ID no. 12658396
MSDTKISAVAVAAAVVVVTTVTVWIWKGLNVAWLRPKKNEAYLKRQGLSGTPFTFLVGDIKREASMVEQEKSRPINLTDDYTHRVMPLIQQTVKDHGKTSYMWMGPIASVIVTKPEHIKDVLNRVYDFPKPPVHPIVELFATGVALYEGEKWSKHRKIINPSFHLEKLKIMIPAFYESCSEMISKWEKLVTEQGSSNEIDVWPYLGDLTSDVISRTAFGSSYEEGKRIFELQEEQGRRVLKALELAFIPGMRFLPTKNNLRMRQINKEVKSRLREIIMKRQRGMDTGEAPKNDLLGILLESNSGDHGMSIEDVVEECRLFHFAGQETTAVLLVWTMIMLSHHQKWQDQAREEILKVIGKNNKPNFDALSRLKTMSMILNEVLRLYPPGILLGRTVEKETKLGEDMTLPGGAQVVIPVLMVHRDPELWGEDVHEFNPERFADGISKATKNQVSFLPFGWGPRFCPGQNFALMEAKMALVLILQRFSFELSPSYTHAPHTVLTLHPQFGAPLIFHML

SEQ ID NO: 81091 - protein, 450 aa, Arabidopsis thaliana
  peptide (1)..(450): Ceres Seq. ID no. 12658397
MVEQEKSRPINLTDDYTHRVMPLIQQTVKDHGKTSYMWMGPIASVIVTKPEHIKDVLNRVYDFPKPPVHPIVELFATGVALYEGEKWSKHRKIINPSFHLEKLKIMIPAFYESCSEMISKWEKLVTEQGSSNEIDVWPYLGDLTSDVISRTAFGSSYEEGKRIFELQEEQGRRVLKALELAFIPGMRFLPTKNNLRMRQINKEVKSRLREIIMKRQRGMDTGEAPKNDLLGILLESNSGDHGMSIEDVVEECRLFHFAGQETTAVLLVWTMIMLSHHQKWQDQAREEILKVIGKNNKPNFDALSRLKTMSMILNEVLRLYPPGILLGRTVEKETKLGEDMTLPGGAQVVIPVLMVHRDPELWGEDVHEFNPERFADGISKATKNQVSFLPFGWGPRFCPGQNFALMEAKMALVLILQRFSFELSPSYTHAPHTVLTLHPQFGAPLIFHML

SEQ ID NO: 81092 - protein, 430 aa, Arabidopsis thaliana
  peptide (1)..(430): Ceres Seq. ID no. 12658398
MPLIQQTVKDHGKTSYMWMGPIASVIVTKPEHIKDVLNRVYDFPKPPVHPIVELFATGVALYEGEKWSKHRKIINPSFHLEKLKIMIPAFYESCSEMISKWEKLVTEQGSSNEIDVWPYLGDLTSDVISRTAFGSSYEEGKRIFELQEEQGRRVLKALELAFIPGMRFLPTKNNLRMRQINKEVKSRLREIIMKRQRGMDTGEAPKNDLLGILLESNSGDHGMSIEDVVEECRLFHFAGQETTAVLLVWTMIMLSHHQKWQDQAREEILKVIGKNNKPNFDALSRLKTMSMILNEVLRLYPPGILLGRTVEKETKLGEDMTLPGGAQVVIPVLMVHRDPELWGEDVHEFNPERFADGISKATKNQVSFLPFGWGPRFCPGQNFALMEAKMALVLILQRFSFELSPSYTHAPHTVLTLHPQFGAPLIFHML

SEQ ID NO: 81093 - DNA, 1527 bp, Arabidopsis thaliana
  misc_feature (1)..(1527): Ceres Seq. ID no. 12658399
  misc_feature (1)..(1527): Ortholog of  Ceres SEQ ID NO 14311175 as cited in SEQ ID NO 60223
  misc_feature (1)..(1527): Ortholog of  Ceres SEQ ID NO 15224727 as cited in SEQ ID NO 64990
  misc_feature (1)..(1527): Ortholog of  Ceres SEQ ID NO 12614670 as cited in SEQ ID NO 68565
atggagatagtaattgcatcattggctttagttgttgtattgtggtgtatatggagaattttggagtgggtttggcttaaacctaagatgcttgagagttacctgagaagacaaggtcttgtcggaactcgttacacgcctcttgtaggagatgtgagaaggagttttagcatgttgaaggaagcaagatccaaaccgatgaaaccaacggatgatctcatctcacttgtcatgccttactcttttcacatgctcaacacttacgggaagacatttttcacatggtcaggacccatacctgccataacaataatgaatccacagctgatcaaagaagtgtacaacaagttttatgatttcgagaagacgcacacgtttcctttgacttcattgctaactgatggacttgctaatgccgatggagataaatgggtgaaacaccggaagattatcaacccggcattccattttgagaagattaagaatatggtccctacgttttataaaagttgcatcgaggtcatgtgtgaatgggagaagttagtttcagataaagggtcgtcgtgcgagcttgatgtttggccatggattgtgaatatgaccggagatgtgatctctcgaaccgcttttggtagcagttacaaagaaggacagaggatattcatattacaagcagaattagcccacctcatcatactagctcttggaaagaattacattcctgcataccggcatttcccaactaagaataacagaaggatgaaaacaatagtcaaagaaatccaagtcatactaagagggatcattagccatagagaaaaggcgagagacgctggagaagcaccgagtgacgatttgttaggtatacttcttaaatcgaattcagagcaaagtaaaggaaatggactgaacatggaagaaatcatggaagagtgcaagttgttttattttgcgggacaagagaccacttcagtacttttggcttggactatggttttgttaagccaacaccaagactggcaagctcgtgcacgagaggaagtgatgcaagtttttggccataacaaacctgatctacaaggcattaaccaactcaaagttatgacaatgattatatatgaagtcctgaggctatatcctccagtaatccagatgaacagagcgactcacaaagagataaagctaggtgatatgacactaccaggcggtattcaagtccatatgcctgttctgctaatccaccgtgacactaagctttggggcgatgatgcagcggagttcaagcccgagaggttcaaagacgggatcgcaaaggcaacaaagaaccaggtctgcttcttgcctttcgggtggggaccgaggatttgcatcggtcagaacttcgctctgttggaagcaaagatggctctggctttgattcttcagagattctccttcgagctttcaccttcctatgttcattcaccttacagagtcttcactatacatccacagtgtggggctcatcttatcctgcacaagctttga

SEQ ID NO: 81094 - protein, 508 aa, Arabidopsis thaliana
  peptide (1)..(508): Ceres Seq. ID no. 12658400
MEIVIASLALVVVLWCIWRILEWVWLKPKMLESYLRRQGLVGTRYTPLVGDVRRSFSMLKEARSKPMKPTDDLISLVMPYSFHMLNTYGKTFFTWSGPIPAITIMNPQLIKEVYNKFYDFEKTHTFPLTSLLTDGLANADGDKWVKHRKIINPAFHFEKIKNMVPTFYKSCIEVMCEWEKLVSDKGSSCELDVWPWIVNMTGDVISRTAFGSSYKEGQRIFILQAELAHLIILALGKNYIPAYRHFPTKNNRRMKTIVKEIQVILRGIISHREKARDAGEAPSDDLLGILLKSNSEQSKGNGLNMEEIMEECKLFYFAGQETTSVLLAWTMVLLSQHQDWQARAREEVMQVFGHNKPDLQGINQLKVMTMIIYEVLRLYPPVIQMNRATHKEIKLGDMTLPGGIQVHMPVLLIHRDTKLWGDDAAEFKPERFKDGIAKATKNQVCFLPFGWGPRICIGQNFALLEAKMALALILQRFSFELSPSYVHSPYRVFTIHPQCGAHLILHKL

SEQ ID NO: 81095 - protein, 479 aa, Arabidopsis thaliana
  peptide (1)..(479): Ceres Seq. ID no. 12658401
MLESYLRRQGLVGTRYTPLVGDVRRSFSMLKEARSKPMKPTDDLISLVMPYSFHMLNTYGKTFFTWSGPIPAITIMNPQLIKEVYNKFYDFEKTHTFPLTSLLTDGLANADGDKWVKHRKIINPAFHFEKIKNMVPTFYKSCIEVMCEWEKLVSDKGSSCELDVWPWIVNMTGDVISRTAFGSSYKEGQRIFILQAELAHLIILALGKNYIPAYRHFPTKNNRRMKTIVKEIQVILRGIISHREKARDAGEAPSDDLLGILLKSNSEQSKGNGLNMEEIMEECKLFYFAGQETTSVLLAWTMVLLSQHQDWQARAREEVMQVFGHNKPDLQGINQLKVMTMIIYEVLRLYPPVIQMNRATHKEIKLGDMTLPGGIQVHMPVLLIHRDTKLWGDDAAEFKPERFKDGIAKATKNQVCFLPFGWGPRICIGQNFALLEAKMALALILQRFSFELSPSYVHSPYRVFTIHPQCGAHLILHKL

SEQ ID NO: 81096 - protein, 451 aa, Arabidopsis thaliana
  peptide (1)..(451): Ceres Seq. ID no. 12658402
MLKEARSKPMKPTDDLISLVMPYSFHMLNTYGKTFFTWSGPIPAITIMNPQLIKEVYNKFYDFEKTHTFPLTSLLTDGLANADGDKWVKHRKIINPAFHFEKIKNMVPTFYKSCIEVMCEWEKLVSDKGSSCELDVWPWIVNMTGDVISRTAFGSSYKEGQRIFILQAELAHLIILALGKNYIPAYRHFPTKNNRRMKTIVKEIQVILRGIISHREKARDAGEAPSDDLLGILLKSNSEQSKGNGLNMEEIMEECKLFYFAGQETTSVLLAWTMVLLSQHQDWQARAREEVMQVFGHNKPDLQGINQLKVMTMIIYEVLRLYPPVIQMNRATHKEIKLGDMTLPGGIQVHMPVLLIHRDTKLWGDDAAEFKPERFKDGIAKATKNQVCFLPFGWGPRICIGQNFALLEAKMALALILQRFSFELSPSYVHSPYRVFTIHPQCGAHLILHKL

SEQ ID NO: 81097 - DNA, 1545 bp, Arabidopsis thaliana
  misc_feature (1)..(1545): Ceres Seq. ID no. 12658403
  misc_feature (1)..(1545): Ortholog of  Ceres SEQ ID NO 14311203 as cited in SEQ ID NO 53639
  misc_feature (1)..(1545): Ortholog of  Ceres SEQ ID NO 15176053 as cited in SEQ ID NO 57792
  misc_feature (1)..(1545): Ortholog of  Ceres SEQ ID NO 14311175 as cited in SEQ ID NO 60223
  misc_feature (1)..(1545): Ortholog of  Ceres SEQ ID NO 15224727 as cited in SEQ ID NO 64990
  misc_feature (1)..(1545): Ortholog of  Ceres SEQ ID NO 14308023 as cited in SEQ ID NO 65865
  misc_feature (1)..(1545): Ortholog of  Ceres SEQ ID NO 15170175 as cited in SEQ ID NO 67138
  misc_feature (1)..(1545): Ortholog of  Ceres SEQ ID NO 12614670 as cited in SEQ ID NO 68565
atggagatatcagttgcatgcgtaacagtttctgtagttgtagttgttgtgtcatggtgggtatggagaactttacagtgggtttggtttaaaccaaagatgcttgaaagttacttgagaagacaaggtcttgccggaactccttacacacctcttatcggtgatttgaagaggaacgtcaacatgttgacggaggcaacatccaaacccatcaaactaaccgaagatatcacacctcgtgtcctgcctcatcccttccaaatgctcaagactcacggaaggactttctttacatggcttggacccaaaccaaccatcaccataatggatccagagctaatcaaagaagtgttcaacaaagtttatgattatccgaaggcgcaaacgtttcttttgggcagactaatagccactggaatcattaattacgatggtgataaatgggcgaaacaccgaagaatcatcaaccctgcttttcatatagagaagatcaagaatatggtacctgcgttccaccagagctgcagcgatgttgttggcgaatggagcaagttagtgtcggataaagggtcgtcgtcctgtgaggtagacgtttggccttggcttgtgagtatgactggagatgtgatctctcgtactgcttttggcagcagctacaaagaagggcagaggatctttgagctacaagcagaactagtacatctcatcttacaagctttttggaaagtttacatccctggatatcgttatctccctacgaagagtaatagaaggatgaaagcagcagctagagaaatccaagttatactgaaagggatcgttaacaaaaggttaagggcgagagaagctgggaaagcagcaccaaacgacgatttgttgggaatacttcttgaatcaaatttggggcaagccaaaggaaatggaatgagtactgaggatgtgatggaggagtgcaagttgttctatttcgccgggcaagagacaacttcggtacttctggtctgggcaatggtgctgttaagccaccaccaagattggcaggctcgtgcacgagaggaagtgaagcaagtttttggcgataaagaacctgatacagaatgtcttagccagctcaaagttatgacaatgatattatatgaggttctcaggctatatcctcctgtaactcacctgacccgagcgattgacaaagagatgaagctaggtgacttgacactaccagccggtgttcatatcagtctacctataatgctagtccaacgcgaccccatgctgtggggtactgatgcagcagaatttaagcctgagagattcaaagacggtctttcaaaggcaacaaagagccaagtctccttctttccatttgcatggggaccgaggatatgcatcggccagaattttgccatgttagaggcaaagatggcaatggcgttgattctacagacattcaccttcgagctttctccttcctatgttcatgcgcctcaaacagtcgttaccattcacccgcagttcggtgcacatcttattctgcgcaagctataa

SEQ ID NO: 81098 - protein, 514 aa, Arabidopsis thaliana
  peptide (1)..(514): Ceres Seq. ID no. 12658404
MEISVACVTVSVVVVVVSWWVWRTLQWVWFKPKMLESYLRRQGLAGTPYTPLIGDLKRNVNMLTEATSKPIKLTEDITPRVLPHPFQMLKTHGRTFFTWLGPKPTITIMDPELIKEVFNKVYDYPKAQTFLLGRLIATGIINYDGDKWAKHRRIINPAFHIEKIKNMVPAFHQSCSDVVGEWSKLVSDKGSSSCEVDVWPWLVSMTGDVISRTAFGSSYKEGQRIFELQAELVHLILQAFWKVYIPGYRYLPTKSNRRMKAAAREIQVILKGIVNKRLRAREAGKAAPNDDLLGILLESNLGQAKGNGMSTEDVMEECKLFYFAGQETTSVLLVWAMVLLSHHQDWQARAREEVKQVFGDKEPDTECLSQLKVMTMILYEVLRLYPPVTHLTRAIDKEMKLGDLTLPAGVHISLPIMLVQRDPMLWGTDAAEFKPERFKDGLSKATKSQVSFFPFAWGPRICIGQNFAMLEAKMAMALILQTFTFELSPSYVHAPQTVVTIHPQFGAHLILRKL

SEQ ID NO: 81099 - protein, 481 aa, Arabidopsis thaliana
  peptide (1)..(481): Ceres Seq. ID no. 12658405
MLESYLRRQGLAGTPYTPLIGDLKRNVNMLTEATSKPIKLTEDITPRVLPHPFQMLKTHGRTFFTWLGPKPTITIMDPELIKEVFNKVYDYPKAQTFLLGRLIATGIINYDGDKWAKHRRIINPAFHIEKIKNMVPAFHQSCSDVVGEWSKLVSDKGSSSCEVDVWPWLVSMTGDVISRTAFGSSYKEGQRIFELQAELVHLILQAFWKVYIPGYRYLPTKSNRRMKAAAREIQVILKGIVNKRLRAREAGKAAPNDDLLGILLESNLGQAKGNGMSTEDVMEECKLFYFAGQETTSVLLVWAMVLLSHHQDWQARAREEVKQVFGDKEPDTECLSQLKVMTMILYEVLRLYPPVTHLTRAIDKEMKLGDLTLPAGVHISLPIMLVQRDPMLWGTDAAEFKPERFKDGLSKATKSQVSFFPFAWGPRICIGQNFAMLEAKMAMALILQTFTFELSPSYVHAPQTVVTIHPQFGAHLILRKL

SEQ ID NO: 81100 - protein, 453 aa, Arabidopsis thaliana
  peptide (1)..(453): Ceres Seq. ID no. 12658406
MLTEATSKPIKLTEDITPRVLPHPFQMLKTHGRTFFTWLGPKPTITIMDPELIKEVFNKVYDYPKAQTFLLGRLIATGIINYDGDKWAKHRRIINPAFHIEKIKNMVPAFHQSCSDVVGEWSKLVSDKGSSSCEVDVWPWLVSMTGDVISRTAFGSSYKEGQRIFELQAELVHLILQAFWKVYIPGYRYLPTKSNRRMKAAAREIQVILKGIVNKRLRAREAGKAAPNDDLLGILLESNLGQAKGNGMSTEDVMEECKLFYFAGQETTSVLLVWAMVLLSHHQDWQARAREEVKQVFGDKEPDTECLSQLKVMTMILYEVLRLYPPVTHLTRAIDKEMKLGDLTLPAGVHISLPIMLVQRDPMLWGTDAAEFKPERFKDGLSKATKSQVSFFPFAWGPRICIGQNFAMLEAKMAMALILQTFTFELSPSYVHAPQTVVTIHPQFGAHLILRKL

SEQ ID NO: 81101 - DNA, 1962 bp, Arabidopsis thaliana
  misc_feature (1)..(1962): Ceres Seq. ID no. 12658417
  misc_feature (1)..(1962): Ortholog of  Ceres SEQ ID NO 12586556 as cited in SEQ ID NO 64667
  misc_feature (1)..(1962): Ortholog of  Ceres SEQ ID NO 13660894 as cited in SEQ ID NO 67475
atgaccgtctcgtttctacggatcgagattcaaaattgttctgccggaattttgagatttctcccacggaacccagatttattcgcagctataaagccttcttctgctttagcatctttatattcgactgtttctgggcaaatcgaagaaaacccgaagagatacgagcaccacaatgttgctacatgtatcgccacattgcaacgctgtgcacagcgcaaagattacgtttccggccaacagatccacggtttcatggttagaaaagggtttctggatgattcgccacgcgccggcacgagcctcgttaacatgtacgctaagtgtggtctcatgcggcgtgcggtgttggtctttggtggatccgaacgcgatgtatttggttacaacgctttgatttctgggtttgtggtaaatgggtctcctttggatgcgatggagacgtacagagaaatgagagctaatgggattttacctgataagtatacatttcctagtttgctaaaaggaagcgatgctatggagctttctgatgttaagaaggttcatggattggcgtttaaacttgggtttgattccgattgttatgtggggagtggcttagttacttcttactcgaagttcatgtcagtggaggatgctcagaaggtgttcgatgaattgcctgatagagatgacagtgtgctttggaatgctttagttaatgggtattcacagatttttagatttgaggatgctttattagtctttagtaaaatgcgtgaagaaggtgtaggtgtgagcaggcataccattacaagcgtcttatcagcatttactgtttcaggggatattgacaacggtaggtcaatccatggccttgcggtgaaaacgggatctggttctgatattgttgtgtcaaatgcattgattgatatgtatgggaagagtaaatggctagaagaggcaaacagtatattcgaagcaatggatgagagagacctgtttacatggaactctgttttatgtgttcatgactactgtggtgatcatgatggaacattagctcttttcgaaaggatgctttgttctggaatccgacctgatattgttacattgacaactgttctgcccacctgcggtcgtctagcttcactgaggcagggcagagagattcatgggtacatgatcgtcagtggacttctaaaccgcaaatctagtaatgaatttatacataattctttgatggatatgtacgtgaaatgcggggacttgagggacgctcggatggttttcgactcaatgagggttaaagactcagcttcttggaatattatgattaatggctatggtgtgcagagctgcggtgagttagctttggatatgttttcatgtatgtgcagagccggtgtcaaacccgatgaaatcacatttgttgggttgctacaagcgtgtagccactctggttttttgaacgaagggagaaattttttggcacagatggagacggtatataacattctcccaacaagtgatcactacgcttgtgtaatagacatgcttggccgtgcagacaagctagaggaagcatatgagttagcaatatcaaagcccatttgcgataatcctgtagtctggcggtcaatattgtcatcttgtcgtctccacgggaacaaagatctcgcactggtggcaggaaagcggctacatgagctcgagccagagcattgtggcggttatgtattaatgtctaatgtttatgtggaagctgggaagtacgaggaagtgttggacgttagagacgcaatgagacaacagaatgtgaagaagacaccaggttgcagctggattgtgctcaagaacggtgttcacacgttctttaccggcaatcagactcacccggaatttaaatctatccacgattggttaagcctagtgatttctcatatgcacggtcatgagtatatgacggtcgacgactaa

SEQ ID NO: 81102 - protein, 653 aa, Arabidopsis thaliana
  peptide (1)..(653): Ceres Seq. ID no. 12658418
MTVSFLRIEIQNCSAGILRFLPRNPDLFAAIKPSSALASLYSTVSGQIEENPKRYEHHNVATCIATLQRCAQRKDYVSGQQIHGFMVRKGFLDDSPRAGTSLVNMYAKCGLMRRAVLVFGGSERDVFGYNALISGFVVNGSPLDAMETYREMRANGILPDKYTFPSLLKGSDAMELSDVKKVHGLAFKLGFDSDCYVGSGLVTSYSKFMSVEDAQKVFDELPDRDDSVLWNALVNGYSQIFRFEDALLVFSKMREEGVGVSRHTITSVLSAFTVSGDIDNGRSIHGLAVKTGSGSDIVVSNALIDMYGKSKWLEEANSIFEAMDERDLFTWNSVLCVHDYCGDHDGTLALFERMLCSGIRPDIVTLTTVLPTCGRLASLRQGREIHGYMIVSGLLNRKSSNEFIHNSLMDMYVKCGDLRDARMVFDSMRVKDSASWNIMINGYGVQSCGELALDMFSCMCRAGVKPDEITFVGLLQACSHSGFLNEGRNFLAQMETVYNILPTSDHYACVIDMLGRADKLEEAYELAISKPICDNPVVWRSILSSCRLHGNKDLALVAGKRLHELEPEHCGGYVLMSNVYVEAGKYEEVLDVRDAMRQQNVKKTPGCSWIVLKNGVHTFFTGNQTHPEFKSIHDWLSLVISHMHGHEYMTVDD

SEQ ID NO: 81103 - protein, 568 aa, Arabidopsis thaliana
  peptide (1)..(568): Ceres Seq. ID no. 12658419
MVRKGFLDDSPRAGTSLVNMYAKCGLMRRAVLVFGGSERDVFGYNALISGFVVNGSPLDAMETYREMRANGILPDKYTFPSLLKGSDAMELSDVKKVHGLAFKLGFDSDCYVGSGLVTSYSKFMSVEDAQKVFDELPDRDDSVLWNALVNGYSQIFRFEDALLVFSKMREEGVGVSRHTITSVLSAFTVSGDIDNGRSIHGLAVKTGSGSDIVVSNALIDMYGKSKWLEEANSIFEAMDERDLFTWNSVLCVHDYCGDHDGTLALFERMLCSGIRPDIVTLTTVLPTCGRLASLRQGREIHGYMIVSGLLNRKSSNEFIHNSLMDMYVKCGDLRDARMVFDSMRVKDSASWNIMINGYGVQSCGELALDMFSCMCRAGVKPDEITFVGLLQACSHSGFLNEGRNFLAQMETVYNILPTSDHYACVIDMLGRADKLEEAYELAISKPICDNPVVWRSILSSCRLHGNKDLALVAGKRLHELEPEHCGGYVLMSNVYVEAGKYEEVLDVRDAMRQQNVKKTPGCSWIVLKNGVHTFFTGNQTHPEFKSIHDWLSLVISHMHGHEYMTVDD

SEQ ID NO: 81104 - protein, 549 aa, Arabidopsis thaliana
  peptide (1)..(549): Ceres Seq. ID no. 12658420
MYAKCGLMRRAVLVFGGSERDVFGYNALISGFVVNGSPLDAMETYREMRANGILPDKYTFPSLLKGSDAMELSDVKKVHGLAFKLGFDSDCYVGSGLVTSYSKFMSVEDAQKVFDELPDRDDSVLWNALVNGYSQIFRFEDALLVFSKMREEGVGVSRHTITSVLSAFTVSGDIDNGRSIHGLAVKTGSGSDIVVSNALIDMYGKSKWLEEANSIFEAMDERDLFTWNSVLCVHDYCGDHDGTLALFERMLCSGIRPDIVTLTTVLPTCGRLASLRQGREIHGYMIVSGLLNRKSSNEFIHNSLMDMYVKCGDLRDARMVFDSMRVKDSASWNIMINGYGVQSCGELALDMFSCMCRAGVKPDEITFVGLLQACSHSGFLNEGRNFLAQMETVYNILPTSDHYACVIDMLGRADKLEEAYELAISKPICDNPVVWRSILSSCRLHGNKDLALVAGKRLHELEPEHCGGYVLMSNVYVEAGKYEEVLDVRDAMRQQNVKKTPGCSWIVLKNGVHTFFTGNQTHPEFKSIHDWLSLVISHMHGHEYMTVDD

SEQ ID NO: 81105 - DNA, 2332 bp, Arabidopsis thaliana
  misc_feature (1)..(2332): Ceres Seq. ID no. 12658429
  misc_feature (1)..(2332): Ortholog of  Ceres SEQ ID NO 13596857 as cited in SEQ ID NO 62924
attcgttttccttcgttccctctctttcttcacactcctttttttatttatttccattgatctctctcctctcctcgatttttccctcctttaatccatctctgcatattcttcaagcttgggttcatcttcatcttgatctgaatcgatccgatggctacatataagcctaagaacatcctcatcactggggctgctggattcatagcctctcatgttgctaacagactagttcgcagctaccctgactacaaaattgttgtgcttgacaagcttgattactgttctaatctgaagaaccttaatccttctaaatcctctcccaacttcaagtttgtgaaaggagatatcgccagtgctgatctcgtcaactaccttctcatcactgaagaaatcgacaccattatgcactttgctgctcaaacccatgttgacaattctttcggtaatagctttgagtttaccaagaacaatatttatggtacccatgtccttttggaagcttgtaaagtcactggccagatcaggaggttcatccatgtgagtactgatgaggtctatggagagactgatgaggatgcttcagtgggtaatcacgaggcttctcagttgctcccaactaatccatactccgccactaaagctggagctgagatgcttgtcatggcatatggtagatcatatgggttgccggttataacaactcgcgggaacaatgtttatggtcctaaccagtttcctgaaaagttgattcctaagttcatcctcttggccatgaatgggaagcctctcccaatccacggagatggatctaatgtgagaagttatctctactgcgaagatgttgctgaggcatttgaggttgttcttcacaaaggggaagttaaccatgtctacaatatagggacaacgagagaaaggagagtgattgatgtggctaatgacatcagtaaactctttgggatagaccctgactccaccattcagtatgtggaaaaccggccattcaatgaccagaggtacttcctcgatgaccagaagctgaagaaattaggatggtgtgagcgaaccaattgggaagaaggactgaggaagacaatggaatggtatactgagaaccctgagtggtggggcgatgtttctggagctctgcttcctcatccacggatgttgatgatgcccggtgaccgacactctgatggctctgacgagcacaagaatgcagatggtaatcagacattcacggtggttactcccaccaaggctggttgttccggagacaaaagatccttgaagttcctcatctatgggaagactgggtggctcggtggtcttctgggaaaactatgtgagaaacaagggattccttacgagtatggaaaaggaagactagaggatagagcttctctcatcgcagatattcgcagcatcaaaccaagtcatgtcttcaacgccgctggtttaactgggagacccaatgttgactggtgtgaatctcacaaaactgaaaccatccgagtcaacgttgctggaactttgactcttgcagatgtttgcagagagaatgatctgttgatgatgaactttgccactggttgtatattcgagtatgacgctgcacatccagaaggttcagggattggttttaaggaagaagataaaccgaatttcactggttctttctactcaaaaacaaaggcaatggtggaagagcttctaagagaatttgacaacgtatgcaccttgagagtgcggatgccaatctcatctgacttaaataacccgcgaaacttcatcacgaagatctcgcgttacaacaaagtggtgaacattccaaacagcatgaccatactagatgaactcttaccaatctcgatcgagatggcgaagaggaacctaaggggaatatggaacttcaccaatccaggagtggtgagccacaacgagatattagagatgtacaagagttacatcgagcctgatttcaaatggtccaacttcaatttggaagaacaggctaaggtcattgttgctccacggagcaacaacgagatggatggtgccaagctcagcaaggagtttccagagatgctttccatcaaagattcgttgatcaaatacgtcttcgaacctaacaagagaacgtaaaacacagacacacacacgcacttccccgctctgtgttcactataatgtttctactatagttttatctgattcatttactctctttttttgcattctacgacttgcatgtagctgtcttcactcattctacgtcacaacacatctttgttttccattaatgttattacacagatcgatttgttgg

SEQ ID NO: 81106 - protein, 664 aa, Arabidopsis thaliana
  peptide (1)..(664): Ceres Seq. ID no. 12658430
MATYKPKNILITGAAGFIASHVANRLVRSYPDYKIVVLDKLDYCSNLKNLNPSKSSPNFKFVKGDIASADLVNYLLITEEIDTIMHFAAQTHVDNSFGNSFEFTKNNIYGTHVLLEACKVTGQIRRFIHVSTDEVYGETDEDASVGNHEASQLLPTNPYSATKAGAEMLVMAYGRSYGLPVITTRGNNVYGPNQFPEKLIPKFILLAMNGKPLPIHGDGSNVRSYLYCEDVAEAFEVVLHKGEVNHVYNIGTTRERRVIDVANDISKLFGIDPDSTIQYVENRPFNDQRYFLDDQKLKKLGWCERTNWEEGLRKTMEWYTENPEWWGDVSGALLPHPRMLMMPGDRHSDGSDEHKNADGNQTFTVVTPTKAGCSGDKRSLKFLIYGKTGWLGGLLGKLCEKQGIPYEYGKGRLEDRASLIADIRSIKPSHVFNAAGLTGRPNVDWCESHKTETIRVNVAGTLTLADVCRENDLLMMNFATGCIFEYDAAHPEGSGIGFKEEDKPNFTGSFYSKTKAMVEELLREFDNVCTLRVRMPISSDLNNPRNFITKISRYNKVVNIPNSMTILDELLPISIEMAKRNLRGIWNFTNPGVVSHNEILEMYKSYIEPDFKWSNFNLEEQAKVIVAPRSNNEMDGAKLSKEFPEMLSIKDSLIKYVFEPNKRT

SEQ ID NO: 81107 - protein, 580 aa, Arabidopsis thaliana
  peptide (1)..(580): Ceres Seq. ID no. 12658431
MHFAAQTHVDNSFGNSFEFTKNNIYGTHVLLEACKVTGQIRRFIHVSTDEVYGETDEDASVGNHEASQLLPTNPYSATKAGAEMLVMAYGRSYGLPVITTRGNNVYGPNQFPEKLIPKFILLAMNGKPLPIHGDGSNVRSYLYCEDVAEAFEVVLHKGEVNHVYNIGTTRERRVIDVANDISKLFGIDPDSTIQYVENRPFNDQRYFLDDQKLKKLGWCERTNWEEGLRKTMEWYTENPEWWGDVSGALLPHPRMLMMPGDRHSDGSDEHKNADGNQTFTVVTPTKAGCSGDKRSLKFLIYGKTGWLGGLLGKLCEKQGIPYEYGKGRLEDRASLIADIRSIKPSHVFNAAGLTGRPNVDWCESHKTETIRVNVAGTLTLADVCRENDLLMMNFATGCIFEYDAAHPEGSGIGFKEEDKPNFTGSFYSKTKAMVEELLREFDNVCTLRVRMPISSDLNNPRNFITKISRYNKVVNIPNSMTILDELLPISIEMAKRNLRGIWNFTNPGVVSHNEILEMYKSYIEPDFKWSNFNLEEQAKVIVAPRSNNEMDGAKLSKEFPEMLSIKDSLIKYVFEPNKRT

SEQ ID NO: 81108 - protein, 497 aa, Arabidopsis thaliana
  peptide (1)..(497): Ceres Seq. ID no. 12658432
MLVMAYGRSYGLPVITTRGNNVYGPNQFPEKLIPKFILLAMNGKPLPIHGDGSNVRSYLYCEDVAEAFEVVLHKGEVNHVYNIGTTRERRVIDVANDISKLFGIDPDSTIQYVENRPFNDQRYFLDDQKLKKLGWCERTNWEEGLRKTMEWYTENPEWWGDVSGALLPHPRMLMMPGDRHSDGSDEHKNADGNQTFTVVTPTKAGCSGDKRSLKFLIYGKTGWLGGLLGKLCEKQGIPYEYGKGRLEDRASLIADIRSIKPSHVFNAAGLTGRPNVDWCESHKTETIRVNVAGTLTLADVCRENDLLMMNFATGCIFEYDAAHPEGSGIGFKEEDKPNFTGSFYSKTKAMVEELLREFDNVCTLRVRMPISSDLNNPRNFITKISRYNKVVNIPNSMTILDELLPISIEMAKRNLRGIWNFTNPGVVSHNEILEMYKSYIEPDFKWSNFNLEEQAKVIVAPRSNNEMDGAKLSKEFPEMLSIKDSLIKYVFEPNKRT

SEQ ID NO: 81109 - DNA, 2466 bp, Arabidopsis thaliana
  misc_feature (1)..(2466): Ceres Seq. ID no. 12658433
  misc_feature (1)..(2466): Ortholog of  Ceres SEQ ID NO 15226209 as cited in SEQ ID NO 0
attcttcgatccagcttcttccacccgtaacccttaaaagagctcctcggatcctccgattctagtctccaaagattctgacggctttgcttttttctcttataaacaaagggattttggtgtagcagggatacaagttttgtatgatggatgaatcaaatgagataatcttgcagaaatcaaagaggttgacatctgttgtctggaattactttgagagagtgagaaaggctgatgtgtgctatgctgtttgcattcagtgtaataaaaaactcagtggttcgagcaacagcggaacaactcatcttcggaaccatcttatgcggtgtctcaaaagaactaatcacgacatgtctcagttgctgacacctaaaagaaggaaaaaagagaatccagttactgttgctactatcaattttgatgacggtcaagcgaaagaagagtatcttagacctaagtttgatcaggaccaacgaagggacgaggtggttctaagccgaggaagtggtggaaggtttagtcaagaaaggagtcaggttgatcttgcacgtatgattattttgcacaattatccgttagccatggttgatcatgttggattcaaagtttttgctaggaatcttcagccgttgtttgaagctgtgccaaatagcacaattgaggattcatgtatggagatttacattagggagaagcagagagtgcagcacactttgaatcatttatacggtaaagtcaatctttcggtggagatgtggtcttcccgggataattctaactatgtgtgtttggcctctaattatatcgatgaggagtggaggctacataggaatgttctaaactttatcaccttggatccttctcatactgaagatatgctctcggaagtgatcatcagatgtttgattgaatggagtcttgagaacaagcttttcgctgttacgttcgacagtgtttctgttaatgaagagattgtcctgcgaattaaagaccatatgtctcagagcagccagatattaatcaacgggcagttatttgagttgaaatctgccgctcatcttctgaattctcttgtcgaagattgcttggaggctatgagagatgtgatccaaaagattcgaggaagtgtgagatatgtcaagagctcgcaatcaacacaagtaaggttcaacgaaattgctcaactcgccggaatcaactcccagaagatcttggttcttgattctattgttaactcgaactctacgttcgtgatgcttgaaaccgtattggagtacaagggtgcgttttgccatctgcgtgatcacgatcacagctttgattcatctctaaccgacgaggagtgggaatggacaagatacgttactggttatcttaaacttgtattcgatattgcctctgacttttcagcaaacaaatgtcctacagcaaatgtatactttgctgagatgtgtgatatccacatccagttggtcgagtggtgcaagaaccaggacaacttcttgagttctctcgcagcaaatatgaaggctaaattcgatgagtattggaacaaatgcagccttgttttagcaatcgctgcgatattggatccgcgattcaagatgaagttggtagagtattactactctaagatctatggcagtaccgctctggatcgtatcaaggaagtgtcgaatggtgtcaaggagcttcttgatgcatattcgatgtgctcagccattgtcggtgaagattccttctctggatccggtttaggtagagctagtatggacactagagacagactgaaagggttcgacaagtttcttcacgagacttctcagaaccaaaacacaacaacggatttggacaagtacttgtctgaaccgatctttccccgtagtggcgagttcaacattctgaattactggaaggtccatacaccaagataccctatcctctctttgttggcccgtgacattttgggtacgccgatgtcaatctgtgcgcctgattcaaccttcaactctgggacaccggtgatctctgatagtcagagttccttgaaccctgatatcagacaggctttgttctgtgcacatgactggttgtctacagaaacagagggtacaatctcaaactctatttaagtcttcttctcctttataagaattcaaaagccaatcaatcatcaactcctactgacttaaatctcttataacgagccaagaaattctaccattgtctagacaataccctcaaactctgtgaagagaagaacaaaatacaaggatgaaaagatcatggaatgtcactcgtagttctctaaggtggtgaaactgaagagaaagccaaatgcttttagatggtcgtgttgcgtagatggaacagaaagtacagaagtttaatttatttatgcatttgagtttgctgtttgtaacaaatagaatcctcaagtttaaagcaaagggaaataagttaaag

SEQ ID NO: 81110 - protein, 662 aa, Arabidopsis thaliana
  peptide (1)..(662): Ceres Seq. ID no. 12658434
MMDESNEIILQKSKRLTSVVWNYFERVRKADVCYAVCIQCNKKLSGSSNSGTTHLRNHLMRCLKRTNHDMSQLLTPKRRKKENPVTVATINFDDGQAKEEYLRPKFDQDQRRDEVVLSRGSGGRFSQERSQVDLARMIILHNYPLAMVDHVGFKVFARNLQPLFEAVPNSTIEDSCMEIYIREKQRVQHTLNHLYGKVNLSVEMWSSRDNSNYVCLASNYIDEEWRLHRNVLNFITLDPSHTEDMLSEVIIRCLIEWSLENKLFAVTFDSVSVNEEIVLRIKDHMSQSSQILINGQLFELKSAAHLLNSLVEDCLEAMRDVIQKIRGSVRYVKSSQSTQVRFNEIAQLAGINSQKILVLDSIVNSNSTFVMLETVLEYKGAFCHLRDHDHSFDSSLTDEEWEWTRYVTGYLKLVFDIASDFSANKCPTANVYFAEMCDIHIQLVEWCKNQDNFLSSLAANMKAKFDEYWNKCSLVLAIAAILDPRFKMKLVEYYYSKIYGSTALDRIKEVSNGVKELLDAYSMCSAIVGEDSFSGSGLGRASMDTRDRLKGFDKFLHETSQNQNTTTDLDKYLSEPIFPRSGEFNILNYWKVHTPRYPILSLLARDILGTPMSICAPDSTFNSGTPVISDSQSSLNPDIRQALFCAHDWLSTETEGTISNSI

SEQ ID NO: 81111 - protein, 661 aa, Arabidopsis thaliana; identical to SEQ ID NO: 78865
  peptide (1)..(661): Ceres Seq. ID no. 12658435

SEQ ID NO: 81112 - protein, 603 aa, Arabidopsis thaliana; identical to SEQ ID NO: 78866
  peptide (1)..(603): Ceres Seq. ID no. 12658436

SEQ ID NO: 81113 - DNA, 936 bp, Arabidopsis thaliana
  misc_feature (1)..(936): Ceres Seq. ID no. 12658437
  misc_feature (1)..(936): Ortholog of  Ceres SEQ ID NO 13597380 as cited in SEQ ID NO 64054
  misc_feature (1)..(936): Ortholog of  Ceres SEQ ID NO 12625474 as cited in SEQ ID NO 64169
atggatacaggaaataataatgacatccccactcttcttaagtccaattttcctccctatggtcgagattttcctggtgctattcctaccggtagattttcagacgggaaagttccatcggacatcattgcggaatcgttaggaatagcaaaaacactaccaccatatttaggctcgaatctaaagccacatgatcttctaaaaggtgtaatctttgcttctggaggttccggttatgatccattaacatctacattactgtctgtagtatcaatgtcagaccaactaaagtattttcaagaatacctagcaaaaattaagcaacactttggagaagaaaaagttaagttcatattggagaaaagtgtgtttcttgtggtctctagcagtaatgatctcgctgagacttattgggttcgatcggtcgaatatgatcgtaactcatatgctgaatatctggttgagttggcttcagagttcatcaaagaattatctgaacttggagctaaaaacattggactgtttagcggagtaccagtagggtgtttacccgcgcaaagaacactttttggaggctttgaaagaaaatgttatgaaaagttgaataacatggcacttcatttcaattcaaagctatcttctagtttggatactctaaagaaagaactgcccagcagactaatatttatcgacgtttacgatactcttctcgatataattaaaaatcctacaaattacggatttaaagtggcagataaaggatgttgtggtacaggaaaaattgagttgatggaattgtgcaataaatttactccttttacatgttcggatgcatcgactcatgtgttcttcgactcttatcatccgagtgaaaaggcatatcagattatcactcataaattgttagcaaaataccgtaaatacctaaacacctga

SEQ ID NO: 81114 - protein, 311 aa, Arabidopsis thaliana
  peptide (1)..(311): Ceres Seq. ID no. 12658438
MDTGNNNDIPTLLKSNFPPYGRDFPGAIPTGRFSDGKVPSDIIAESLGIAKTLPPYLGSNLKPHDLLKGVIFASGGSGYDPLTSTLLSVVSMSDQLKYFQEYLAKIKQHFGEEKVKFILEKSVFLVVSSSNDLAETYWVRSVEYDRNSYAEYLVELASEFIKELSELGAKNIGLFSGVPVGCLPAQRTLFGGFERKCYEKLNNMALHFNSKLSSSLDTLKKELPSRLIFIDVYDTLLDIIKNPTNYGFKVADKGCCGTGKIELMELCNKFTPFTCSDASTHVFFDSYHPSEKAYQIITHKLLAKYRKYLNT

SEQ ID NO: 81115 - protein, 220 aa, Arabidopsis thaliana
  peptide (1)..(220): Ceres Seq. ID no. 12658439
MSDQLKYFQEYLAKIKQHFGEEKVKFILEKSVFLVVSSSNDLAETYWVRSVEYDRNSYAEYLVELASEFIKELSELGAKNIGLFSGVPVGCLPAQRTLFGGFERKCYEKLNNMALHFNSKLSSSLDTLKKELPSRLIFIDVYDTLLDIIKNPTNYGFKVADKGCCGTGKIELMELCNKFTPFTCSDASTHVFFDSYHPSEKAYQIITHKLLAKYRKYLNT

SEQ ID NO: 81116 - DNA, 987 bp, Arabidopsis thaliana
  misc_feature (1)..(987): Ceres Seq. ID no. 12658442
  misc_feature (1)..(987): Ortholog of  Ceres SEQ ID NO 12625899 as cited in SEQ ID NO 69079
aactcaaatctttcgacggttctgtcctcctgtttcttaagttaatttcaatgcatgccaccgacataaaacgccaccgtttatattgtttgttctaggttcaatggattgcagtttttgaagaaaaacaaagggaagaagattatgtttgttggtgattctcttagtctaaatcaatggcaatcgttggcatgtatgcttcattcctctgttccaaattctacgtatactttaaccacacaaggtagtatatcaacctacacattcaaggagtatggactggaattgaagcttgataggaatgtttatctagtagatatagttagggagaagattgggagagttttgaagcttgattcgatcaatgatggaaaaaattgggtagagatggatacattgatttttaatacttggcattggtggagtcggagaggtcctgcacaaccatgggatttgattcaaatagggactaacgttacaaaagacatggaccgtgtggccgcgtttgaaattgcgcttgggacttgggggaaatgggtcgataccgtcttaaatactaagaaaactagagtcttttttcaaggaatttctccatctcattacaaaggagttctgtggggcgaaccagcggcaaagagttgcgtgggacagaaggaaccacttttggggacaaaatatccaggaggattgccagcagaagtgggagttttgaagagagcactcgggaaaatatcgaaaccggtgacattgctagacattacgatgctttcgttgcttcgcaaagatgctcatccttcggtttacggtctaggcgggcgaaactcctccggtgactgcagccactggtgtctctctggggtaccggatacttggaatgagattctttacaattatatggttgagtaaaagaaataaaatacggaaacatcaattatagcatttgttattgtgattgatcatttaaatctgaataaaaggtccgtttct

SEQ ID NO: 81117 - protein, 253 aa, Arabidopsis thaliana; identical to SEQ ID NO: 78871
  peptide (1)..(253): Ceres Seq. ID no. 12658443

SEQ ID NO: 81118 - protein, 236 aa, Arabidopsis thaliana
  peptide (1)..(236): Ceres Seq. ID no. 12658444
MLHSSVPNSTYTLTTQGSISTYTFKEYGLELKLDRNVYLVDIVREKIGRVLKLDSINDGKNWVEMDTLIFNTWHWWSRRGPAQPWDLIQIGTNVTKDMDRVAAFEIALGTWGKWVDTVLNTKKTRVFFQGISPSHYKGVLWGEPAAKSCVGQKEPLLGTKYPGGLPAEVGVLKRALGKISKPVTLLDITMLSLLRKDAHPSVYGLGGRNSSGDCSHWCLSGVPDTWNEILYNYMVE

SEQ ID NO: 81119 - protein, 172 aa, Arabidopsis thaliana
  peptide (1)..(172): Ceres Seq. ID no. 12658445
MDTLIFNTWHWWSRRGPAQPWDLIQIGTNVTKDMDRVAAFEIALGTWGKWVDTVLNTKKTRVFFQGISPSHYKGVLWGEPAAKSCVGQKEPLLGTKYPGGLPAEVGVLKRALGKISKPVTLLDITMLSLLRKDAHPSVYGLGGRNSSGDCSHWCLSGVPDTWNEILYNYMVE

SEQ ID NO: 81120 - DNA, 1411 bp, Arabidopsis thaliana
  misc_feature (1)..(1411): Ceres Seq. ID no. 12658461
  misc_feature (1)..(1411): Ortholog of  Ceres SEQ ID NO 12616332 as cited in SEQ ID NO 63449
  misc_feature (1)..(1411): Ortholog of  Ceres SEQ ID NO 13597498 as cited in SEQ ID NO 64648
aaacgcttccgagaaagtggatccgccgtagctggaggatccgtcgttacaaaatcatgtcatcttctcccaagctgtttcacgcgcgtccatcattcttcacgcgccgatcgacgcctttgatcgtcttcacctctctcgctatcggtctaaccggtttccttttcggattatcaacgatccttttccctggtctccggttatctggccggtcctgcctcaccaacttgccaccgaagactgttaaaatcgtctgggacgtcgctggtaatagtatcgttaatggcgaagtcaagaggcacaaagtgatgggattcgtcggaatccagaccggattcagatctgctggccggagacgagctctcaggaacacatggatgccgtccgatcccgaaggccttcgaagattggaagaatcaacaggattagccattagatttattataggcaaaaccaaagacgaggccaaaatggttgagctgagaagcgaagttgcaatgtacgatgactttatactgctcgatatcgaggaggagtacagtaagctcccctacaaaactttggctttcttcaaagctgcatatgcactatatgattcagaattctatgtcaaagctgatgatgatatatacttgaggccagatcgtttgtctttactgttggctaaagagcggggtcactcgcagacataccttggatgcatgaaaaaaggtccggttttcacagatccaaagcttaaatggtatgaacctttggcagatctgctcgggaaagagtactttcttcatgcttatggccccatatatgctctttctgctgatgttgtcactagtttggttgccctcaagaacaacagtttcaggatgtttagcaatgaggacgtgaccataggtgcgtggatgctggcaatgaacgttaaccacgagaaccttcacaccctttgtgaaccagagtgctcaccatactccattgctgtttgggatataccaaaatgctcaggcctctgtaacccagagaaaaggatgttggaacttcacatgctagagagctgctcaaaaagcccgactttgccatcggatgatgagtgatctaccattctgccatctaatattttcttctttaatgatctaagatccgaggcgtaacaatttgcagatctctttctctgacatgtccaccattgaagtagcttcacagagattgtgcaagtcttttcacttactctgatctgttattttcggtgggaatgcaagaaaaagcaacgagagttgatctcgcttagacggctttagggaatttttaaactagggttagtaattttggtgtatcacaagttttgggcgataccttgttgtacaagtataagattaaacattgttatagtgtgaaactatcaaagctacatagtttg

SEQ ID NO: 81121 - protein, 361 aa, Arabidopsis thaliana
  peptide (1)..(361): Ceres Seq. ID no. 12658462
TLPRKWIRRSWRIRRYKIMSSSPKLFHARPSFFTRRSTPLIVFTSLAIGLTGFLFGLSTILFPGLRLSGRSCLTNLPPKTVKIVWDVAGNSIVNGEVKRHKVMGFVGIQTGFRSAGRRRALRNTWMPSDPEGLRRLEESTGLAIRFIIGKTKDEAKMVELRSEVAMYDDFILLDIEEEYSKLPYKTLAFFKAAYALYDSEFYVKADDDIYLRPDRLSLLLAKERGHSQTYLGCMKKGPVFTDPKLKWYEPLADLLGKEYFLHAYGPIYALSADVVTSLVALKNNSFRMFSNEDVTIGAWMLAMNVNHENLHTLCEPECSPYSIAVWDIPKCSGLCNPEKRMLELHMLESCSKSPTLPSDDE

SEQ ID NO: 81122 - protein, 343 aa, Arabidopsis thaliana
  peptide (1)..(343): Ceres Seq. ID no. 12658463
MSSSPKLFHARPSFFTRRSTPLIVFTSLAIGLTGFLFGLSTILFPGLRLSGRSCLTNLPPKTVKIVWDVAGNSIVNGEVKRHKVMGFVGIQTGFRSAGRRRALRNTWMPSDPEGLRRLEESTGLAIRFIIGKTKDEAKMVELRSEVAMYDDFILLDIEEEYSKLPYKTLAFFKAAYALYDSEFYVKADDDIYLRPDRLSLLLAKERGHSQTYLGCMKKGPVFTDPKLKWYEPLADLLGKEYFLHAYGPIYALSADVVTSLVALKNNSFRMFSNEDVTIGAWMLAMNVNHENLHTLCEPECSPYSIAVWDIPKCSGLCNPEKRMLELHMLESCSKSPTLPSDDE

SEQ ID NO: 81123 - protein, 259 aa, Arabidopsis thaliana
  peptide (1)..(259): Ceres Seq. ID no. 12658464
MGFVGIQTGFRSAGRRRALRNTWMPSDPEGLRRLEESTGLAIRFIIGKTKDEAKMVELRSEVAMYDDFILLDIEEEYSKLPYKTLAFFKAAYALYDSEFYVKADDDIYLRPDRLSLLLAKERGHSQTYLGCMKKGPVFTDPKLKWYEPLADLLGKEYFLHAYGPIYALSADVVTSLVALKNNSFRMFSNEDVTIGAWMLAMNVNHENLHTLCEPECSPYSIAVWDIPKCSGLCNPEKRMLELHMLESCSKSPTLPSDDE

SEQ ID NO: 81124 - DNA, 1585 bp, Arabidopsis thaliana
  misc_feature (1)..(1585): Ceres Seq. ID no. 12658468
  misc_feature (1)..(1585): Ortholog of  Ceres SEQ ID NO 15178131 as cited in SEQ ID NO 52639
gtcacatattttcccctcttttttttcgtgtcagattcgctttctctacggctggactagaaggattagggatttaccggtgaaagaataactccagagataaatctgtaaccatggatatgatgaagaagcgtaagctcgatgagaacggtaacggactcaataccaacggtggcggaaccattggtccaactcgattgtcgccgcaagacgcgaggaagattatcgagcgattcaccactgatcagctgctcgacttattgcaagaggctatcgtacgccatcccgacgtgcttgaatctgtccgattaaccgccgactctgatatctcgcagcggaagctattcatccgtggtctcgcggcggatactactacggaaggtctccgttcgcttttttccagttacggagatctagaagaagctattgtgatccttgacaaggtcactgggaaatcgaaagggtatggtttcgtcacttttatgcacgttgatggagctttactagctctgaaagaaccatctaagaaaattgatgggcgtgttacagtaacgcagctcgcggcatctggaaatcaaggtacgggttcccagattgcagatatatcaatgaggaagatctatgtggcgaatgttccttttgatatgccggcggataggctattgaatcactttatggcttatggagatgttgaggaaggtcctttgggttttgataaggttactggtaaatctagaggctttgcattgtttgtctacaagacagcggaaggtgcgcaggctgctcttgctgatccggtgaaggtgattgatggaaaacatttgaattgtaagttggctgttgatggtaagaaaggagggaagcctggaatgccacaagctcaagatggtggttctggtcatggacacgttcatggtgagggaatgggaatggtgcgtcctgcaggaccttatggtgcagctggtggtatcagtgcttatggtgggtactctggaggaccaccagcgcatcacatgaattccacacactcctcaatgggtgttggttctgctgggtatggtggacactatggtggatatggaggtccaggtggtactggcgtctacggtggacttggcggtgggtatggtgggcctggtactggaagtgggcagtatagaatgccaccaagttcgatgcctggtggtggtggttatcccgagagtgggcattacggtctttcatcatctgctgggtatcctggacagcatcatcaggctgttggaacgtcccctgtgccaagagttcctcatggcggaatgtaccccaacggtccaccaaactactgaaaaggtttgtgacagcatattgggtgaagatgctttttgtgcttagtggtgattacctgattgcagctctttaatctctggaatgatgaatgtatagctgctttgacctatctgcacttgacctgaatgtgctttggtttctataatgaatgattagactaggatatatttatgtacttttaaatatagacatactcggcaaatgagttttgttggtcagattagtgagtcttcaataatatgttgtattttctcct

SEQ ID NO: 81125 - protein, 404 aa, Arabidopsis thaliana
  peptide (1)..(404): Ceres Seq. ID no. 12658469
MDMMKKRKLDENGNGLNTNGGGTIGPTRLSPQDARKIIERFTTDQLLDLLQEAIVRHPDVLESVRLTADSDISQRKLFIRGLAADTTTEGLRSLFSSYGDLEEAIVILDKVTGKSKGYGFVTFMHVDGALLALKEPSKKIDGRVTVTQLAASGNQGTGSQIADISMRKIYVANVPFDMPADRLLNHFMAYGDVEEGPLGFDKVTGKSRGFALFVYKTAEGAQAALADPVKVIDGKHLNCKLAVDGKKGGKPGMPQAQDGGSGHGHVHGEGMGMVRPAGPYGAAGGISAYGGYSGGPPAHHMNSTHSSMGVGSAGYGGHYGGYGGPGGTGVYGGLGGGYGGPGTGSGQYRMPPSSMPGGGGYPESGHYGLSSSAGYPGQHHQAVGTSPVPRVPHGGMYPNGPPNY

SEQ ID NO: 81126 - protein, 402 aa, Arabidopsis thaliana
  peptide (1)..(402): Ceres Seq. ID no. 12658470
MMKKRKLDENGNGLNTNGGGTIGPTRLSPQDARKIIERFTTDQLLDLLQEAIVRHPDVLESVRLTADSDISQRKLFIRGLAADTTTEGLRSLFSSYGDLEEAIVILDKVTGKSKGYGFVTFMHVDGALLALKEPSKKIDGRVTVTQLAASGNQGTGSQIADISMRKIYVANVPFDMPADRLLNHFMAYGDVEEGPLGFDKVTGKSRGFALFVYKTAEGAQAALADPVKVIDGKHLNCKLAVDGKKGGKPGMPQAQDGGSGHGHVHGEGMGMVRPAGPYGAAGGISAYGGYSGGPPAHHMNSTHSSMGVGSAGYGGHYGGYGGPGGTGVYGGLGGGYGGPGTGSGQYRMPPSSMPGGGGYPESGHYGLSSSAGYPGQHHQAVGTSPVPRVPHGGMYPNGPPNY

SEQ ID NO: 81127 - protein, 401 aa, Arabidopsis thaliana
  peptide (1)..(401): Ceres Seq. ID no. 12658471
MKKRKLDENGNGLNTNGGGTIGPTRLSPQDARKIIERFTTDQLLDLLQEAIVRHPDVLESVRLTADSDISQRKLFIRGLAADTTTEGLRSLFSSYGDLEEAIVILDKVTGKSKGYGFVTFMHVDGALLALKEPSKKIDGRVTVTQLAASGNQGTGSQIADISMRKIYVANVPFDMPADRLLNHFMAYGDVEEGPLGFDKVTGKSRGFALFVYKTAEGAQAALADPVKVIDGKHLNCKLAVDGKKGGKPGMPQAQDGGSGHGHVHGEGMGMVRPAGPYGAAGGISAYGGYSGGPPAHHMNSTHSSMGVGSAGYGGHYGGYGGPGGTGVYGGLGGGYGGPGTGSGQYRMPPSSMPGGGGYPESGHYGLSSSAGYPGQHHQAVGTSPVPRVPHGGMYPNGPPNY

SEQ ID NO: 81128 - DNA, 780 bp, Arabidopsis thaliana
  misc_feature (1)..(780): Ceres Seq. ID no. 12658472
  misc_feature (1)..(780): Ortholog of  Ceres SEQ ID NO 13592859 as cited in SEQ ID NO 20479
atgggatctggatggctgctccgctcaatcatctgtctaaacggaacaaagaagaacaaatcaaatcgaggcaacgtacattctgaaacatcaaaccgtgtcaaaccggttgaatcaagctctgctgcttctactaagcttaccgtagaagtcgctgttattcgcattcaaaaggcttttcgagcattcaaggcgagaaaaagactatgcagcttgaagagtgcgaggagatttaactcgctgatccaaggccatacagtgatgaaccaaacctcgactgcactcaatgtgattcattcttggtacgatatacagaatcagatcagagcacgacgtttgtatatggtgacacaaggtagactccaacacaaaagattggagaatcgtttgaagctggagatcaaacttcacgagctagaagttgaatggtgtggaggctctgaaacaatggaggagattctcgcaaagatacaacagaaagaagaagctacggttaagcgtgaaagagcaatggcttatgctttctctcatcagtggagggctaatgctacacagtatctaggtcaagcttcgtttaaccttggcaaagaaagctggggatggagttggaaagaacggtggattgcggctcgaccttgggagattagggctcaatgctacgtcgttaaaccgatcaaaccatctaagaaaccggagaaatcatcacccaataatgtgatcacaaaaacctctgctaaaccggatgaagttggtaactcgaaaaagcctggttccggataa

SEQ ID NO: 81129 - protein, 259 aa, Arabidopsis thaliana
  peptide (1)..(259): Ceres Seq. ID no. 12658473
MGSGWLLRSIICLNGTKKNKSNRGNVHSETSNRVKPVESSSAASTKLTVEVAVIRIQKAFRAFKARKRLCSLKSARRFNSLIQGHTVMNQTSTALNVIHSWYDIQNQIRARRLYMVTQGRLQHKRLENRLKLEIKLHELEVEWCGGSETMEEILAKIQQKEEATVKRERAMAYAFSHQWRANATQYLGQASFNLGKESWGWSWKERWIAARPWEIRAQCYVVKPIKPSKKPEKSSPNNVITKTSAKPDEVGNSKKPGSG

SEQ ID NO: 81130 - protein, 172 aa, Arabidopsis thaliana
  peptide (1)..(172): Ceres Seq. ID no. 12658474
MNQTSTALNVIHSWYDIQNQIRARRLYMVTQGRLQHKRLENRLKLEIKLHELEVEWCGGSETMEEILAKIQQKEEATVKRERAMAYAFSHQWRANATQYLGQASFNLGKESWGWSWKERWIAARPWEIRAQCYVVKPIKPSKKPEKSSPNNVITKTSAKPDEVGNSKKPGSG

SEQ ID NO: 81131 - protein, 145 aa, Arabidopsis thaliana
  peptide (1)..(145): Ceres Seq. ID no. 12658475
MVTQGRLQHKRLENRLKLEIKLHELEVEWCGGSETMEEILAKIQQKEEATVKRERAMAYAFSHQWRANATQYLGQASFNLGKESWGWSWKERWIAARPWEIRAQCYVVKPIKPSKKPEKSSPNNVITKTSAKPDEVGNSKKPGSG

SEQ ID NO: 81132 - DNA, 1845 bp, Arabidopsis thaliana
  misc_feature (1)..(1845): Ceres Seq. ID no. 12658486
  misc_feature (1)..(1845): Ortholog of  Ceres SEQ ID NO 13596218 as cited in SEQ ID NO 68522
  misc_feature (1)..(1845): Ortholog of  Ceres SEQ ID NO 13599383 as cited in SEQ ID NO 0
gagaacatgagtgatcaagaaggagactgggatttttacctcagaatcctaagcaacagcgcgcgggattctacggatcctgcttctgatccatctatactacaatcagtgaagaagctgcatgggttctgtaaaatggagaaatcagatgatcttgtggctagaatttatccacaattcaataaagtcttccatcgttcggttgcttcactatctcagtccgagtcaggggcgtccaaaggccttctcttgctagccattcttcagttttttcttgattttggggatatggttctgcacgattctgacccaagtttgaggacattcttccgctcatgtcttagccgtgagttctcagatgccgctgtggcagaggcaacttgtgaattccttgttgtgaaccaaagaaagctcttagcatctttcccaaacttactccctcagtttttcccgttgttgcttaagctcattgcctggaattgggagaagttggagaagtccttcctgaagatatttccaggactgatatcacctgggtcatttcttcctctgtttccatccattgtagacttgccaatattggtcgtggcattagaaaaggtggaaaggagctcggggtcggggtcaagggttggaggtagcattgcttcaattcagaagagtgcagctccggagatgcttcttgcccttatggatgaagcatatactggttcaaccatcggggatggaggggatgactctgaatctgaagataacaatacaatagatgtagctgatcctctgtttctggagcttctgaaggacgaaaatgatggtctagcggaaagacaccgcgcttctcctacattgaatgcagcgctgcaggctgctgcaagtggtcctcggtcagagaggatgaagcagactcttaagattgctccccgacttcttgatgtctactttagtgttacattgcgagatgcaaatgactctctgatctgtgctttaatccctctactcatgacaagaaactctacaatgtttccggataagattttttctcatgagatccgtaggaggctactggaatttgtactagctgcatttcagaggtctccaaatttcattgccctgttgaaaaagcctattattgaccgacttggggaagcttacgatgatgttgcaaagagagagttagccttacagctatgttgggcaattggagagtatggtggtgggggagaatctcacaaggaagctgctcgagagctttttgaaagtttagagttgcttgtatatgagaatctctcatcaagccgcctaggtttgaggcaagaatctgggaatggttcaagaagaacaacacagtcaagacttctgtgttttgtagtgacagctatcgcaaagctcgcaacatatcaccgagaattattaccaagagcccgcgtcgccttgggaaaggtagtaaagtctcggatatctgatgcaagggtttggagacgagcacatgattacttaggactaatgaacgaaccaggaatctgttggtctgtgttaggaccttcacgggtttcagaaaaacggtttccaggcacagttaactggagcgagggtggacaaaaaatggttgcacacattccatttcacattcttagtgaacaaggaggtcctccattccatgactttgctttctccgatatcatccccaaaaactaatcaaacaaacaagtctcttaaattgtgttttattgtgaatagtgaaactcaaaggtgtttgtgtttgtatacatcggcatctcttttttttctagcagatgtagttttgtaaccttcttgactatggttcgttcaaacttggcaaaattc

SEQ ID NO: 81133 - protein, 564 aa, Arabidopsis thaliana
  peptide (1)..(564): Ceres Seq. ID no. 12658487
ENMSDQEGDWDFYLRILSNSARDSTDPASDPSILQSVKKLHGFCKMEKSDDLVARIYPQFNKVFHRSVASLSQSESGASKGLLLLAILQFFLDFGDMVLHDSDPSLRTFFRSCLSREFSDAAVAEATCEFLVVNQRKLLASFPNLLPQFFPLLLKLIAWNWEKLEKSFLKIFPGLISPGSFLPLFPSIVDLPILVVALEKVERSSGSGSRVGGSIASIQKSAAPEMLLALMDEAYTGSTIGDGGDDSESEDNNTIDVADPLFLELLKDENDGLAERHRASPTLNAALQAAASGPRSERMKQTLKIAPRLLDVYFSVTLRDANDSLICALIPLLMTRNSTMFPDKIFSHEIRRRLLEFVLAAFQRSPNFIALLKKPIIDRLGEAYDDVAKRELALQLCWAIGEYGGGGESHKEAARELFESLELLVYENLSSSRLGLRQESGNGSRRTTQSRLLCFVVTAIAKLATYHRELLPRARVALGKVVKSRISDARVWRRAHDYLGLMNEPGICWSVLGPSRVSEKRFPGTVNWSEGGQKMVAHIPFHILSEQGGPPFHDFAFSDIIPKN

SEQ ID NO: 81134 - protein, 562 aa, Arabidopsis thaliana
  peptide (1)..(562): Ceres Seq. ID no. 12658488
MSDQEGDWDFYLRILSNSARDSTDPASDPSILQSVKKLHGFCKMEKSDDLVARIYPQFNKVFHRSVASLSQSESGASKGLLLLAILQFFLDFGDMVLHDSDPSLRTFFRSCLSREFSDAAVAEATCEFLVVNQRKLLASFPNLLPQFFPLLLKLIAWNWEKLEKSFLKIFPGLISPGSFLPLFPSIVDLPILVVALEKVERSSGSGSRVGGSIASIQKSAAPEMLLALMDEAYTGSTIGDGGDDSESEDNNTIDVADPLFLELLKDENDGLAERHRASPTLNAALQAAASGPRSERMKQTLKIAPRLLDVYFSVTLRDANDSLICALIPLLMTRNSTMFPDKIFSHEIRRRLLEFVLAAFQRSPNFIALLKKPIIDRLGEAYDDVAKRELALQLCWAIGEYGGGGESHKEAARELFESLELLVYENLSSSRLGLRQESGNGSRRTTQSRLLCFVVTAIAKLATYHRELLPRARVALGKVVKSRISDARVWRRAHDYLGLMNEPGICWSVLGPSRVSEKRFPGTVNWSEGGQKMVAHIPFHILSEQGGPPFHDFAFSDIIPKN

SEQ ID NO: 81135 - protein, 519 aa, Arabidopsis thaliana
  peptide (1)..(519): Ceres Seq. ID no. 12658489
MEKSDDLVARIYPQFNKVFHRSVASLSQSESGASKGLLLLAILQFFLDFGDMVLHDSDPSLRTFFRSCLSREFSDAAVAEATCEFLVVNQRKLLASFPNLLPQFFPLLLKLIAWNWEKLEKSFLKIFPGLISPGSFLPLFPSIVDLPILVVALEKVERSSGSGSRVGGSIASIQKSAAPEMLLALMDEAYTGSTIGDGGDDSESEDNNTIDVADPLFLELLKDENDGLAERHRASPTLNAALQAAASGPRSERMKQTLKIAPRLLDVYFSVTLRDANDSLICALIPLLMTRNSTMFPDKIFSHEIRRRLLEFVLAAFQRSPNFIALLKKPIIDRLGEAYDDVAKRELALQLCWAIGEYGGGGESHKEAARELFESLELLVYENLSSSRLGLRQESGNGSRRTTQSRLLCFVVTAIAKLATYHRELLPRARVALGKVVKSRISDARVWRRAHDYLGLMNEPGICWSVLGPSRVSEKRFPGTVNWSEGGQKMVAHIPFHILSEQGGPPFHDFAFSDIIPKN

SEQ ID NO: 81136 - DNA, 1008 bp, Arabidopsis thaliana
  misc_feature (1)..(1008): Ceres Seq. ID no. 12658543
  misc_feature (1)..(1008): Ortholog of  Ceres SEQ ID NO 15227289 as cited in SEQ ID NO 58851
atggaagaaagcaatgatatttttcagaacaatttcagtcctaaaatctcagaaatcagagcatctctgtctcagatcatattagcaggaggaccaaacacactcgactcaatcttctcacttctcactccctcctccgtagaatccgccacaacatcattcaacactcacaatcctccgccaccgccgcagctcgggtcctccgtctatctccgccaacgagatatcatcgagaagttccaccttcagaacagagcaatctccactcctcatcctcctctgttttcctcaacgtacgatcatcatcaaacttccgagctaatgctccaagcggcggccgggtctccagccgccgctttcgccgctgcgttagcggctgggagggtgacgaaaaagaagaaactttacagaggagtgaggcagagacattggggaaaatgggttgcggagataagattgccgcaaaacagaatgagggtttggttaggtacttacgacacggcggaagccgccgcttacgcttacgatcgcgccgcctataagctccgtggagaatacgctcgtctcaattttcctaatctcaaagacccgagtgagctactcggactcggagattcctctaagctaatagctctcaagaacgccgtcgacgggaagatccaatccatttgccagagagtcagaaaagagagagcaaaaaagagcgtaaaagtgagcaaaaactcgtcggccacggcggattcttcgtgtttgtcatcgccggagattctgtcgtcgtctccggtgacgacaactactactgcggttacttcagaggatagttattgggtttcacctatgggtttgtgtaacagtgaaaatagttctccggtatcagtttcggtccctagtgaagtaccggcgacggcggaggaagaggcaatgatgggagtggacactgatgggtttttattagcgaggatgccatcgttcgatccagagctgatttgggaagttcttgccaattaa

SEQ ID NO: 81137 - protein, 335 aa, Arabidopsis thaliana
  peptide (1)..(335): Ceres Seq. ID no. 12658544
MEESNDIFQNNFSPKISEIRASLSQIILAGGPNTLDSIFSLLTPSSVESATTSFNTHNPPPPPQLGSSVYLRQRDIIEKFHLQNRAISTPHPPLFSSTYDHHQTSELMLQAAAGSPAAAFAAALAAGRVTKKKKLYRGVRQRHWGKWVAEIRLPQNRMRVWLGTYDTAEAAAYAYDRAAYKLRGEYARLNFPNLKDPSELLGLGDSSKLIALKNAVDGKIQSICQRVRKERAKKSVKVSKNSSATADSSCLSSPEILSSSPVTTTTTAVTSEDSYWVSPMGLCNSENSSPVSVSVPSEVPATAEEEAMMGVDTDGFLLARMPSFDPELIWEVLAN

SEQ ID NO: 81138 - protein, 228 aa, Arabidopsis thaliana
  peptide (1)..(228): Ceres Seq. ID no. 12658545
MLQAAAGSPAAAFAAALAAGRVTKKKKLYRGVRQRHWGKWVAEIRLPQNRMRVWLGTYDTAEAAAYAYDRAAYKLRGEYARLNFPNLKDPSELLGLGDSSKLIALKNAVDGKIQSICQRVRKERAKKSVKVSKNSSATADSSCLSSPEILSSSPVTTTTTAVTSEDSYWVSPMGLCNSENSSPVSVSVPSEVPATAEEEAMMGVDTDGFLLARMPSFDPELIWEVLAN

SEQ ID NO: 81139 - protein, 178 aa, Arabidopsis thaliana
  peptide (1)..(178): Ceres Seq. ID no. 12658546
MRVWLGTYDTAEAAAYAYDRAAYKLRGEYARLNFPNLKDPSELLGLGDSSKLIALKNAVDGKIQSICQRVRKERAKKSVKVSKNSSATADSSCLSSPEILSSSPVTTTTTAVTSEDSYWVSPMGLCNSENSSPVSVSVPSEVPATAEEEAMMGVDTDGFLLARMPSFDPELIWEVLAN

SEQ ID NO: 81140 - DNA, 645 bp, Arabidopsis thaliana
  misc_feature (1)..(645): Ceres Seq. ID no. 12658559
  misc_feature (1)..(645): Ortholog of  Ceres SEQ ID NO 14306297 as cited in SEQ ID NO 56907
atgttggcattcgtgaaatgcttctcgttgaagcgagcaaagcatcctcgtggatatgaggatcctcatgttcttgcatccgaaactcccttcaccgtgaatgagattgaggctttacacgatttattcaagaagctaagtacatctattatcaatgatggtctaatccataaggaagagtttcttctggctttgttcagaaacggcagtatgcaaaatctatttgcggacagggtgttttatatgtttgataggaaacgcaacggtgtgattgagtttggagaatttgttcgttcccttagcatattccatccatacactcccgaacatgaaaaatctgcatttatgttcaagctttttgacctccatggaaccggcttcatcgagccccatgagctgaagaagatggttggcgcactacttggtgaaacagacttagaactctcggaagaatctattgaagctatcgtggaacagacgatgctcgaggttgatacaaacaaagatgggaagattgatgaagaagagtggaaagagctcgttgctaagaatccttcaatcctcaagaacatgactctgccttacctcaaggaagtgactttagcatttccaagctttgtactcgactctgaagttgaagactag

SEQ ID NO: 81141 - protein, 214 aa, Arabidopsis thaliana
  peptide (1)..(214): Ceres Seq. ID no. 12658560
MLAFVKCFSLKRAKHPRGYEDPHVLASETPFTVNEIEALHDLFKKLSTSIINDGLIHKEEFLLALFRNGSMQNLFADRVFYMFDRKRNGVIEFGEFVRSLSIFHPYTPEHEKSAFMFKLFDLHGTGFIEPHELKKMVGALLGETDLELSEESIEAIVEQTMLEVDTNKDGKIDEEEWKELVAKNPSILKNMTLPYLKEVTLAFPSFVLDSEVED

SEQ ID NO: 81142 - protein, 144 aa, Arabidopsis thaliana
  peptide (1)..(144): Ceres Seq. ID no. 12658561
MQNLFADRVFYMFDRKRNGVIEFGEFVRSLSIFHPYTPEHEKSAFMFKLFDLHGTGFIEPHELKKMVGALLGETDLELSEESIEAIVEQTMLEVDTNKDGKIDEEEWKELVAKNPSILKNMTLPYLKEVTLAFPSFVLDSEVED

SEQ ID NO: 81143 - protein, 133 aa, Arabidopsis thaliana
  peptide (1)..(133): Ceres Seq. ID no. 12658562
MFDRKRNGVIEFGEFVRSLSIFHPYTPEHEKSAFMFKLFDLHGTGFIEPHELKKMVGALLGETDLELSEESIEAIVEQTMLEVDTNKDGKIDEEEWKELVAKNPSILKNMTLPYLKEVTLAFPSFVLDSEVED

SEQ ID NO: 81144 - DNA, 1255 bp, Arabidopsis thaliana
  misc_feature (1)..(1255): Ceres Seq. ID no. 12658563
  misc_feature (1)..(1255): Ortholog of  Ceres SEQ ID NO 13581701 as cited in SEQ ID NO 51151
  misc_feature (1)..(1255): Ortholog of  Ceres SEQ ID NO 14315491 as cited in SEQ ID NO 57026
acaaagaaaactgaacaaaatttgaagagttattaaaatggggtgtacatcttccaagcaagcaaaagctaacgtcgtcgccgacgtttacaaaccaccgccgtctagtttcgcggtgtttgatgtcaacgccatccaagagccatggctaaaatttgaacatgaagatgatgagaaaccgccacgctccaccgtcttcgaccgtctcgacgaggatgatgatgatgatgatgatgatggtgatgacgctcctaaaacatgggaagaagtcagcaaatctctagaaactaaacttaaacctgccgccgttaaaccgccggaagtagactctgttaaacctccggcgactcctccacggcggcttccgcggaagagcgcatcgttccacacactggacgagcttgaagtgagggccaaaagaagcatcgccgcgcaaatcccgacgacaatggttaagcttaagagaaccgagtcgatgtccaagctaagacccgagtcagatgatcgaaccgagtccactcagtcgtcctactcggggcctcggtcagtgaaggagaacatattcgtcaagagagacagagaacggagggagaaagaagggaacaagaagccggtgatgaactgggacccacttagggagttcccggagaagtgtccgccgggaggaggggaaggtttgattgtctacacgacgtcgttgcaaggagtgcgtcgcacgtacgaggattgtatgcgtgtgagggccatcatggagcagcaaggagttgtggtggacgagagggacgtgtctttagacgccggagtcttgagcgagcttaaggagcttctccaagacgaagcatcagtggcgccgccgcgagtgtttgtgaaagggaggtacttgggaggagcagcggaagtgacagcgatgaatgagaacgggaagttagggagggtgttgcggtgggcacgtgtggagagagtaggggaggaagggaggctcacgtgtgaagggtgcggaggagcgaggtggttgccttgtttcgagtgcggcggaagctgtaaggtggcggcggttggggcggccaaaggtgaaaggtgggagaggtgtgtcaagtgtaatgagaatggattgattcgttgtcccgtgtgttttgttaattaagaacattattagtttacacaagcaaatagaggtgtgtcaaatatactttgtcccgtttgttttgttatatgtatgtgacacgtttgattttgtggaattgaaaatgatttg

SEQ ID NO: 81145 - protein, 368 aa, Arabidopsis thaliana
  peptide (1)..(368): Ceres Seq. ID no. 12658564
MGCTSSKQAKANVVADVYKPPPSSFAVFDVNAIQEPWLKFEHEDDEKPPRSTVFDRLDEDDDDDDDDGDDAPKTWEEVSKSLETKLKPAAVKPPEVDSVKPPATPPRRLPRKSASFHTLDELEVRAKRSIAAQIPTTMVKLKRTESMSKLRPESDDRTESTQSSYSGPRSVKENIFVKRDRERREKEGNKKPVMNWDPLREFPEKCPPGGGEGLIVYTTSLQGVRRTYEDCMRVRAIMEQQGVVVDERDVSLDAGVLSELKELLQDEASVAPPRVFVKGRYLGGAAEVTAMNENGKLGRVLRWARVERVGEEGRLTCEGCGGARWLPCFECGGSCKVAAVGAAKGERWERCVKCNENGLIRCPVCFVN

SEQ ID NO: 81146 - protein, 231 aa, Arabidopsis thaliana
  peptide (1)..(231): Ceres Seq. ID no. 12658565
MVKLKRTESMSKLRPESDDRTESTQSSYSGPRSVKENIFVKRDRERREKEGNKKPVMNWDPLREFPEKCPPGGGEGLIVYTTSLQGVRRTYEDCMRVRAIMEQQGVVVDERDVSLDAGVLSELKELLQDEASVAPPRVFVKGRYLGGAAEVTAMNENGKLGRVLRWARVERVGEEGRLTCEGCGGARWLPCFECGGSCKVAAVGAAKGERWERCVKCNENGLIRCPVCFVN

SEQ ID NO: 81147 - protein, 222 aa, Arabidopsis thaliana
  peptide (1)..(222): Ceres Seq. ID no. 12658566
MSKLRPESDDRTESTQSSYSGPRSVKENIFVKRDRERREKEGNKKPVMNWDPLREFPEKCPPGGGEGLIVYTTSLQGVRRTYEDCMRVRAIMEQQGVVVDERDVSLDAGVLSELKELLQDEASVAPPRVFVKGRYLGGAAEVTAMNENGKLGRVLRWARVERVGEEGRLTCEGCGGARWLPCFECGGSCKVAAVGAAKGERWERCVKCNENGLIRCPVCFVN

SEQ ID NO: 81148 - DNA, 3159 bp, Arabidopsis thaliana
  misc_feature (1)..(3159): Ceres Seq. ID no. 12658567
  misc_feature (1)..(3159): Ortholog of  Ceres SEQ ID NO 13657677 as cited in SEQ ID NO 66119
atgcggagattgattgtgacggggattgcgacatcgacggcgaagggatttcggagagtagttaaccctaaccttttaggaggaggagctgctgctagagctttttctgattaccgagagaaactgagaacagggtttcttcactctatcaggtttgaagatgcgtttgctttgttctttgagatggttcattctcaacccttaccttccattgttgatttcactagattacttactgccactgccaatttgagaagatatgagactgttatctatttctcccagaagatggaactctatggaatctcacacgatctctatagtttcaccattttgattcattgtttctgccgatgctctcgtctctcctttgctctatctgttcttggaaaaatgatgaaacttggttatgagcccagcattgtcacctttggctctctgctccatggattctgtctcgtgaatagaattggtgacgccttctctttagtcattttaatggttaaatcgggatatgagcctaatgttgtagtctacaacactcttattgacggtctctgcaagaacggtgaactgaatattgcgttggagcttctcaacgagatggagaagaaaggtctcggagccgatgttgttacatacaacactctcttaacaggtctttgttattctggtcgatggagcgacgcagctcgaatgctgagagatatgatgaagaggagtataaaccctgatgttgtcactttcactgcgttgatcgatgtatttgtgaaacaaggcaatcttgatgaggctcaagaattgtacaaggagatgatccaaagctctgttgatcctaataatgtcacttataattcaatcattaatgggctgtgcatgcacggtcgtctatatgacgccaagaaaacatttgatttgatggcaagcaagggttgcttccctaatgtggtgacatataacactctcattagtggattctgtaagtttaggatggtagatgaagggatgaaactcttccaaaggatgtcttgtgaaggattcaatgccgacatatttacttacaacactcttatccacggttattgtcaggtgggtaaacttagagttgccctagacatcttctgctggatggtttctcgtcgcgtgactcctgatatcataacccactgcattctgttacatggtctttgtgttaatggggagatcgaaagcgcactggtgaaattcgatgatatgagagaaagcgaaaagtatattggcattgttgcatataacatcatgattcacgggttgtgcaaggcggataaagtggaaaaagcttgggagttattttgtagactccctgtcgaaggagtgaagcctgatgctagaacatacactataatgatactaggtttatgtaagaatgggcctaggcgtgaagcggatgagctgattagaagaatgaaagaggaggggatcatatgtcaaatgaatgcggaagatgaccatctagaagagcatagctcaagtaataaggagataagccttggttcggcgcagagtttgagagagatttgggaaagaagcaaatcgaatccattttggatgcagagattaattccgatagcgttttcgtcatcggtgaaggggtttgttcgtcggcattatcttcttctggagagaggtaacaatcccgagacttctctctctcgatctttttccggtgcgagtcatcatcatcattacagagagagattgagaaatgagcttcactgtataaagtttgacgatgcatttagtttgttctgtgagatgcttcagtctcgtcccattcctagcattgttgatttcactagagttttgactgtcattgctaagatgaacaagtttgacattgtcatctatctctaccacaagatggagaatttgggaatctcacatgatctctatagcttcaccattctgattcattgtttctgccgatgctcacgactctctcttgctcttgctcttcttggaaaaatgatgaaacttgggtttcgtcccagcattgtcactcttggctctctcctcaacggtttctgtcaagggaatagatttcaggaggctgtttctctcgttgattcaatggatggattcggattcgttcctaatgttgtcatctacaacactgtcattaacggtctttgcaagaacagagatttgaataacgcactcgaggttttctactgtatggagaagaaaggaatcagagctgatgctgttacttacaacactctcataagtggtctttctaactctggtagatggaccgacgctgctcgacttctcagagatatggtgaagaggaaaatcgatcctaatgtgatatttttcactgcgctgatcgatacgtttgtgaaagagggtaaccttttagaggctagaaacttgtacaaggagatgatccgaagatctgtagttcctaatgttttcacttacaattcactcatcaatgggttttgcattcatggttgcttaggtgatgccaaatatatgtttgatctgatggtaagcaagggttgcttccctgatgttgtgacctataacactctcataacaggattttgtaagtctaagagggtagaagatgggatgaaactcttttgtgagatgacttatcaaggattggttggcgatgcattcacttacaacacgcttatccacggttattgtcaagcgggcaaacttaatgttgcacaaaaggttttcaataggatggttgattgtggtgtgtctcctgatattgttacctacaacatcttgttagattgtctatgtaataacgggaagatagagaaagcattagtgatggtagaggatctgcaaaagagtgaaatggatgttgatattattacatataatatcatcattcaagggttgtgtagaactgataagttgaaagaggcttggtgtttatttcgtagcctcactcgcaaaggagtgaagcctgatgctatagcatacattacaatgatatcaggcttgtgcaggaaaggcctacagcgtgaagcggacaagctgtgtagaagaatgaaagaagatgggtttatgccaagtgaacgcatatatgatgagacacttagagatcactacacaagcttatcagctgaactcatcaaagcagctcatgagtaa

SEQ ID NO: 81149 - protein, 1052 aa, Arabidopsis thaliana
  peptide (1)..(1052): Ceres Seq. ID no. 12658568
MRRLIVTGIATSTAKGFRRVVNPNLLGGGAAARAFSDYREKLRTGFLHSIRFEDAFALFFEMVHSQPLPSIVDFTRLLTATANLRRYETVIYFSQKMELYGISHDLYSFTILIHCFCRCSRLSFALSVLGKMMKLGYEPSIVTFGSLLHGFCLVNRIGDAFSLVILMVKSGYEPNVVVYNTLIDGLCKNGELNIALELLNEMEKKGLGADVVTYNTLLTGLCYSGRWSDAARMLRDMMKRSINPDVVTFTALIDVFVKQGNLDEAQELYKEMIQSSVDPNNVTYNSIINGLCMHGRLYDAKKTFDLMASKGCFPNVVTYNTLISGFCKFRMVDEGMKLFQRMSCEGFNADIFTYNTLIHGYCQVGKLRVALDIFCWMVSRRVTPDIITHCILLHGLCVNGEIESALVKFDDMRESEKYIGIVAYNIMIHGLCKADKVEKAWELFCRLPVEGVKPDARTYTIMILGLCKNGPRREADELIRRMKEEGIICQMNAEDDHLEEHSSSNKEISLGSAQSLREIWERSKSNPFWMQRLIPIAFSSSVKGFVRRHYLLLERGNNPETSLSRSFSGASHHHHYRERLRNELHCIKFDDAFSLFCEMLQSRPIPSIVDFTRVLTVIAKMNKFDIVIYLYHKMENLGISHDLYSFTILIHCFCRCSRLSLALALLGKMMKLGFRPSIVTLGSLLNGFCQGNRFQEAVSLVDSMDGFGFVPNVVIYNTVINGLCKNRDLNNALEVFYCMEKKGIRADAVTYNTLISGLSNSGRWTDAARLLRDMVKRKIDPNVIFFTALIDTFVKEGNLLEARNLYKEMIRRSVVPNVFTYNSLINGFCIHGCLGDAKYMFDLMVSKGCFPDVVTYNTLITGFCKSKRVEDGMKLFCEMTYQGLVGDAFTYNTLIHGYCQAGKLNVAQKVFNRMVDCGVSPDIVTYNILLDCLCNNGKIEKALVMVEDLQKSEMDVDIITYNIIIQGLCRTDKLKEAWCLFRSLTRKGVKPDAIAYITMISGLCRKGLQREADKLCRRMKEDGFMPSERIYDETLRDHYTSLSAELIKAAHE

SEQ ID NO: 81150 - protein, 991 aa, Arabidopsis thaliana
  peptide (1)..(991): Ceres Seq. ID no. 12658569
MVHSQPLPSIVDFTRLLTATANLRRYETVIYFSQKMELYGISHDLYSFTILIHCFCRCSRLSFALSVLGKMMKLGYEPSIVTFGSLLHGFCLVNRIGDAFSLVILMVKSGYEPNVVVYNTLIDGLCKNGELNIALELLNEMEKKGLGADVVTYNTLLTGLCYSGRWSDAARMLRDMMKRSINPDVVTFTALIDVFVKQGNLDEAQELYKEMIQSSVDPNNVTYNSIINGLCMHGRLYDAKKTFDLMASKGCFPNVVTYNTLISGFCKFRMVDEGMKLFQRMSCEGFNADIFTYNTLIHGYCQVGKLRVALDIFCWMVSRRVTPDIITHCILLHGLCVNGEIESALVKFDDMRESEKYIGIVAYNIMIHGLCKADKVEKAWELFCRLPVEGVKPDARTYTIMILGLCKNGPRREADELIRRMKEEGIICQMNAEDDHLEEHSSSNKEISLGSAQSLREIWERSKSNPFWMQRLIPIAFSSSVKGFVRRHYLLLERGNNPETSLSRSFSGASHHHHYRERLRNELHCIKFDDAFSLFCEMLQSRPIPSIVDFTRVLTVIAKMNKFDIVIYLYHKMENLGISHDLYSFTILIHCFCRCSRLSLALALLGKMMKLGFRPSIVTLGSLLNGFCQGNRFQEAVSLVDSMDGFGFVPNVVIYNTVINGLCKNRDLNNALEVFYCMEKKGIRADAVTYNTLISGLSNSGRWTDAARLLRDMVKRKIDPNVIFFTALIDTFVKEGNLLEARNLYKEMIRRSVVPNVFTYNSLINGFCIHGCLGDAKYMFDLMVSKGCFPDVVTYNTLITGFCKSKRVEDGMKLFCEMTYQGLVGDAFTYNTLIHGYCQAGKLNVAQKVFNRMVDCGVSPDIVTYNILLDCLCNNGKIEKALVMVEDLQKSEMDVDIITYNIIIQGLCRTDKLKEAWCLFRSLTRKGVKPDAIAYITMISGLCRKGLQREADKLCRRMKEDGFMPSERIYDETLRDHYTSLSAELIKAAHE

SEQ ID NO: 81151 - protein, 956 aa, Arabidopsis thaliana
  peptide (1)..(956): Ceres Seq. ID no. 12658570
MELYGISHDLYSFTILIHCFCRCSRLSFALSVLGKMMKLGYEPSIVTFGSLLHGFCLVNRIGDAFSLVILMVKSGYEPNVVVYNTLIDGLCKNGELNIALELLNEMEKKGLGADVVTYNTLLTGLCYSGRWSDAARMLRDMMKRSINPDVVTFTALIDVFVKQGNLDEAQELYKEMIQSSVDPNNVTYNSIINGLCMHGRLYDAKKTFDLMASKGCFPNVVTYNTLISGFCKFRMVDEGMKLFQRMSCEGFNADIFTYNTLIHGYCQVGKLRVALDIFCWMVSRRVTPDIITHCILLHGLCVNGEIESALVKFDDMRESEKYIGIVAYNIMIHGLCKADKVEKAWELFCRLPVEGVKPDARTYTIMILGLCKNGPRREADELIRRMKEEGIICQMNAEDDHLEEHSSSNKEISLGSAQSLREIWERSKSNPFWMQRLIPIAFSSSVKGFVRRHYLLLERGNNPETSLSRSFSGASHHHHYRERLRNELHCIKFDDAFSLFCEMLQSRPIPSIVDFTRVLTVIAKMNKFDIVIYLYHKMENLGISHDLYSFTILIHCFCRCSRLSLALALLGKMMKLGFRPSIVTLGSLLNGFCQGNRFQEAVSLVDSMDGFGFVPNVVIYNTVINGLCKNRDLNNALEVFYCMEKKGIRADAVTYNTLISGLSNSGRWTDAARLLRDMVKRKIDPNVIFFTALIDTFVKEGNLLEARNLYKEMIRRSVVPNVFTYNSLINGFCIHGCLGDAKYMFDLMVSKGCFPDVVTYNTLITGFCKSKRVEDGMKLFCEMTYQGLVGDAFTYNTLIHGYCQAGKLNVAQKVFNRMVDCGVSPDIVTYNILLDCLCNNGKIEKALVMVEDLQKSEMDVDIITYNIIIQGLCRTDKLKEAWCLFRSLTRKGVKPDAIAYITMISGLCRKGLQREADKLCRRMKEDGFMPSERIYDETLRDHYTSLSAELIKAAHE

SEQ ID NO: 81152 - DNA, 709 bp, Arabidopsis thaliana
  misc_feature (1)..(709): Ceres Seq. ID no. 12658575
  misc_feature (1)..(709): Ortholog of  Ceres SEQ ID NO 13596404 as cited in SEQ ID NO 61966
atcggaatccctagaacactcgatttcagcaaaatcaaatcggattcagtgatcaaaagtcaatttggtcgagaagaaattgagcgttgaagatgacggaggcgatgataagaaataagccaggaatggcgagtgtgaaggatatgccgctgcttcaggatggtccgccaccgggtgggttcgcaccggtccgatatgcccgccggatatccaatacgggtcctagtgcaatggccatgttccttgccgtttctggtgcctttgcttggggaatgtaccaggtcggccagggaaacaaaatccgcagggcattgaaggaagagaaatatgctgctcgtagaacaatacttcccattcttcaagcagaagaagatgaaaggtttgtgtctgagtggaaaaagtatctggaatatgaggctgatgtaatgaaagatgttccgggatggaaagttggcgagaatgtgtacaattctggtcgctggatgcctccggctactggggaactccgtcctgatgtgtggtgatttcctagtttctctcaaatgcatatgatgatgatgaatgatgtttcgctgaggattgatatgttcttgttatatctttttttcttcgggtaataagagaatgattcaacagacagtattcttcttgtattggttttctcttaagtgtttcaatcgtaatatgaggcaaaaacagtttcatgatt

SEQ ID NO: 81153 - protein, 143 aa, Arabidopsis thaliana; identical to SEQ ID NO: 21859
  peptide (1)..(143): Ceres Seq. ID no. 12658576

SEQ ID NO: 81154 - protein, 139 aa, Arabidopsis thaliana; identical to SEQ ID NO: 21860
  peptide (1)..(139): Ceres Seq. ID no. 12658577

SEQ ID NO: 81155 - protein, 132 aa, Arabidopsis thaliana; identical to SEQ ID NO: 21861
  peptide (1)..(132): Ceres Seq. ID no. 12658578

SEQ ID NO: 81156 - DNA, 1175 bp, Arabidopsis thaliana
  misc_feature (1)..(1175): Ceres Seq. ID no. 12658599
  misc_feature (1)..(1175): Ortholog of  Ceres SEQ ID NO 12636774 as cited in SEQ ID NO 372
  misc_feature (1)..(1175): Ortholog of  Ceres SEQ ID NO 12562215 as cited in SEQ ID NO 20489
  misc_feature (1)..(1175): Ortholog of  Ceres SEQ ID NO 13595548 as cited in SEQ ID NO 51024
  misc_feature (1)..(1175): Ortholog of  Ceres SEQ ID NO 13582350 as cited in SEQ ID NO 56734
  misc_feature (1)..(1175): Ortholog of  Ceres SEQ ID NO 12476493 as cited in SEQ ID NO 58163
  misc_feature (1)..(1175): Ortholog of  Ceres SEQ ID NO 14313459 as cited in SEQ ID NO 62395
  misc_feature (1)..(1175): Ortholog of  Ceres SEQ ID NO 13597295 as cited in SEQ ID NO 63743
  misc_feature (1)..(1175): Ortholog of  Ceres SEQ ID NO 12617090 as cited in SEQ ID NO 64005
  misc_feature (1)..(1175): Ortholog of  Ceres SEQ ID NO 13597439 as cited in SEQ ID NO 64081
  misc_feature (1)..(1175): Ortholog of  Ceres SEQ ID NO 13597233 as cited in SEQ ID NO 64370
  misc_feature (1)..(1175): Ortholog of  Ceres SEQ ID NO 13623850 as cited in SEQ ID NO 0
aagttaggccaagaaacccatttaaaaaaaaagagagagagatggagagtttcccgatcatcaatctcgagaagcttaatggagaagagagagcaatcactatggagaagatcaaagacgcttgtgaaaactggggcttctttgagtgtgtgaaccatgggatttcactcgagcttttggacaaagtggagaagatgaccaaggaacattacaagaagtgcatggaagagagattcaaggaatcgattaagaacagaggtcttgactctcttcgctctgaagtcaacgacgttgactgggaatccactttctacctcaagcaccttcccgtctctaatatctccgatgtccctgatctcgacgacgattacagaacgttaatgaaagacttcgccggaaagatagagaagttgtcggaggagctactggatctgctgtgcgagaatctcggtttagagaagggttatttaaaaaaggtgttttacgggtcgaaaagaccgacttttggaaccaaagtcagcaattatccaccttgtcctaatccggacctagtcaagggtctccgagcccacaccgacgccggcggcatcatcctcctcttccaagacgacaaagtcagtggacttcagcttcttaaagacggcgagtgggtcgatgttcctccggttaagcattcaatcgtcgttaatctcggcgatcaacttgaggtgataaccaatgggaagtacaagagtgtggaacatagagtgctatctcagacagacggagaaggaagaatgtcgatcgcatcattctataatccgggaagcgactctgttatttttccggcgccggagctgatcggaaaagaagcagagaaggagaagaaagagaactatccgagatttgtgtttgaagattacatgaaactctactctgctgtcaagtttcaggccaaggaaccaaggtttgaagccatgaaagctatggagacaactgtggccaacaatgttggaccattggccactgcgtgaatgatatgtaactggttaataaatatatatatatatatatatatagtctttatataatgtcttagaaacttgattattcactatacgaataattttgttcatgttgttgtatgtttaagtggtgaatgtgttttatatatgggaattaatgttttctgttcg

SEQ ID NO: 81157 - protein, 336 aa, Arabidopsis thaliana
  peptide (1)..(336): Ceres Seq. ID no. 12658600
VRPRNPFKKKEREMESFPIINLEKLNGEERAITMEKIKDACENWGFFECVNHGISLELLDKVEKMTKEHYKKCMEERFKESIKNRGLDSLRSEVNDVDWESTFYLKHLPVSNISDVPDLDDDYRTLMKDFAGKIEKLSEELLDLLCENLGLEKGYLKKVFYGSKRPTFGTKVSNYPPCPNPDLVKGLRAHTDAGGIILLFQDDKVSGLQLLKDGEWVDVPPVKHSIVVNLGDQLEVITNGKYKSVEHRVLSQTDGEGRMSIASFYNPGSDSVIFPAPELIGKEAEKEKKENYPRFVFEDYMKLYSAVKFQAKEPRFEAMKAMETTVANNVGPLATA

SEQ ID NO: 81158 - protein, 323 aa, Arabidopsis thaliana; identical to SEQ ID NO: 25991
  peptide (1)..(323): Ceres Seq. ID no. 12658601

SEQ ID NO: 81159 - protein, 303 aa, Arabidopsis thaliana; identical to SEQ ID NO: 25992
  peptide (1)..(303): Ceres Seq. ID no. 12658602

SEQ ID NO: 81160 - DNA, 1591 bp, Arabidopsis thaliana
  misc_feature (1)..(1591): Ceres Seq. ID no. 12658618
  misc_feature (1)..(1591): Ortholog of  Ceres SEQ ID NO 12590542 as cited in SEQ ID NO 621
  misc_feature (1)..(1591): Ortholog of  Ceres SEQ ID NO 12421854 as cited in SEQ ID NO 20723
  misc_feature (1)..(1591): Ortholog of  Ceres SEQ ID NO 13597847 as cited in SEQ ID NO 64858
gacctttggtttctgtgttgtgtgatatttactacgaaaccacttgtcaccaaaggttcttctttctgttagcgttgggttcgtgattccaagatcaatggttgtgaacttcactagttagagatactgaatcaaagagatgattcttccgagaattgggtaaatcttcgattctgattttctggattaaagaacacgtaacctattttcaattcgcgggtttgattccatagcttcttcagatcatacattctcgcaagtgttcgatacgggagtagaagaagaagagtctttctatgctcctgatcatgatgtcttgactctgcttcaacctaacttcaccagcaacgatgtctagtagtaccaagaacattccaaaacctcctcctcttccttgtattacctaccagcgttttcaatctagtacaaggaaaccttcgagcttaatgcgccttgtgcctaaagaagcacttgaaacttgggataagcttttcaaggaaggatctggagcagatacatatgttgaaaccgataacaagtctcactttcctgcccattcaagtgtcctggctgcagcctcaccagttatagcgacacttctgaatcaatcgagggataagaatgggaatacatacctcaaaatccatggagttccttgtgaagcagtctacatgttcattaggtttctatactcttcctgctacgaggaggaagaaatgaagaagtttgtgctccatttattggttctgtcacattgctactcggtcccatctcttaaaagactttgtgtagagattctcgatcaaggatggattaacaaggagaatgtgatcgatgtgcttcaactagcgagaaactgtgacgtgacaaggatttgctttgtatgtctttccatggtcatcaaagacttcaaatctgtatcttcaacagagggatggaaagtgatgaaacgctctaatcctttgctcgaacaagagctcattgaggcagtcatcgaatccgacagtaggaaacaagaaagaagaagaaaactggaggagagagaagtgtatttgcagctctatgaagccatggaagctcttgtccacatatgtcgtgaaggttgtgggacaattggacctcgcgataaggcccttaaaggaagccataccgtgtgtaaattcccggcgtgtaaagggcttgaaggtgcgctcagacatttcttgggatgcaagtctagggcttcatgttctcattgcaaaaggatgtggcagcttcttcagcttcactcttgtatctgtgatgattctaattcttgcaaagtttctctctgctggaatttcaaggagaaaatgaagaagcttagcaagaaagaacaatctaaatggcgattgcttgtagaaaacattattagggcgaggaacagtctcgggcccttctcgtcacgttcttctggtttgatatagaaacaggttttagattttagtgtatagccagttagacacaaaaagaaaacgtacataggcgcagggtatagtgtatattgcgcaccaatacggcgcacaatagtggttttgaacaaacattgtctatatcaagttggttgttatat

SEQ ID NO: 81161 - protein, 364 aa, Arabidopsis thaliana; identical to SEQ ID NO: 75983
  peptide (1)..(364): Ceres Seq. ID no. 12658619

SEQ ID NO: 81162 - protein, 332 aa, Arabidopsis thaliana; identical to SEQ ID NO: 75984
  peptide (1)..(332): Ceres Seq. ID no. 12658620

SEQ ID NO: 81163 - protein, 257 aa, Arabidopsis thaliana; identical to SEQ ID NO: 75985
  peptide (1)..(257): Ceres Seq. ID no. 12658621

SEQ ID NO: 81164 - DNA, 1363 bp, Arabidopsis thaliana
  misc_feature (1)..(1363): Ceres Seq. ID no. 12658622
  misc_feature (1)..(1363): Ortholog of  Ceres SEQ ID NO 15180663 as cited in SEQ ID NO 1227
  misc_feature (1)..(1363): Ortholog of  Ceres SEQ ID NO 12415963 as cited in SEQ ID NO 0
atttttcttttagaaaccaaacttttcagatttctctctctccatttggcgatagaagaagtcatgtaccaatcatcatcctccacgtcatcatcatcgcagagatcatcgcttcccggcggcggaggactgatccgttacggctcagctccgggatcgtttctaaactctgtggttgacgaagtcatcggaggaggctcatcaaacgctcgtgacttcaccggctatcaaccgtcgtcggataacttcatcggtaactttttcaccggagctgctgactcatcctcgctgagatccgattcgacgacttgtggagtcaacaactcatccgacggacagaaacagctaggcaataacaataataataatagtaataaagatatcttcctcgacagatcctacggtggattcaacgagatctcgcaacaacacaagagcaacgacatcggaggaggaaacagctcaggatcttactctctcgctagacaacgtagctctcccgccgatttcttcacctacctcgcctcagataaaaacaatttctcgttgaaccaaccaaccagtgattatagtccgcaaggagggtctaatgggggacgaggacattccagattgaagtctcagctaagcttcacgaatcacgactctctggctcggatcaacgaggtcaatgagaccccagtccacgacggttcaggccattcgttttctgcggctagctttggtgcagccactactgattcttgggatgacggttccggttcgatagggtttaccgtgactaggcccagtaaacgatccaaggacatggactctggtctcttttcgcagtcttccttcagacacttcaatgaactacatggataacttcatgcagcttccagaagattctgtaccctgcaaaatccgggccaaacgcggctgcgccacccatcctagaagcatcgctgagcgggagaggagaacgagaataagtgggaagctaaagaagctacaagatcttgtccccaacatggataagcaaacaagctattcagacatgctggatttagctgtacaacacatcaaaggccttcagcatcaacttcagaatttgaaaaaagatcaagagaattgcacgtgtgggtgcagtgagaaaccaagctagctcaaacccaaaggtagggtcatcctaattttatttgcattgttccgattttatcatatgagagaattagagaagatgtaaataaaatagattatattaaatgtctaatcctcttataattaagctcctcattcgttatcattataagatagaacagtgacaattgtccattatgtttttgtttcaagtttatgttttgagtgtcgcctattttgt

SEQ ID NO: 81165 - protein, 288 aa, Arabidopsis thaliana
  peptide (1)..(288): Ceres Seq. ID no. 12658623
IFLLETKLFRFLSLHLAIEEVMYQSSSSTSSSSQRSSLPGGGGLIRYGSAPGSFLNSVVDEVIGGGSSNARDFTGYQPSSDNFIGNFFTGAADSSSLRSDSTTCGVNNSSDGQKQLGNNNNNNSNKDIFLDRSYGGFNEISQQHKSNDIGGGNSSGSYSLARQRSSPADFFTYLASDKNNFSLNQPTSDYSPQGGSNGGRGHSRLKSQLSFTNHDSLARINEVNETPVHDGSGHSFSAASFGAATTDSWDDGSGSIGFTVTRPSKRSKDMDSGLFSQSSFRHFNELHG

SEQ ID NO: 81166 - protein, 267 aa, Arabidopsis thaliana
  peptide (1)..(267): Ceres Seq. ID no. 12658624
MYQSSSSTSSSSQRSSLPGGGGLIRYGSAPGSFLNSVVDEVIGGGSSNARDFTGYQPSSDNFIGNFFTGAADSSSLRSDSTTCGVNNSSDGQKQLGNNNNNNSNKDIFLDRSYGGFNEISQQHKSNDIGGGNSSGSYSLARQRSSPADFFTYLASDKNNFSLNQPTSDYSPQGGSNGGRGHSRLKSQLSFTNHDSLARINEVNETPVHDGSGHSFSAASFGAATTDSWDDGSGSIGFTVTRPSKRSKDMDSGLFSQSSFRHFNELHG

SEQ ID NO: 81167 - DNA, 844 bp, Arabidopsis thaliana
  misc_feature (1)..(844): Ceres Seq. ID no. 12658637
  misc_feature (1)..(844): Ortholog of  Ceres SEQ ID NO 12558659 as cited in SEQ ID NO 20727
  misc_feature (1)..(844): Ortholog of  Ceres SEQ ID NO 15175034 as cited in SEQ ID NO 62432
  misc_feature (1)..(844): Ortholog of  Ceres SEQ ID NO 12619999 as cited in SEQ ID NO 66123
  misc_feature (1)..(844): Ortholog of  Ceres SEQ ID NO 13656436 as cited in SEQ ID NO 69154
attccctaatcccaaaattcgatctctcatctgatggctggttacagagccgatgaagagtacgattacctcttcaagctcgtgttgatcggcgactctggtgtcggcaaatcgaatctgctctctcggttcaccaagaacgagttcaatctcgaatccaagtctactattggtgttgagttcgctaccaaaaccactaaagtcgaaggcaaagtcgtcaaagctcagatttgggatactgctggtcaagagagataccgagcaatcacaagcgcttattacagaggagctgttggtgctttgcttatttacgacgtgacaaggcacgcaacatttgagaatgcagcaagatggctaagggaactaagaggacacacagacccaaacatagtggtgatgcttatagggaacaagtgcgatctgcgtcacttggtggcagtcaaaacagaagaggctaaagcctttgctgagagagaatccctctatttcatggagacttcagctctagacgcaaccaatgttgaaaacgcattcacggaagtgctcactcagatccacaagatagtgagcaaaagaagtgttgatggaggaggagagtcggctgatttaccgggaaaaggagagacgataaacgttaaagaagacggatcggttcttaagagaatgggttgctgctctaactagagtggggggattgtagatttggcttgatttggttagggtgagacaacaaatgataatctctttgggtcttgcaatcaaaaaagaaataagaaacgattacttttaagatcatgtgtatgctttggtaactttggcctgtaaggtcctttaaaatttaagt

SEQ ID NO: 81168 - protein, 216 aa, Arabidopsis thaliana; identical to SEQ ID NO: 20728
  peptide (1)..(216): Ceres Seq. ID no. 12658638

SEQ ID NO: 81169 - DNA, 1107 bp, Arabidopsis thaliana
  misc_feature (1)..(1107): Ceres Seq. ID no. 12658639
  misc_feature (1)..(1107): Ortholog of  Ceres SEQ ID NO 13595755 as cited in SEQ ID NO 58146
atcgtaaactataatcggcgtctctccggactcacacctcatcgaaatttggccatctcatctggcttcttcccctccggcgttggataaccatcattacttctcgcgccggcttcgagtggaacaatatggatcctcgtcaattcgaacacaccgttgttgctgataatgatattcacagcattgttatgtcatatcttctgcacaactgcttcaacgaaactgcggactcacttgcttcttccactggagttaagcagcctgcaattgatcgtgataacatggagagaagaaaacaaataatacattttatactggagaggaaggcgttgaaggcttttgaactaactgaacaactagcacaagacttgcttgagaaaaacaaggatttgcaattcgatcttctatgccttcattttgtggagctaatctgtgctgggaactgcaccgaagctctcaaatttggtaagacaagattggctccttttgggaaggtcaaaaaatatgtagaaaagcttgaagacgtaatggcattgctcgcttatgaagaccctgagaaatccccaatgttccatcttttgagctctgaataccgccaacaagttgctgataatctgaaccgcacaattcttgaacacacaaaccacccgagctacacaccaatggaaaggatcatacaacaggtgacagttgtgagacaatacttgactgaggagaatggcaaagatgcgtttcctccattctctctgaaggattctctcaaaggctaagatcgcaggactactccaaagtttgctaggaggaggatatgctaagcattgtcatgtaaatacaaaaagaccttgctcctctctaaagtttgcaaggttagtcttccatggccacaggcggggtttcagtttgctgttacaggagatcaatattgtgaaggacagtttcggcttggtttggtttggtttggttcagttctctaccagaagattgtttcatcaactttgtgtgagtttagtcgataaatctgtaatccatatctttggaatacacatttctctttgtaactatcgtttatgttttgatagaatacttgcaaattcaaggttttatttt

SEQ ID NO: 81170 - protein, 213 aa, Arabidopsis thaliana; identical to SEQ ID NO: 43075
  peptide (1)..(213): Ceres Seq. ID no. 12658640

SEQ ID NO: 81171 - protein, 193 aa, Arabidopsis thaliana; identical to SEQ ID NO: 43076
  peptide (1)..(193): Ceres Seq. ID no. 12658641

SEQ ID NO: 81172 - protein, 162 aa, Arabidopsis thaliana; identical to SEQ ID NO: 43077
  peptide (1)..(162): Ceres Seq. ID no. 12658642

SEQ ID NO: 81173 - DNA, 1202 bp, Arabidopsis thaliana
  misc_feature (1)..(1202): Ceres Seq. ID no. 12658643
  misc_feature (1)..(1202): Ortholog of  Ceres SEQ ID NO 12615296 as cited in SEQ ID NO 62724
  misc_feature (1)..(1202): Ortholog of  Ceres SEQ ID NO 15225093 as cited in SEQ ID NO 65177
  misc_feature (1)..(1202): Ortholog of  Ceres SEQ ID NO 15179532 as cited in SEQ ID NO 0
agagaaagatgcaagccatctccaaagtttcttctgcagcatcattctttagatgttctaggctagttagtcagccatgtgtgaggccttgcgtgagacagcttcacgtcagaaagggtcttgtctctggtgtcatgaagctgttctcttcacctcttaggactttgcgtgatgctggtaaatccgttcgcatttcaagattctgcagtgtctccaatgtctcttcctcattgcaaattgaactggtgccatgtcttacggacaactatgcttatatcttacatgatgaggataccggtacagttggtgtggttgacccttctgaagctgtacctgttatggatgccctccagaagaatagtcgaaatctaacttatatattaaatacacatcaccattatgatcacactggtggcaatttggaattaaaagacaggtatggtgcaaaggtgatcggctcagctgcagatagggaccggattcctggaattgatgtagccttgaaagatgctgacaaatggatgtttgctggccatgaagtccatattatggaaactcctggccacaccagaggccatattagtttctactttccaggggcacgagcaattttcaccggggacaccttgtttagcttatcatgtggtaaactcttcgaaggtactccagagcagatgctagcttctctacagaggataattgcgttgccagatgacacaagcgtatactgtggccatgaatatacactgagtaattccaagtttgcattgtctatagaaccaacaaacgaagtgctccagtcttatgcagcctacgttgcagaactccgtgacaagaaattaccaacgattccaacgacgatgaagatggagaaagcttgtaacccgtttctccgcactgagaacacagatatccgtcgagctttaggtattccagagacagcagatgaagcagaagctctgggtattataagaagagcaaaggacaatttcaaagcttagctaaaatataataagaatggttcctctgtacagtgatgatgcgatcctggtttaatctgtaataaggtgttttgagttttgaccgtgacgttacgtctcctagtagttttcatggtcatactcgaaatgattttttttttccttttgatcaaacggtcctaagtacccaagtttctactttgatgaaccctcgaattttgt

SEQ ID NO: 81174 - protein, 332 aa, Arabidopsis thaliana
  peptide (1)..(332): Ceres Seq. ID no. 12658644
RKMQAISKVSSAASFFRCSRLVSQPCVRPCVRQLHVRKGLVSGVMKLFSSPLRTLRDAGKSVRISRFCSVSNVSSSLQIELVPCLTDNYAYILHDEDTGTVGVVDPSEAVPVMDALQKNSRNLTYILNTHHHYDHTGGNLELKDRYGAKVIGSAADRDRIPGIDVALKDADKWMFAGHEVHIMETPGHTRGHISFYFPGARAIFTGDTLFSLSCGKLFEGTPEQMLASLQRIIALPDDTSVYCGHEYTLSNSKFALSIEPTNEVLQSYAAYVAELRDKKLPTIPTTMKMEKACNPFLRTENTDIRRALGIPETADEAEALGIIRRAKDNFKA

SEQ ID NO: 81175 - protein, 330 aa, Arabidopsis thaliana; identical to SEQ ID NO: 30416
  peptide (1)..(330): Ceres Seq. ID no. 12658645

SEQ ID NO: 81176 - protein, 288 aa, Arabidopsis thaliana; identical to SEQ ID NO: 30417
  peptide (1)..(288): Ceres Seq. ID no. 12658646

SEQ ID NO: 81177 - DNA, 907 bp, Arabidopsis thaliana
  misc_feature (1)..(907): Ceres Seq. ID no. 12658685
  misc_feature (1)..(907): Ortholog of  Ceres SEQ ID NO 14314945 as cited in SEQ ID NO 58031
  misc_feature (1)..(907): Ortholog of  Ceres SEQ ID NO 13595833 as cited in SEQ ID NO 59877
  misc_feature (1)..(907): Ortholog of  Ceres SEQ ID NO 13654452 as cited in SEQ ID NO 65792
  misc_feature (1)..(907): Ortholog of  Ceres SEQ ID NO 13573778 as cited in SEQ ID NO 0
atggagaaatcagatcctccaccagtcccaaagcccggcgccactattatcccctcctccgatccaattcctaatgccgatccgattccatcttcttccttccaccgccgatctcgctccgacgatatgtccatgttcatgttcatggatcccctctcctccgccgcaccaccttcctccgacgaccttccctccgacgacgatctcttctcttctttcatcgatgtcgatagcctcacctctaatcccaatccctttcaaaatccttccctctcctccaactccgtttccggcgctgctaatcctcctcctcctccttcctctcgtcctcgccaccgtcacagcaattccgttgacgctggatgcgccatgtatgccggtgatatcatggacgctaagaaagctatgcctcctgaaaaactctctgagctttggaacatcgatcccaaacgcgccaaaaggattctagcgaatcgacaatctgcagctcgatccaaagagagaaaagctcgatacattcaagaacttgagcgcaaagttcaatctcttcaaaccgaagctaccactctctctgctcagcttactctctaccagagagacacaaatggactagcaaacgaaaacacagagctgaaacttaggttgcaagcaatggaacaacaagctcagcttcgtaatgctttaaacgaagcgttgaggaaagaagttgaaaggatgaagatggagacaggagaaatctctgatgcattctagtttcaatcctatggagatgtccaattctcaaagcgtgtcggactttctacagaacggccgaatgcaagggctggagattagtagcaatagctcaagcttagtcaaatctgaaggaccttctctctctgctagtgagagtagctctgcctattga

SEQ ID NO: 81178 - protein, 250 aa, Arabidopsis thaliana
  peptide (1)..(250): Ceres Seq. ID no. 12658686
MEKSDPPPVPKPGATIIPSSDPIPNADPIPSSSFHRRSRSDDMSMFMFMDPLSSAAPPSSDDLPSDDDLFSSFIDVDSLTSNPNPFQNPSLSSNSVSGAANPPPPPSSRPRHRHSNSVDAGCAMYAGDIMDAKKAMPPEKLSELWNIDPKRAKRILANRQSAARSKERKARYIQELERKVQSLQTEATTLSAQLTLYQRDTNGLANENTELKLRLQAMEQQAQLRNALNEALRKEVERMKMETGEISDAF

SEQ ID NO: 81179 - protein, 208 aa, Arabidopsis thaliana
  peptide (1)..(208): Ceres Seq. ID no. 12658687
MSMFMFMDPLSSAAPPSSDDLPSDDDLFSSFIDVDSLTSNPNPFQNPSLSSNSVSGAANPPPPPSSRPRHRHSNSVDAGCAMYAGDIMDAKKAMPPEKLSELWNIDPKRAKRILANRQSAARSKERKARYIQELERKVQSLQTEATTLSAQLTLYQRDTNGLANENTELKLRLQAMEQQAQLRNALNEALRKEVERMKMETGEISDAF

SEQ ID NO: 81180 - protein, 206 aa, Arabidopsis thaliana
  peptide (1)..(206): Ceres Seq. ID no. 12658688
MFMFMDPLSSAAPPSSDDLPSDDDLFSSFIDVDSLTSNPNPFQNPSLSSNSVSGAANPPPPPSSRPRHRHSNSVDAGCAMYAGDIMDAKKAMPPEKLSELWNIDPKRAKRILANRQSAARSKERKARYIQELERKVQSLQTEATTLSAQLTLYQRDTNGLANENTELKLRLQAMEQQAQLRNALNEALRKEVERMKMETGEISDAF

SEQ ID NO: 81181 - DNA, 2030 bp, Arabidopsis thaliana
  misc_feature (1)..(2030): Ceres Seq. ID no. 12658717
  misc_feature (1)..(2030): Ortholog of  Ceres SEQ ID NO 13597798 as cited in SEQ ID NO 64311
aatttcaatttcactgagaagttacaatccagaggaaaagattatctttttccttctgggttgagggaaaagatgaagaattctgagaagagaggacgtaaacacaaaaggcaagatgcttcatcggcggaaaacgccggcggcgaagttaaagaagcttcggctaatgaagcatcgttacctcaatcccctgagcctgtttcagcttctgaagccaacccatctccgtcgcgacgcagtcgtgggagaggtaaaaagcgtagattgaacaatgaatcagaagctggtaaccagaggacgtcgtcaccagagcgtagtagatctcgtcttcatcactctgatacgaagaatggtgattgtagcaatgggatgattgtttcaacaactactgaatcgattcccgctgctccgagttgggaaactgttgttaaagttgttccttcaatggatgctgttgttaaagtcttttgtgttcacactgagcctaatttctcgttgccatggcaaaggaaacgacagtatagttctggtagtagtggttttattattgggggaagaagagttttgactaatgcacattctgttgagcatcatactcaagttaaactcaagaagcgtggctctgatactaagtatttggctacagtcttggccattggaactgaatgtgacattgctttgttgacagttacggatgatgagttttgggaaggagtatctcctgtggagtttggtgatttaccagctttgcaagatgctgttactgttgttggttatccaattggtggtgatacaatctctgtcacaagcggtgttgtttcccggatggagatattgtcgtatgtgcatggatcaaccgagcttttgggattgcagattgatgcagctattaattctgggaattctggtggtcctgcatttaatgataaaggaaaatgtgttggtattgcatttcagtctttgaaacacgaagatgctgagaatattggttatgtcattcccacaccggtgattgtacatttcattcaagattatgagaagcatgataaatacacagggtttcctgttctcggaattgagtggcaaaagatggaaaatcctgatttgcggaagtcaatgggtatggaatctcatcaaaagggagtgcggattagaagaattgagccaaccgccccagaatcacaagttttgaagccgtctgatattatccttagttttgatggagttaatatcgctaatgatgggactgttccatttaggcatggagaacgaattggctttagctaccttatatcccaaaagtacactggagattctgctctcgtgaaggttctacgaaacaaagaaatattagagttcaacataaaacttgcaatccacaagaggctaatccctgctcacataagtggcaaacctccttcgtacttcatcgttgctggctttgtatttacaactgtctctgttccatatcttcgatctgagtatggaaaagaatatgaatttgacgcacctgtcaagctattggagaaacatcttcatgcaatggctcaatccgtggacgagcagcttgttgtagtttcacaggttcttgtttctgacattaacattggttatgaagagattgtcaacacccaggttgtcgcctttaatggcaaacctgtgaaaaacttgaaaggtttagctgggatggtggagaattgtgaggatgaatatatgaagtttaatctggattatgatcagattgttgttctggacactaagacagcaaaggaagcaacattagatattctgaccacacattgcataccttctgctatgtctgatgatctcaagactgaagaaagaaactgaaacagaaggaaccataaccagaaggagagaaagagagatttttgtccatggaaggacataaaagcaaatacagtcatggaaagacaaagagaagctcaaaccataatttgatttttcttgattctgttttgtatttggaaaaatatgcaagaagaaatacattggttattttttctctc

SEQ ID NO: 81182 - protein, 616 aa, Arabidopsis thaliana
  peptide (1)..(616): Ceres Seq. ID no. 12658718
NFNFTEKLQSRGKDYLFPSGLREKMKNSEKRGRKHKRQDASSAENAGGEVKEASANEASLPQSPEPVSASEANPSPSRRSRGRGKKRRLNNESEAGNQRTSSPERSRSRLHHSDTKNGDCSNGMIVSTTTESIPAAPSWETVVKVVPSMDAVVKVFCVHTEPNFSLPWQRKRQYSSGSSGFIIGGRRVLTNAHSVEHHTQVKLKKRGSDTKYLATVLAIGTECDIALLTVTDDEFWEGVSPVEFGDLPALQDAVTVVGYPIGGDTISVTSGVVSRMEILSYVHGSTELLGLQIDAAINSGNSGGPAFNDKGKCVGIAFQSLKHEDAENIGYVIPTPVIVHFIQDYEKHDKYTGFPVLGIEWQKMENPDLRKSMGMESHQKGVRIRRIEPTAPESQVLKPSDIILSFDGVNIANDGTVPFRHGERIGFSYLISQKYTGDSALVKVLRNKEILEFNIKLAIHKRLIPAHISGKPPSYFIVAGFVFTTVSVPYLRSEYGKEYEFDAPVKLLEKHLHAMAQSVDEQLVVVSQVLVSDINIGYEEIVNTQVVAFNGKPVKNLKGLAGMVENCEDEYMKFNLDYDQIVVLDTKTAKEATLDILTTHCIPSAMSDDLKTEERN

SEQ ID NO: 81183 - protein, 592 aa, Arabidopsis thaliana
  peptide (1)..(592): Ceres Seq. ID no. 12658719
MKNSEKRGRKHKRQDASSAENAGGEVKEASANEASLPQSPEPVSASEANPSPSRRSRGRGKKRRLNNESEAGNQRTSSPERSRSRLHHSDTKNGDCSNGMIVSTTTESIPAAPSWETVVKVVPSMDAVVKVFCVHTEPNFSLPWQRKRQYSSGSSGFIIGGRRVLTNAHSVEHHTQVKLKKRGSDTKYLATVLAIGTECDIALLTVTDDEFWEGVSPVEFGDLPALQDAVTVVGYPIGGDTISVTSGVVSRMEILSYVHGSTELLGLQIDAAINSGNSGGPAFNDKGKCVGIAFQSLKHEDAENIGYVIPTPVIVHFIQDYEKHDKYTGFPVLGIEWQKMENPDLRKSMGMESHQKGVRIRRIEPTAPESQVLKPSDIILSFDGVNIANDGTVPFRHGERIGFSYLISQKYTGDSALVKVLRNKEILEFNIKLAIHKRLIPAHISGKPPSYFIVAGFVFTTVSVPYLRSEYGKEYEFDAPVKLLEKHLHAMAQSVDEQLVVVSQVLVSDINIGYEEIVNTQVVAFNGKPVKNLKGLAGMVENCEDEYMKFNLDYDQIVVLDTKTAKEATLDILTTHCIPSAMSDDLKTEERN

SEQ ID NO: 81184 - protein, 493 aa, Arabidopsis thaliana
  peptide (1)..(493): Ceres Seq. ID no. 12658720
MIVSTTTESIPAAPSWETVVKVVPSMDAVVKVFCVHTEPNFSLPWQRKRQYSSGSSGFIIGGRRVLTNAHSVEHHTQVKLKKRGSDTKYLATVLAIGTECDIALLTVTDDEFWEGVSPVEFGDLPALQDAVTVVGYPIGGDTISVTSGVVSRMEILSYVHGSTELLGLQIDAAINSGNSGGPAFNDKGKCVGIAFQSLKHEDAENIGYVIPTPVIVHFIQDYEKHDKYTGFPVLGIEWQKMENPDLRKSMGMESHQKGVRIRRIEPTAPESQVLKPSDIILSFDGVNIANDGTVPFRHGERIGFSYLISQKYTGDSALVKVLRNKEILEFNIKLAIHKRLIPAHISGKPPSYFIVAGFVFTTVSVPYLRSEYGKEYEFDAPVKLLEKHLHAMAQSVDEQLVVVSQVLVSDINIGYEEIVNTQVVAFNGKPVKNLKGLAGMVENCEDEYMKFNLDYDQIVVLDTKTAKEATLDILTTHCIPSAMSDDLKTEERN

SEQ ID NO: 81185 - DNA, 1087 bp, Arabidopsis thaliana
  misc_feature (1)..(1087): Ceres Seq. ID no. 12658721
  misc_feature (1)..(1087): Ortholog of  Ceres SEQ ID NO 13639645 as cited in SEQ ID NO 57488
agaagaaagaagaagccaagaactaaaaaatggttcatggaaggttatgtaacagagatggctggatcttgacggcgatggtggtgacagagttttctaacgtaggagtaaacactctggtcaaagcagcgacgtccaaaggacttagcccatttgtggttcttgtatactcttacacttttggatctcttcttcttcttcctcttacattcttctccttcagatcaagatctctccctccgttgacattttcaattctatgcaacatggggattcttggtctaattgcaagtgcgtttcaaatcttaggctacaatgggataaaatatagctcgccgactttatcttcggccatgagcaatgtcaatcctgcttttaccttcatcctcgccgttgtttttcgaatggaaaatatatctctagggaaaaagagtagtgtagccaaagtgttgggaacaatattgtcaataataggtgcacttgtggttactctctaccacggtccaatgctaatgtcttcacattcggattggatcatcggtggtggccttcttgctctccaatacatccttgtctccgtctcttaccttgttatggctcacacaatgggtcgatatccatctgccgtcgttgtgacgcttgtgcacaatgtttgcatagctgttgtgtgtgcatttgtgagccttttggcagagaaggacaatccgaaggcatgggtcataagattcgacataaccttaattaccgtagtagcaacggggattttgaattcgggatattatgttatacatacgtgggcagtgagtcacaagggacctgtgtatttgtctatgttcaaaccgttatctatattgatagcagccgtatcaactttcattttcctcggcgagtcgctctaccttggaagtgtgatgggaggaatattgatatcaataggattttacatggtgttgtggggtaaagccaaggaagacaaagttgacataataggagcaatagagtcctctccttcacataatgctcctctcttggataattttaaaagctaatcaatattcactttagtttttcatgagtgatttctgac

SEQ ID NO: 81186 - protein, 339 aa, Arabidopsis thaliana
  peptide (1)..(339): Ceres Seq. ID no. 12658722
MVHGRLCNRDGWILTAMVVTEFSNVGVNTLVKAATSKGLSPFVVLVYSYTFGSLLLLPLTFFSFRSRSLPPLTFSILCNMGILGLIASAFQILGYNGIKYSSPTLSSAMSNVNPAFTFILAVVFRMENISLGKKSSVAKVLGTILSIIGALVVTLYHGPMLMSSHSDWIIGGGLLALQYILVSVSYLVMAHTMGRYPSAVVVTLVHNVCIAVVCAFVSLLAEKDNPKAWVIRFDITLITVVATGILNSGYYVIHTWAVSHKGPVYLSMFKPLSILIAAVSTFIFLGESLYLGSVMGGILISIGFYMVLWGKAKEDKVDIIGAIESSPSHNAPLLDNFKS

SEQ ID NO: 81187 - protein, 323 aa, Arabidopsis thaliana
  peptide (1)..(323): Ceres Seq. ID no. 12658723
MVVTEFSNVGVNTLVKAATSKGLSPFVVLVYSYTFGSLLLLPLTFFSFRSRSLPPLTFSILCNMGILGLIASAFQILGYNGIKYSSPTLSSAMSNVNPAFTFILAVVFRMENISLGKKSSVAKVLGTILSIIGALVVTLYHGPMLMSSHSDWIIGGGLLALQYILVSVSYLVMAHTMGRYPSAVVVTLVHNVCIAVVCAFVSLLAEKDNPKAWVIRFDITLITVVATGILNSGYYVIHTWAVSHKGPVYLSMFKPLSILIAAVSTFIFLGESLYLGSVMGGILISIGFYMVLWGKAKEDKVDIIGAIESSPSHNAPLLDNFKS

SEQ ID NO: 81188 - protein, 260 aa, Arabidopsis thaliana
  peptide (1)..(260): Ceres Seq. ID no. 12658724
MGILGLIASAFQILGYNGIKYSSPTLSSAMSNVNPAFTFILAVVFRMENISLGKKSSVAKVLGTILSIIGALVVTLYHGPMLMSSHSDWIIGGGLLALQYILVSVSYLVMAHTMGRYPSAVVVTLVHNVCIAVVCAFVSLLAEKDNPKAWVIRFDITLITVVATGILNSGYYVIHTWAVSHKGPVYLSMFKPLSILIAAVSTFIFLGESLYLGSVMGGILISIGFYMVLWGKAKEDKVDIIGAIESSPSHNAPLLDNFKS

SEQ ID NO: 81189 - DNA, 1827 bp, Arabidopsis thaliana
  misc_feature (1)..(1827): Ceres Seq. ID no. 12658729
  misc_feature (1)..(1827): Ortholog of  Ceres SEQ ID NO 14308221 as cited in SEQ ID NO 60363
aattttgccttcctttgatcgaatactacaatggcgtctgtatctgcaattggagttctcaaggtacctcctgcttcgacttccaattccaccggaaaagccacggaggcggttcccacgaggactctttctttctcctcctctgttacttcatccgacgacaagatttcactcaaatccaccgtctcccgtctttgtaaatctgttgttcgcaggaatccgatcatcgtctctcccaaagccgtctcagattctcaaaactctcaaacttgtctcgatcctgatgctagcagcagtgttttggggataatcttaggaggtggagctggaactcgtctttatccacttacgaagaagagagcgaaaccagctgtgcctcttggtgctaactataggcttattgatattcctgtgagcaactgtttgaatagcaacatatccaagatctatgttcttactcagttcaattccgcgtctttgaatcgtcatctttcacgagcttatgctagtaacatgggaggttataagaatgaaggattcgttgaagttctcgctgctcaacagagtcctgaaaaccccaactggttccaggggacagctgatgccgtcaggcaatacttgtggttgttcgaggagcataatgtcttggagtatctcattcttgctggggatcatttgtatagaatggactatgagaagtttattcaagcacatagggagactgatgctgatatcacagtagctgcattaccaatggacgagcaacgagccactgcttttgggctgatgaagattgatgaggaaggacgtattattgaatttgctgaaaaaccaaaaggggagcacctaaaggccatgaaggttgacacaacaattctaggtcttgatgatcagagagccaaggagatgcctttcattgctagtatgggtatttatgttgtaagcagagatgtaatgctagacttactacggaatcagtttcctggagctaatgactttggaagtgaagtcattcccggtgccacttcccttggactgagggtgcaagcttacctatatgatggttactgggaagacattggtactatagaggcattttataacgctaatcttggaatcaccaagaaaccagttcctgattttagtttctatgaccgttctgctccgatctacacacagccgcgttatttaccaccgtctaagatgcttgatgctgatgttactgacagtgtcatcggagagggctgtgttatcaagaactgcaaaattcatcactctgtggttggactccgttcctgcatatcagaaggtgctattattgaagattcgttattaatgggagctgattattacgagactgctacggaaaagagcctcttaagcgcgaaaggaagtgtacccataggtattgggaaaaactcgcacatcaaaagggccatcatcgacaaaaacgcacgtatcggtgacaatgtcaagatcataaacagcgacaacgtgcaagaggcagcgagagagactgatggatatttcataaagagcggaattgtaacggttatcaaagacgccttaatcccaaccggcactgtcatctgaagtacacataatgctcctttgtttatttcttcatctttctaatgccctatcaataagttttctttatggctttttaagccccaataaatctactactagttgtaatgctgcttacgaaagagattacgaaatcatgttttcacaataccattgtctcttttgagaaaaaagaagaccctatgaatttcactaaatttatcttttgtagcttattatcaataaaattaagtttct

SEQ ID NO: 81190 - protein, 520 aa, Arabidopsis thaliana; identical to SEQ ID NO: 27025
  peptide (1)..(520): Ceres Seq. ID no. 12658730

SEQ ID NO: 81191 - protein, 359 aa, Arabidopsis thaliana; identical to SEQ ID NO: 27026
  peptide (1)..(359): Ceres Seq. ID no. 12658731

SEQ ID NO: 81192 - protein, 302 aa, Arabidopsis thaliana; identical to SEQ ID NO: 27027
  peptide (1)..(302): Ceres Seq. ID no. 12658732

SEQ ID NO: 81193 - DNA, 1544 bp, Arabidopsis thaliana
  misc_feature (1)..(1544): Ceres Seq. ID no. 12658733
  misc_feature (1)..(1544): Ortholog of  Ceres SEQ ID NO 13597546 as cited in SEQ ID NO 65017
  misc_feature (1)..(1544): Ortholog of  Ceres SEQ ID NO 14307912 as cited in SEQ ID NO 66380
  misc_feature (1)..(1544): Ortholog of  Ceres SEQ ID NO 14308045 as cited in SEQ ID NO 67444
  misc_feature (1)..(1544): Ortholog of  Ceres SEQ ID NO 13654353 as cited in SEQ ID NO 68318
aggttaagattattcaaacttcaaaggcaaaaccaaatgagcttcgtgtggtccgctgcggtgtgggtcatagctgtagccgctgttgtgattagcaaatggttataccgatggtcgaacccgaagtgcaatggcaagttaccaccgggatcaatgggtttaccgatcatcggagagacatgcgacttctttgagccccatggattatacgagatctcaccctttgtcaagaagaggatgttaaagtacgggccattgtttcggacaaatattttcggatcgaacaccgtggttttgacagaacctgatatcatcttcgaagtttttcggcaagagaacaagtcttttgtgtttagctatccagaagcttttgtcaagccatttggaaaagaaaacgtgttcctcaaacatggaaacatccacaagcacgtcaagcaaatcagtcttcaacatcttggctctgaggctttaaaaaaaaagatgataggagaaatagacagagtaacctatgagcatcttagatcgaaggctaaccagggtagcttcgatgctaaggaggcagttgaaagtgttataatggcgcacttgaccccaaagataataagtaacctcaaaccagaaacacaagcaactcttgtggacaatataatggccctaggatctgaatggtttcagtcacccttgaagcttacgactttgatttctatctacaaagtctttattgcacgtagatacgccctccaggtgataaaggacgttttcacgaggaggaaagcgtccagagaaatgtgcggagacttcctcgacacaatggtagaagagggggagaaagaagacgtcatttttaatgaagaaagtgctataaatctcatattcgctattttggtcgtcgctaaagaatctacctcttccgttactagcttggccatcaaatttcttgccgaaaaccataaagctctcgcagagttgaagagggagcatgcggccatccttcaaaatagaaatggtaaaggagctggagttagctgggaagaatacagacaccaaatgactttcactaacatggtgataaatgagactcttcgaatggcaaacatggctcctataatgtatagaaaggctgtgaacgatgtcgaaatcaaaggttacacaattccagcgggctggattgtggcggttataccaccagctgtccatttcaatgatgctatttatgagaatcctttggagttcaatccatggagatgggaggggaaagagttgcggtctggatctaagacgttcatggtgtttggaggtggagtgagacagtgtgtcggcgcggagtttgcgagactacaaatttctatcttcattcatcatcttgtaacaacctacgatttctcattggcccaagaatcggagttcatccgtgcaccactcccatacttccccaaaggactgcctatcaagatttcccagtcactctagtatcttgtgtaatcatatatgtcactagtaaagaatccggggaagtattttcaatggggcaatactaaaataat

SEQ ID NO: 81194 - protein, 489 aa, Arabidopsis thaliana
  peptide (1)..(489): Ceres Seq. ID no. 12658734
RLRLFKLQRQNQMSFVWSAAVWVIAVAAVVISKWLYRWSNPKCNGKLPPGSMGLPIIGETCDFFEPHGLYEISPFVKKRMLKYGPLFRTNIFGSNTVVLTEPDIIFEVFRQENKSFVFSYPEAFVKPFGKENVFLKHGNIHKHVKQISLQHLGSEALKKKMIGEIDRVTYEHLRSKANQGSFDAKEAVESVIMAHLTPKIISNLKPETQATLVDNIMALGSEWFQSPLKLTTLISIYKVFIARRYALQVIKDVFTRRKASREMCGDFLDTMVEEGEKEDVIFNEESAINLIFAILVVAKESTSSVTSLAIKFLAENHKALAELKREHAAILQNRNGKGAGVSWEEYRHQMTFTNMVINETLRMANMAPIMYRKAVNDVEIKGYTIPAGWIVAVIPPAVHFNDAIYENPLEFNPWRWEGKELRSGSKTFMVFGGGVRQCVGAEFARLQISIFIHHLVTTYDFSLAQESEFIRAPLPYFPKGLPIKISQSL

SEQ ID NO: 81195 - protein, 477 aa, Arabidopsis thaliana
  peptide (1)..(477): Ceres Seq. ID no. 12658735
MSFVWSAAVWVIAVAAVVISKWLYRWSNPKCNGKLPPGSMGLPIIGETCDFFEPHGLYEISPFVKKRMLKYGPLFRTNIFGSNTVVLTEPDIIFEVFRQENKSFVFSYPEAFVKPFGKENVFLKHGNIHKHVKQISLQHLGSEALKKKMIGEIDRVTYEHLRSKANQGSFDAKEAVESVIMAHLTPKIISNLKPETQATLVDNIMALGSEWFQSPLKLTTLISIYKVFIARRYALQVIKDVFTRRKASREMCGDFLDTMVEEGEKEDVIFNEESAINLIFAILVVAKESTSSVTSLAIKFLAENHKALAELKREHAAILQNRNGKGAGVSWEEYRHQMTFTNMVINETLRMANMAPIMYRKAVNDVEIKGYTIPAGWIVAVIPPAVHFNDAIYENPLEFNPWRWEGKELRSGSKTFMVFGGGVRQCVGAEFARLQISIFIHHLVTTYDFSLAQESEFIRAPLPYFPKGLPIKISQSL

SEQ ID NO: 81196 - protein, 438 aa, Arabidopsis thaliana
  peptide (1)..(438): Ceres Seq. ID no. 12658736
MGLPIIGETCDFFEPHGLYEISPFVKKRMLKYGPLFRTNIFGSNTVVLTEPDIIFEVFRQENKSFVFSYPEAFVKPFGKENVFLKHGNIHKHVKQISLQHLGSEALKKKMIGEIDRVTYEHLRSKANQGSFDAKEAVESVIMAHLTPKIISNLKPETQATLVDNIMALGSEWFQSPLKLTTLISIYKVFIARRYALQVIKDVFTRRKASREMCGDFLDTMVEEGEKEDVIFNEESAINLIFAILVVAKESTSSVTSLAIKFLAENHKALAELKREHAAILQNRNGKGAGVSWEEYRHQMTFTNMVINETLRMANMAPIMYRKAVNDVEIKGYTIPAGWIVAVIPPAVHFNDAIYENPLEFNPWRWEGKELRSGSKTFMVFGGGVRQCVGAEFARLQISIFIHHLVTTYDFSLAQESEFIRAPLPYFPKGLPIKISQSL

SEQ ID NO: 81197 - DNA, 952 bp, Arabidopsis thaliana
  misc_feature (1)..(952): Ceres Seq. ID no. 12658783
  misc_feature (1)..(952): Ortholog of  Ceres SEQ ID NO 15170792 as cited in SEQ ID NO 52707
acattccgaaaagtacttgtttattggtgttattcatcgctgctcaaggtggcaaaccaaggagaacaagaagagtccagggccaatgagcctgagggtatcaaatcagtgattgatgacatctacatttttgaagacgaccctgtggttgataggttcaataggtttggcacggagatgtctgccatggtctcggccttgacacaggtggtttctgctcgctctcagactgaggctgaaggtgctcactcttcttcctcttcggctggacataaaagaggatggcttggaatcgattctgctcctattccctcatcatttgctcgtgtagactcttcacataatccgatcgaagaatccatgagcaaggcatttccagaggaagcaagggagaaaaaaaggaggtacagaggagtaaggcagagaccatggggcaaatgggcagctgagatacgtgatccacatagagccgctagggtttggctcgggacgtttgatacagcggaggccgcggctagagcctacgacgaggctgcactccggttccgtggaaataaagcaaagctaaatttcccagaggatgtaaggattcttcctcctccccctcctcttcttcgttcaccagctgacacggtggcgaataaagcagaagaggatctgataaattattggagttatacaaagttgttgcaaagttcaggccaacggtcatttctcgagcgaggacaagaagagagtagtaacatatttgaacattcaccaatggaacaacctctgcctccttcaagttctggtccaagttcctctaattttcctgcaccttctctacctaatacatagtttcacttttattaaagctctacaaatacaattaaatacatagctaaatgaaaatgattttcttgtctgtataccttcttaagtgctaaacaatatattgtactctttgttt

SEQ ID NO: 81198 - protein, 279 aa, Arabidopsis thaliana
  peptide (1)..(279): Ceres Seq. ID no. 12658784
TFRKVLVYWCYSSLLKVANQGEQEESRANEPEGIKSVIDDIYIFEDDPVVDRFNRFGTEMSAMVSALTQVVSARSQTEAEGAHSSSSSAGHKRGWLGIDSAPIPSSFARVDSSHNPIEESMSKAFPEEAREKKRRYRGVRQRPWGKWAAEIRDPHRAARVWLGTFDTAEAAARAYDEAALRFRGNKAKLNFPEDVRILPPPPPLLRSPADTVANKAEEDLINYWSYTKLLQSSGQRSFLERGQEESSNIFEHSPMEQPLPPSSSGPSSSNFPAPSLPNT

SEQ ID NO: 81199 - protein, 220 aa, Arabidopsis thaliana
  peptide (1)..(220): Ceres Seq. ID no. 12658785
MSAMVSALTQVVSARSQTEAEGAHSSSSSAGHKRGWLGIDSAPIPSSFARVDSSHNPIEESMSKAFPEEAREKKRRYRGVRQRPWGKWAAEIRDPHRAARVWLGTFDTAEAAARAYDEAALRFRGNKAKLNFPEDVRILPPPPPLLRSPADTVANKAEEDLINYWSYTKLLQSSGQRSFLERGQEESSNIFEHSPMEQPLPPSSSGPSSSNFPAPSLPNT

SEQ ID NO: 81200 - protein, 217 aa, Arabidopsis thaliana
  peptide (1)..(217): Ceres Seq. ID no. 12658786
MVSALTQVVSARSQTEAEGAHSSSSSAGHKRGWLGIDSAPIPSSFARVDSSHNPIEESMSKAFPEEAREKKRRYRGVRQRPWGKWAAEIRDPHRAARVWLGTFDTAEAAARAYDEAALRFRGNKAKLNFPEDVRILPPPPPLLRSPADTVANKAEEDLINYWSYTKLLQSSGQRSFLERGQEESSNIFEHSPMEQPLPPSSSGPSSSNFPAPSLPNT

SEQ ID NO: 81201 - DNA, 1156 bp, Arabidopsis thaliana
  misc_feature (1)..(1156): Ceres Seq. ID no. 12658799
  misc_feature (1)..(1156): Ortholog of  Ceres SEQ ID NO 14314628 as cited in SEQ ID NO 56888
aaaacaaacttgtttgttagacaaaacatgaatttccggggaggttgttgtattgcgaggtacggtggtagtggtggtggaaatgatatgtcgaaggttgatcggattatgctccggtaccgtccgattgcaccgagacctgattctggtggatctcctgcttcaccgacggagaagaatggatcggtgataactaacgtttcgtcgagatcacggagaggtaagagaaaatattcaaaggagaataatagtagcagtaccggatccgttaatagtaacggtaacagcaaacgacagagaaacgatgagacgaagaacggatctggtggtggtagagagatcgtgacgttgcctcttcttccagagactcctgagaagaaagactcgccgttgaaggctaaggcggcgccggagttaggtgcggcggcgttgtggctgagttttaatgacggagctagttataacagacgttatcagacagagttaatgacggaaacggttgtgtcgtcgttgttgacggtggagtgtgtaacggagagattgatggagggagagtatgagttagggtgtacggacgaggagaggaagatgaatcttgagagagacacgtgtcctggttttatatcggacggtttagggagagtcatttggacgaacggttcttacagagagttggtggttgggaaagatcatgagcagtgtagtaagatgagtgtgtggcttgtgatgaaggagaagcctttggtaacgtaccggacttttacgtgtagaatgagattgcagtacacgtgtcgtgataaggaggtgagttcgattacttcgttctgtgatgtttggaggatgagtgacggtggctttgcgtggcggcttgatgttgatgctgcactttgccttggacggtgaggattgggccgttggattagagatgatgttagattgatgagatgaggatatttaataacgacatgcaagttagatagatatttggacttccaactttatgagtgtacatacatatttcgcaattttgtagcttttaagttttaacattttgatttcaatgttctgttttaatttgtagtgtttggtgttttattcttcttcttttttggggtttgtataaaaactcttggttagtcggtatctttcttttttc

SEQ ID NO: 81202 - protein, 300 aa, Arabidopsis thaliana
  peptide (1)..(300): Ceres Seq. ID no. 12658800
KTNLFVRQNMNFRGGCCIARYGGSGGGNDMSKVDRIMLRYRPIAPRPDSGGSPASPTEKNGSVITNVSSRSRRGKRKYSKENNSSSTGSVNSNGNSKRQRNDETKNGSGGGREIVTLPLLPETPEKKDSPLKAKAAPELGAAALWLSFNDGASYNRRYQTELMTETVVSSLLTVECVTERLMEGEYELGCTDEERKMNLERDTCPGFISDGLGRVIWTNGSYRELVVGKDHEQCSKMSVWLVMKEKPLVTYRTFTCRMRLQYTCRDKEVSSITSFCDVWRMSDGGFAWRLDVDAALCLGR

SEQ ID NO: 81203 - protein, 291 aa, Arabidopsis thaliana; identical to SEQ ID NO: 39113
  peptide (1)..(291): Ceres Seq. ID no. 12658801

SEQ ID NO: 81204 - protein, 271 aa, Arabidopsis thaliana; identical to SEQ ID NO: 39114
  peptide (1)..(271): Ceres Seq. ID no. 12658802

SEQ ID NO: 81205 - DNA, 1068 bp, Arabidopsis thaliana
  misc_feature (1)..(1068): Ceres Seq. ID no. 12658810
  misc_feature (1)..(1068): Ortholog of  Ceres SEQ ID NO 15177414 as cited in SEQ ID NO 57242
  misc_feature (1)..(1068): Ortholog of  Ceres SEQ ID NO 13594151 as cited in SEQ ID NO 58886
atggccgacgaaaaagagaactgcgtgagaatgacaagagcagcaacaaaaagaaaagcttccatggaagcggcaatagacaaagaacgaatcaacaagaagagagtcgtactcggagagcttccaaacttgtccaacatcaagaaatctcgaaaagccactacaaaacagaagaagaaatcagtttcgattccgacaatcgaaaccttaaattcagacattgacacaagatctgatgatccacaaatgtgtggtccttatgttacatcaatcttcgagtatcttcgtcaattagaggtaaagtcaagacctttggttgattatatagagaagattcagaaagatgtaacttcgaatatgagaggagttttggttgattggttagtagaagttgctgaagaatacaaacttctctcagacactctttacctcgctgtttcttacattgatagattcttgtctctcaagactgttaataaacaaaggcttcagcttttgggagttacttcaatgcttattgcttcaaagtatgaagagattactcctccaaatgtggatgacttttgttatatcacagacaatacttacacgaaacaagagattgttaagatggaagctgatatacttcttgcgttgcaatttgaattaggaaaccctacaagcaacacgtttctaagacggtttacaagggttgcacaagaagatttcgaaatgtcacatttacagatggagtttctttgtagctatctttcggagttgagcatgttagactatcaatctgtgaagtttcttccgtctactgtggctgcttcagcggtgtttctcgctaggttcatcatccgtccaaaacaacatccctggaatgtgatgttggaagaatacacaagatacaaagcgggtgatttgaaagaatgtgtggctatgatacatgacttgtatctgagtagaaaatgtggagctttagaagctataagagagaaatacaagcagcataagttcaagtgtgtagcgacaatgcctgtatcaccagagctgcctcttacggtttttgaagatgtcaacatttag

SEQ ID NO: 81206 - protein, 355 aa, Arabidopsis thaliana
  peptide (1)..(355): Ceres Seq. ID no. 12658811
MADEKENCVRMTRAATKRKASMEAAIDKERINKKRVVLGELPNLSNIKKSRKATTKQKKKSVSIPTIETLNSDIDTRSDDPQMCGPYVTSIFEYLRQLEVKSRPLVDYIEKIQKDVTSNMRGVLVDWLVEVAEEYKLLSDTLYLAVSYIDRFLSLKTVNKQRLQLLGVTSMLIASKYEEITPPNVDDFCYITDNTYTKQEIVKMEADILLALQFELGNPTSNTFLRRFTRVAQEDFEMSHLQMEFLCSYLSELSMLDYQSVKFLPSTVAASAVFLARFIIRPKQHPWNVMLEEYTRYKAGDLKECVAMIHDLYLSRKCGALEAIREKYKQHKFKCVATMPVSPELPLTVFEDVNI

SEQ ID NO: 81207 - protein, 345 aa, Arabidopsis thaliana
  peptide (1)..(345): Ceres Seq. ID no. 12658812
MTRAATKRKASMEAAIDKERINKKRVVLGELPNLSNIKKSRKATTKQKKKSVSIPTIETLNSDIDTRSDDPQMCGPYVTSIFEYLRQLEVKSRPLVDYIEKIQKDVTSNMRGVLVDWLVEVAEEYKLLSDTLYLAVSYIDRFLSLKTVNKQRLQLLGVTSMLIASKYEEITPPNVDDFCYITDNTYTKQEIVKMEADILLALQFELGNPTSNTFLRRFTRVAQEDFEMSHLQMEFLCSYLSELSMLDYQSVKFLPSTVAASAVFLARFIIRPKQHPWNVMLEEYTRYKAGDLKECVAMIHDLYLSRKCGALEAIREKYKQHKFKCVATMPVSPELPLTVFEDVNI

SEQ ID NO: 81208 - protein, 334 aa, Arabidopsis thaliana
  peptide (1)..(334): Ceres Seq. ID no. 12658813
MEAAIDKERINKKRVVLGELPNLSNIKKSRKATTKQKKKSVSIPTIETLNSDIDTRSDDPQMCGPYVTSIFEYLRQLEVKSRPLVDYIEKIQKDVTSNMRGVLVDWLVEVAEEYKLLSDTLYLAVSYIDRFLSLKTVNKQRLQLLGVTSMLIASKYEEITPPNVDDFCYITDNTYTKQEIVKMEADILLALQFELGNPTSNTFLRRFTRVAQEDFEMSHLQMEFLCSYLSELSMLDYQSVKFLPSTVAASAVFLARFIIRPKQHPWNVMLEEYTRYKAGDLKECVAMIHDLYLSRKCGALEAIREKYKQHKFKCVATMPVSPELPLTVFEDVNI

SEQ ID NO: 81209 - DNA, 2181 bp, Arabidopsis thaliana
  misc_feature (1)..(2181): Ceres Seq. ID no. 12658830
  misc_feature (1)..(2181): Ortholog of  Ceres SEQ ID NO 13590241 as cited in SEQ ID NO 63878
  misc_feature (1)..(2181): Ortholog of  Ceres SEQ ID NO 13660597 as cited in SEQ ID NO 67655
  misc_feature (1)..(2181): Ortholog of  Ceres SEQ ID NO 15179308 as cited in SEQ ID NO 0
atggagcagaagagcgtgttgttttccgcgttaggggttggtgttgggttagggattggtctagcgtcgggtcagagtttgggtaaatgggcaaacgggtctatttctgcggaggatggactaaccggagaaaagattgagcaagagttggttaggcagatcgttgatggcagagagagtagtgtcactttcgacgagtttccttattacctaagtgagaaaactcggcttttattgacaagtgcagcttatgttcacctaaagcaatctgatatctcgaagcacacgcgtaatcttgcacctggaagtaaggccattcttctgtctggacctgctgatacagagcaagtatggatgcgtcaagaaagaacctggaccttgcgtaggcacacaagtggcaacgatcttcattcaaggggctttgacgttacaagtcagcctccacgactcaagcggaatgcttctgctgcttctgatatgagtagcatatcatcccgttctgcaacttctgtttcagcttcaagcaaacgcagtgctaacttgtgctttgatgagagacttttccttcagtcactttacaaggtcttggtttcgatttcagaaaccaatcctataataatatacctgagggatgttgagaagctttgtcagtcagaaaggttctacaagttgttccagaggctcttgacgaagctttctggccctgttttggttctcggctcaagactattggaacccgaagatgactgtcaagaagtaggagagggcatttctgctttgtttccttacaacatcgagatcagaccgccagaggatgaaaatcaactcatgagctggaaaacgagatttgaagatgacatgaaagtgatacagtttcaagacaacaagaaccacatagccgaggttctagcggctaatgatcttgagtgtgatgacttaggttccatatgccatgcagatacaatgttcctaagcagtcacattgaggaaattgttgtttctgcaatctcctaccatctgatgaacaacaaagaacccgaatacaaaaacgggaggcttgtaatatcttctaatagcttgtcccatggactgaatatattacaggaaggtcaaggatgctttgaggactccttgaagctggacacaaacatcgactccaaggaggtggctcctgataatgaattcgagaagcgcataagaccagaggttatcccagcaaatgagattggtgtgacttttgctgatataggttcactggatgaaaccaaagaatcacttcaagagcttgtcatgcttcctcttcgtaggcctgacctgttcaaaggtggtcttctaaagccctgcagaggaatcctcctctttggaccacctggtactggaaaaactatgatggcaaaagccattgcgaacgaagctggggctagtttcataaatgtgtcgatgtccacaatcacttcaaaatggtttggagaagatgagaagaacgtgagagctttgttcaccctcgcggccaaagtgtctccaactattatatttgtggatgaagtggatagtatgctgggacagaggacaagagttggcgagcatgaagctatgaggaagatcaaaaatgagttcatgacacactgggatgggcttatgtcaaatgcgggtgaccgtattctcgttcttgcagcaacaaacagaccatttgatctcgatgaagctatcatcaggaggtttgagcgaagaatcatggtgggtcttccatcggtcgagagcagagagaagatcttgagaaccttattgtcaaaagagaaaacagagaatcttgatttccaagagcttgcgcagatgacagatggctatagtggaagtgatctcaagaacttttgcacaacagcagcatatcgaccagtgagggagctgataaagcaagagtgcttgaaagaccaggagaggaggaagagagaggaagcagagaagaatagtgaagaaggatctgaagcaaaagaagaagtatctgaagagagaggcataacgttgagacctttgagcatggaagacatgaaagtagctaaaagccaggttgctgctagttttgcagcagaaggagcaggaatgaacgaactcaagcagtggaatgatttgtatggagaaggaggctccaggaaaaaggaacagctctcttacttcctttaa

SEQ ID NO: 81210 - protein, 726 aa, Arabidopsis thaliana
  peptide (1)..(726): Ceres Seq. ID no. 12658831
MEQKSVLFSALGVGVGLGIGLASGQSLGKWANGSISAEDGLTGEKIEQELVRQIVDGRESSVTFDEFPYYLSEKTRLLLTSAAYVHLKQSDISKHTRNLAPGSKAILLSGPADTEQVWMRQERTWTLRRHTSGNDLHSRGFDVTSQPPRLKRNASAASDMSSISSRSATSVSASSKRSANLCFDERLFLQSLYKVLVSISETNPIIIYLRDVEKLCQSERFYKLFQRLLTKLSGPVLVLGSRLLEPEDDCQEVGEGISALFPYNIEIRPPEDENQLMSWKTRFEDDMKVIQFQDNKNHIAEVLAANDLECDDLGSICHADTMFLSSHIEEIVVSAISYHLMNNKEPEYKNGRLVISSNSLSHGLNILQEGQGCFEDSLKLDTNIDSKEVAPDNEFEKRIRPEVIPANEIGVTFADIGSLDETKESLQELVMLPLRRPDLFKGGLLKPCRGILLFGPPGTGKTMMAKAIANEAGASFINVSMSTITSKWFGEDEKNVRALFTLAAKVSPTIIFVDEVDSMLGQRTRVGEHEAMRKIKNEFMTHWDGLMSNAGDRILVLAATNRPFDLDEAIIRRFERRIMVGLPSVESREKILRTLLSKEKTENLDFQELAQMTDGYSGSDLKNFCTTAAYRPVRELIKQECLKDQERRKREEAEKNSEEGSEAKEEVSEERGITLRPLSMEDMKVAKSQVAASFAAEGAGMNELKQWNDLYGEGGSRKKEQLSYFL

SEQ ID NO: 81211 - protein, 608 aa, Arabidopsis thaliana
  peptide (1)..(608): Ceres Seq. ID no. 12658832
MRQERTWTLRRHTSGNDLHSRGFDVTSQPPRLKRNASAASDMSSISSRSATSVSASSKRSANLCFDERLFLQSLYKVLVSISETNPIIIYLRDVEKLCQSERFYKLFQRLLTKLSGPVLVLGSRLLEPEDDCQEVGEGISALFPYNIEIRPPEDENQLMSWKTRFEDDMKVIQFQDNKNHIAEVLAANDLECDDLGSICHADTMFLSSHIEEIVVSAISYHLMNNKEPEYKNGRLVISSNSLSHGLNILQEGQGCFEDSLKLDTNIDSKEVAPDNEFEKRIRPEVIPANEIGVTFADIGSLDETKESLQELVMLPLRRPDLFKGGLLKPCRGILLFGPPGTGKTMMAKAIANEAGASFINVSMSTITSKWFGEDEKNVRALFTLAAKVSPTIIFVDEVDSMLGQRTRVGEHEAMRKIKNEFMTHWDGLMSNAGDRILVLAATNRPFDLDEAIIRRFERRIMVGLPSVESREKILRTLLSKEKTENLDFQELAQMTDGYSGSDLKNFCTTAAYRPVRELIKQECLKDQERRKREEAEKNSEEGSEAKEEVSEERGITLRPLSMEDMKVAKSQVAASFAAEGAGMNELKQWNDLYGEGGSRKKEQLSYFL

SEQ ID NO: 81212 - protein, 567 aa, Arabidopsis thaliana
  peptide (1)..(567): Ceres Seq. ID no. 12658833
MSSISSRSATSVSASSKRSANLCFDERLFLQSLYKVLVSISETNPIIIYLRDVEKLCQSERFYKLFQRLLTKLSGPVLVLGSRLLEPEDDCQEVGEGISALFPYNIEIRPPEDENQLMSWKTRFEDDMKVIQFQDNKNHIAEVLAANDLECDDLGSICHADTMFLSSHIEEIVVSAISYHLMNNKEPEYKNGRLVISSNSLSHGLNILQEGQGCFEDSLKLDTNIDSKEVAPDNEFEKRIRPEVIPANEIGVTFADIGSLDETKESLQELVMLPLRRPDLFKGGLLKPCRGILLFGPPGTGKTMMAKAIANEAGASFINVSMSTITSKWFGEDEKNVRALFTLAAKVSPTIIFVDEVDSMLGQRTRVGEHEAMRKIKNEFMTHWDGLMSNAGDRILVLAATNRPFDLDEAIIRRFERRIMVGLPSVESREKILRTLLSKEKTENLDFQELAQMTDGYSGSDLKNFCTTAAYRPVRELIKQECLKDQERRKREEAEKNSEEGSEAKEEVSEERGITLRPLSMEDMKVAKSQVAASFAAEGAGMNELKQWNDLYGEGGSRKKEQLSYFL

SEQ ID NO: 81213 - DNA, 1226 bp, Arabidopsis thaliana
  misc_feature (1)..(1226): Ceres Seq. ID no. 12658841
  misc_feature (1)..(1226): Ortholog of  Ceres SEQ ID NO 13595351 as cited in SEQ ID NO 55934
  misc_feature (1)..(1226): Ortholog of  Ceres SEQ ID NO 13639645 as cited in SEQ ID NO 57488
cattttttagtgattgtagatcttaagagagagagagagagatggagatatcgaaatacaaggcggtgctagcgttagtgatgttgcagtttacgtccgccggagttgcactcttcacgaaagctgctttcatggaaggtctcaatcccaccgtcttcgttgtttaccgtcaagccatcgccactctcttcatctgccccatctctttcatttccgcttggaggaaagaaaacaaaccttctctgggagtaagaggcttttggtgggtggctttgacggctgttattggtgtgactgttaatcagaacgcttatttcaaagggattgacttgtcttcttcatccatggcttgtgccatgactaatcttattcctgccgtcaccttcattatctccatcattgttgggttcgagagtataaagaggagaagtatgaaaagtgttgcaaaagtaataggaactggtgtctgtgtgggaggagccatggcaatgacttttctcagaggtccaaaattgctcaatgccttgctcaaccaagacaacacagcttggttactcggctgcttcttccttcttattagcacatttgcttggtctctttggttgatccttcaggttcctattgcctctcactgtcctgaccacttgtacacttctgcctgcacatgtttcatcgctaccatagcttctttcctcgtggctctcgccttaggcaacactcatttaccgccctggaagcttgattccttcttgaagctctcttgctgcatatactctggattccagttggcgatatctttctttctacaagcttggatcgtatcacagaaaggacctgttttctctgccctcttcaaccctctttctgcagtcatcgtcactttcttcggcgctctgtatctaaaagaacagacttacctcgggagcttgttaggcgctttggctatcatccttggtctctacattgttctctggggcaaatctgaagactatcaagaagaatcaacagacctgaaattggaaaatgaacacaacacttcctctcaatctgacattgtttccattatgattggtgataaggcctttcgtagttcggagctattagaacctcttctcatgtgagttttattgaagtcagttctacatggtgtaagtggaaatttttgacaatggacacttaaagaatatgaaaatgataataacgcaaagtgaaatggaacttctttt

SEQ ID NO: 81214 - protein, 359 aa, Arabidopsis thaliana
  peptide (1)..(359): Ceres Seq. ID no. 12658842
MEISKYKAVLALVMLQFTSAGVALFTKAAFMEGLNPTVFVVYRQAIATLFICPISFISAWRKENKPSLGVRGFWWVALTAVIGVTVNQNAYFKGIDLSSSSMACAMTNLIPAVTFIISIIVGFESIKRRSMKSVAKVIGTGVCVGGAMAMTFLRGPKLLNALLNQDNTAWLLGCFFLLISTFAWSLWLILQVPIASHCPDHLYTSACTCFIATIASFLVALALGNTHLPPWKLDSFLKLSCCIYSGFQLAISFFLQAWIVSQKGPVFSALFNPLSAVIVTFFGALYLKEQTYLGSLLGALAIILGLYIVLWGKSEDYQEESTDLKLENEHNTSSQSDIVSIMIGDKAFRSSELLEPLLM

SEQ ID NO: 81215 - protein, 346 aa, Arabidopsis thaliana
  peptide (1)..(346): Ceres Seq. ID no. 12658843
MLQFTSAGVALFTKAAFMEGLNPTVFVVYRQAIATLFICPISFISAWRKENKPSLGVRGFWWVALTAVIGVTVNQNAYFKGIDLSSSSMACAMTNLIPAVTFIISIIVGFESIKRRSMKSVAKVIGTGVCVGGAMAMTFLRGPKLLNALLNQDNTAWLLGCFFLLISTFAWSLWLILQVPIASHCPDHLYTSACTCFIATIASFLVALALGNTHLPPWKLDSFLKLSCCIYSGFQLAISFFLQAWIVSQKGPVFSALFNPLSAVIVTFFGALYLKEQTYLGSLLGALAIILGLYIVLWGKSEDYQEESTDLKLENEHNTSSQSDIVSIMIGDKAFRSSELLEPLLM

SEQ ID NO: 81216 - protein, 329 aa, Arabidopsis thaliana
  peptide (1)..(329): Ceres Seq. ID no. 12658844
MEGLNPTVFVVYRQAIATLFICPISFISAWRKENKPSLGVRGFWWVALTAVIGVTVNQNAYFKGIDLSSSSMACAMTNLIPAVTFIISIIVGFESIKRRSMKSVAKVIGTGVCVGGAMAMTFLRGPKLLNALLNQDNTAWLLGCFFLLISTFAWSLWLILQVPIASHCPDHLYTSACTCFIATIASFLVALALGNTHLPPWKLDSFLKLSCCIYSGFQLAISFFLQAWIVSQKGPVFSALFNPLSAVIVTFFGALYLKEQTYLGSLLGALAIILGLYIVLWGKSEDYQEESTDLKLENEHNTSSQSDIVSIMIGDKAFRSSELLEPLLM

SEQ ID NO: 81217 - DNA, 983 bp, Arabidopsis thaliana
  misc_feature (1)..(983): Ceres Seq. ID no. 12658849
  misc_feature (1)..(983): Ortholog of  Ceres SEQ ID NO 12611159 as cited in SEQ ID NO 59821
atgggaagatcaccttgttgtgataaaaatggagtgaagaagggaccatggactgctgaggaggatcagaaactcatcgattatattcgatttcatggtcctggcaattggcgtacgctccccaaaaatgctggactccatagatgtggaaaaagctgccgtcttcgatggaccaattatctaagaccggacatcaagagaggaagattctcgttcgaggaagaagaaactatcattcagctacacagtgttatgggaaacaagtggtcagcaatagccgctcgtctaccagggaggaccgataacgaaataaaaaaccattggaacactcacatccgcaagagacttgtaaggagtggtatcgaccctgttactcattctccacgccttgatcttcttgatttgtcctcacttttgagtgcacttttcaaccagccaaacttttcagcagttgcaacacatgcgtcttctcttcttaatcctgatgtattgaggttggcctctctactactgccacttcaaaaccctaatccagtttacccatcgaacctcgaccaaaatcttcaaactccaaatacatcatcagaatcgtctcaaccacaagctgagactagtacagtcccaacaaactatgaaacttcatcattggagcctatgaacgcaagactcgacgacgttggtcttgcagatgtattaccacctttgtcagagagttttgacttagactcgctcatgtcaacgccaatgtcttctccacgacaaaatagcattgaagcagaaaccaactccagcactttcttcgactttggaattccggaagatttcatcttagatgactttatgttttaattttcaacatttgcatacacatgtcttgctttcacacatatgattctttgttgcattctttcttttgtttgatgtataaatttcttgtttttattctctcaaaagatattaagttattagtctataaaattttc

SEQ ID NO: 81218 - protein, 282 aa, Arabidopsis thaliana
  peptide (1)..(282): Ceres Seq. ID no. 12658850
MGRSPCCDKNGVKKGPWTAEEDQKLIDYIRFHGPGNWRTLPKNAGLHRCGKSCRLRWTNYLRPDIKRGRFSFEEEETIIQLHSVMGNKWSAIAARLPGRTDNEIKNHWNTHIRKRLVRSGIDPVTHSPRLDLLDLSSLLSALFNQPNFSAVATHASSLLNPDVLRLASLLLPLQNPNPVYPSNLDQNLQTPNTSSESSQPQAETSTVPTNYETSSLEPMNARLDDVGLADVLPPLSESFDLDSLMSTPMSSPRQNSIEAETNSSTFFDFGIPEDFILDDFMF

SEQ ID NO: 81219 - protein, 198 aa, Arabidopsis thaliana
  peptide (1)..(198): Ceres Seq. ID no. 12658851
MGNKWSAIAARLPGRTDNEIKNHWNTHIRKRLVRSGIDPVTHSPRLDLLDLSSLLSALFNQPNFSAVATHASSLLNPDVLRLASLLLPLQNPNPVYPSNLDQNLQTPNTSSESSQPQAETSTVPTNYETSSLEPMNARLDDVGLADVLPPLSESFDLDSLMSTPMSSPRQNSIEAETNSSTFFDFGIPEDFILDDFMF

SEQ ID NO: 81220 - DNA, 2181 bp, Arabidopsis thaliana
  misc_feature (1)..(2181): Ceres Seq. ID no. 12658856
  misc_feature (1)..(2181): Ortholog of  Ceres SEQ ID NO 13586970 as cited in SEQ ID NO 0
ccccgccgagaatcgagaagcagcagccatggccgacgtagttcaataccgcctcgagcggatggttgacgagcttgatgatctagaacgaagagaaatcttcactcgtgctgagatagctgagatcgtgaagcagcggcgtaagtttgagtaccggctcaagcgtccaagcccactcaaagaagatttcatagcctatattgactatgaggttaagctcgatgagctccgtcagctacggaggaaatcggtggcgcgtgtgactaagaagagaaagaagaaatcagtatctgatttcgccggtgtggctaggattgttgagatttatagattggcgacgatgaggtataaaggtgatatcaatttgtggtttaggtatctcgagttttgtaaacagaagaggcatggaagaatgaaaaaggcattggctcaagcaataaggtttcatccaaaagtggctggagtgtggatatatgctgcatcttgggaatttgatagaaacttgaatgttacagcagctcgtgctcttatgctgaatgggctgagagtgtgttcaaactctgaagacctgtgggttgagtatctgcgaatggaacttacttttctaaataagctgaaagctcgtaaagttgcccttggtgaagataaaggaagtttggtgcgtgacacgaaaaccgttgaggatgagcaatggaaagatgagaacaaagagttatttatgtcgctagatgagaaagaaggaaatgaaaaagaagagaatgacgaggactctattgtcgaagatgttgaggatgtgactgagaaagttgatttcttaaaagagaaagggtccaatgttcttcagaccatctatagtggagccgttgaggctattccatctagttttgacttgaggaagcgttttttggagattctagaggcaacagacttagcgcattcagatgaaatgcgcaataccattctaagtgacctgaagcgtgatttttgcaatgaacctgaatactggaattggcttgcaagacatgaaatgagtggttgtattagcaatgaggcaggcctagagtttgcaaatcctcaaatgcaaaaggctattcaggtttttgaagaaggcttgcaaactgttacgtcaagttctatgtttgagatttatataaattttctgatggaggctattgtacagtcaaacggcgacgagaatgaaatctcctctttgtctaatccgatcatttcacatatcataaacgtgtaccaaaaggctgatgaaactggctgtttgactgaagagcttgctgatgaatatgtttctctgtacttgaaactggaaaagactcatgaagctcagaagctagcagaaaagctctgctctgaaaaatttgctggatcagctaagttgtggctttcaagagtttccattgaaataagatcactttcagagaactcatctcctagtaaagcagattttcagacagtctttgagctcctttcaaatgctttgaggaaagtaccgatctcagaatctgagagcttgtggctaatggcttttaatttctttgctcatcagcgaacttatttggacaaacttgtagagatgtccatcctatcagcaaccaaaagccatgggagcgaccatgtgttttctcttgcttccacagtggtgaaatttgttcttgaaacaaaaggggcccacagtgcgaggaagatatacaagaggttcttggctcttcctggtcccagtcttgttctatacaaaggttgcattgaaatagagaccaacctcatatcagtaggtgataaagatggtctcagtaatgcccggaagctgtatgattctgctgttgcaagttacggtcaagacgtggagctgtggaagaattactactcattggagacaaagctgggaacatcagagacagccaatggagtgtattggcgtgcgagaaagactctgaatgaatccgcggatttcatagtttgatctctgatttataggtagtctagtatgtatgatgaaggaaacactatgtttgcctcgtatttgtggatgcaggtttcagttatgtgatccttaagatatgaattttggttgtaacagaacaggagtcgatgtactactttatgagtctagttatactctaaaacacttttttgatacaaaaacatgttgaagttcatacatgcctc

SEQ ID NO: 81221 - protein, 657 aa, Arabidopsis thaliana
  peptide (1)..(657): Ceres Seq. ID no. 12658857
PAENREAAAMADVVQYRLERMVDELDDLERREIFTRAEIAEIVKQRRKFEYRLKRPSPLKEDFIAYIDYEVKLDELRQLRRKSVARVTKKRKKKSVSDFAGVARIVEIYRLATMRYKGDINLWFRYLEFCKQKRHGRMKKALAQAIRFHPKVAGVWIYAASWEFDRNLNVTAARALMLNGLRVCSNSEDLWVEYLRMELTFLNKLKARKVALGEDKGSLVRDTKTVEDEQWKDENKELFMSLDEKEGNEKEENDEDSIVEDVEDVTEKVDFLKEKGSNVLQTIYSGAVEAIPSSFDLRKRFLEILEATDLAHSDEMRNTILSDLKRDFCNEPEYWNWLARHEMSGCISNEAGLEFANPQMQKAIQVFEEGLQTVTSSSMFEIYINFLMEAIVQSNGDENEISSLSNPIISHIINVYQKADETGCLTEELADEYVSLYLKLEKTHEAQKLAEKLCSEKFAGSAKLWLSRVSIEIRSLSENSSPSKADFQTVFELLSNALRKVPISESESLWLMAFNFFAHQRTYLDKLVEMSILSATKSHGSDHVFSLASTVVKFVLETKGAHSARKIYKRFLALPGPSLVLYKGCIEIETNLISVGDKDGLSNARKLYDSAVASYGQDVELWKNYYSLETKLGTSETANGVYWRARKTLNESADFIV

SEQ ID NO: 81222 - protein, 648 aa, Arabidopsis thaliana
  peptide (1)..(648): Ceres Seq. ID no. 12658858
MADVVQYRLERMVDELDDLERREIFTRAEIAEIVKQRRKFEYRLKRPSPLKEDFIAYIDYEVKLDELRQLRRKSVARVTKKRKKKSVSDFAGVARIVEIYRLATMRYKGDINLWFRYLEFCKQKRHGRMKKALAQAIRFHPKVAGVWIYAASWEFDRNLNVTAARALMLNGLRVCSNSEDLWVEYLRMELTFLNKLKARKVALGEDKGSLVRDTKTVEDEQWKDENKELFMSLDEKEGNEKEENDEDSIVEDVEDVTEKVDFLKEKGSNVLQTIYSGAVEAIPSSFDLRKRFLEILEATDLAHSDEMRNTILSDLKRDFCNEPEYWNWLARHEMSGCISNEAGLEFANPQMQKAIQVFEEGLQTVTSSSMFEIYINFLMEAIVQSNGDENEISSLSNPIISHIINVYQKADETGCLTEELADEYVSLYLKLEKTHEAQKLAEKLCSEKFAGSAKLWLSRVSIEIRSLSENSSPSKADFQTVFELLSNALRKVPISESESLWLMAFNFFAHQRTYLDKLVEMSILSATKSHGSDHVFSLASTVVKFVLETKGAHSARKIYKRFLALPGPSLVLYKGCIEIETNLISVGDKDGLSNARKLYDSAVASYGQDVELWKNYYSLETKLGTSETANGVYWRARKTLNESADFIV

SEQ ID NO: 81223 - protein, 637 aa, Arabidopsis thaliana
  peptide (1)..(637): Ceres Seq. ID no. 12658859
MVDELDDLERREIFTRAEIAEIVKQRRKFEYRLKRPSPLKEDFIAYIDYEVKLDELRQLRRKSVARVTKKRKKKSVSDFAGVARIVEIYRLATMRYKGDINLWFRYLEFCKQKRHGRMKKALAQAIRFHPKVAGVWIYAASWEFDRNLNVTAARALMLNGLRVCSNSEDLWVEYLRMELTFLNKLKARKVALGEDKGSLVRDTKTVEDEQWKDENKELFMSLDEKEGNEKEENDEDSIVEDVEDVTEKVDFLKEKGSNVLQTIYSGAVEAIPSSFDLRKRFLEILEATDLAHSDEMRNTILSDLKRDFCNEPEYWNWLARHEMSGCISNEAGLEFANPQMQKAIQVFEEGLQTVTSSSMFEIYINFLMEAIVQSNGDENEISSLSNPIISHIINVYQKADETGCLTEELADEYVSLYLKLEKTHEAQKLAEKLCSEKFAGSAKLWLSRVSIEIRSLSENSSPSKADFQTVFELLSNALRKVPISESESLWLMAFNFFAHQRTYLDKLVEMSILSATKSHGSDHVFSLASTVVKFVLETKGAHSARKIYKRFLALPGPSLVLYKGCIEIETNLISVGDKDGLSNARKLYDSAVASYGQDVELWKNYYSLETKLGTSETANGVYWRARKTLNESADFIV

SEQ ID NO: 81224 - DNA, 582 bp, Arabidopsis thaliana
  misc_feature (1)..(582): Ceres Seq. ID no. 12658860
  misc_feature (1)..(582): Ortholog of  Ceres SEQ ID NO 14311912 as cited in SEQ ID NO 51609
  misc_feature (1)..(582): Ortholog of  Ceres SEQ ID NO 14312933 as cited in SEQ ID NO 58936
atggagattgagaaggatgaggacgacacaacattggttgattctggaggagacttcgactgcaacatatgtttggatcaggttcgagacccggtcgtgactttatgtggccacctgttttgttggccctgcattcacaagtggacttatgcgtccaacaattcaagacaacgagtcgatcaatacgatcataagagggaaccaccaaaatgtccggtatgcaaatctgatgtctccgaggctacgcttgtcccgatctacggacgaggacagaaagctccccagtccggttcaaatgtaccgagcagaccaactggtccggtttatgacttaagaggagttggtcaacgtttaggagaaggggagagtcaacgttacatgtatagaatgcctgatccggtgatgggtgtggtatgcgaaatggtataccggagactatttggagagtcttcgagcaacatggcaccttaccgcgatatgaatgtccggtctaggcgacgggcaatgcaggctgaggagtcattaagcagagtctacttgtttctactttgcttcatgtttatgtgtctatttctcttctaa

SEQ ID NO: 81225 - protein, 193 aa, Arabidopsis thaliana
  peptide (1)..(193): Ceres Seq. ID no. 12658861
MEIEKDEDDTTLVDSGGDFDCNICLDQVRDPVVTLCGHLFCWPCIHKWTYASNNSRQRVDQYDHKREPPKCPVCKSDVSEATLVPIYGRGQKAPQSGSNVPSRPTGPVYDLRGVGQRLGEGESQRYMYRMPDPVMGVVCEMVYRRLFGESSSNMAPYRDMNVRSRRRAMQAEESLSRVYLFLLCFMFMCLFLF

SEQ ID NO: 81226 - DNA, 1296 bp, Arabidopsis thaliana
  misc_feature (1)..(1296): Ceres Seq. ID no. 12658864
  misc_feature (1)..(1296): Ortholog of  Ceres SEQ ID NO 14314108 as cited in SEQ ID NO 63184
atggttcccacaaggaacaggccaatgctacgaattctaggtttttttatatgtgcagctttcatctatctatcatttcgagatttgtggttgaatcacaaagggaaagcaaagttagggtttgtgaaaaggaacggaactcagtttgtggtggatgataagcctctttatgtaaatgggtggaactcgtattggttcatggaccatgcggttgatgaacatagcagaaaccttgtcggtgaaatgcttgaagctggagctaaaatgggtctcactgtttgtagaacttgggctttcaatgacggtggctacaatgctcttcagatctctcctggccgattcgatgagcgagtctttcaggctttggatcatgtaattgcagaagcgagaaagcatgatgttagattgttgcttagcttagtgaacaacttgcaagcttatggagggaagactcagtatgtgaaatgggcatggcaagaaggtgttggtcttagttcttccaatgattccttcttctttgatccatctatccgcaattacttcaagaattatctcaaggttctgctcaccaggaagaactctgtaacgggaatagagtacagaaacgatcctacgattttcgcttgggagttgataaacgagcctcgatgcacgactgatgtctctggcaaaactctccaagattggatagacgaaatgacgggattcattaagtcaatcgatgacaagcatctcctcacagtaggtctggaaggcttctatggtcctaatagcccgaaagggctcacagttaatccagaacagtgggcatcccagctcggaacagactttgttcaaaactctaactcctcaaacatagattttgcatccgttcatatctaccctgatcactggtttcataatcagacatttgaagagaagctaaagtttgtggtgaaatggatgcaatctcacatagaagatggattgaaagaactaaagaagccagttctcttcacagagtttggcctatcaaaccagaacaaggactacgaaccatcgcagcgagataagttctacagaatcatcttcgacgtggtttacaaatcagccaaaagaaagaagtcaggtgcaggcacattagtgtggcagctattcatggaaggcatggaaacattcaacgatgactttgggattgttccacatgaacaagattccatttacaaattgatgatagaacaatcttgcagattgggtaaagtcacaggacgtcttaaggaacaaaagttgaaagaactttgttctcacagacattga

SEQ ID NO: 81227 - protein, 431 aa, Arabidopsis thaliana
  peptide (1)..(431): Ceres Seq. ID no. 12658865
MVPTRNRPMLRILGFFICAAFIYLSFRDLWLNHKGKAKLGFVKRNGTQFVVDDKPLYVNGWNSYWFMDHAVDEHSRNLVGEMLEAGAKMGLTVCRTWAFNDGGYNALQISPGRFDERVFQALDHVIAEARKHDVRLLLSLVNNLQAYGGKTQYVKWAWQEGVGLSSSNDSFFFDPSIRNYFKNYLKVLLTRKNSVTGIEYRNDPTIFAWELINEPRCTTDVSGKTLQDWIDEMTGFIKSIDDKHLLTVGLEGFYGPNSPKGLTVNPEQWASQLGTDFVQNSNSSNIDFASVHIYPDHWFHNQTFEEKLKFVVKWMQSHIEDGLKELKKPVLFTEFGLSNQNKDYEPSQRDKFYRIIFDVVYKSAKRKKSGAGTLVWQLFMEGMETFNDDFGIVPHEQDSIYKLMIEQSCRLGKVTGRLKEQKLKELCSHRH

SEQ ID NO: 81228 - protein, 423 aa, Arabidopsis thaliana
  peptide (1)..(423): Ceres Seq. ID no. 12658866
MLRILGFFICAAFIYLSFRDLWLNHKGKAKLGFVKRNGTQFVVDDKPLYVNGWNSYWFMDHAVDEHSRNLVGEMLEAGAKMGLTVCRTWAFNDGGYNALQISPGRFDERVFQALDHVIAEARKHDVRLLLSLVNNLQAYGGKTQYVKWAWQEGVGLSSSNDSFFFDPSIRNYFKNYLKVLLTRKNSVTGIEYRNDPTIFAWELINEPRCTTDVSGKTLQDWIDEMTGFIKSIDDKHLLTVGLEGFYGPNSPKGLTVNPEQWASQLGTDFVQNSNSSNIDFASVHIYPDHWFHNQTFEEKLKFVVKWMQSHIEDGLKELKKPVLFTEFGLSNQNKDYEPSQRDKFYRIIFDVVYKSAKRKKSGAGTLVWQLFMEGMETFNDDFGIVPHEQDSIYKLMIEQSCRLGKVTGRLKEQKLKELCSHRH

SEQ ID NO: 81229 - protein, 365 aa, Arabidopsis thaliana
  peptide (1)..(365): Ceres Seq. ID no. 12658867
MDHAVDEHSRNLVGEMLEAGAKMGLTVCRTWAFNDGGYNALQISPGRFDERVFQALDHVIAEARKHDVRLLLSLVNNLQAYGGKTQYVKWAWQEGVGLSSSNDSFFFDPSIRNYFKNYLKVLLTRKNSVTGIEYRNDPTIFAWELINEPRCTTDVSGKTLQDWIDEMTGFIKSIDDKHLLTVGLEGFYGPNSPKGLTVNPEQWASQLGTDFVQNSNSSNIDFASVHIYPDHWFHNQTFEEKLKFVVKWMQSHIEDGLKELKKPVLFTEFGLSNQNKDYEPSQRDKFYRIIFDVVYKSAKRKKSGAGTLVWQLFMEGMETFNDDFGIVPHEQDSIYKLMIEQSCRLGKVTGRLKEQKLKELCSHRH

SEQ ID NO: 81230 - DNA, 1713 bp, Arabidopsis thaliana
  misc_feature (1)..(1713): Ceres Seq. ID no. 12658884
  misc_feature (1)..(1713): Ortholog of  Ceres SEQ ID NO 13662416 as cited in SEQ ID NO 68746
ctggagaacttagctcacttttgactctgtatctctctgtgtctctcttccccgttagtcttcgtcgtgacctttttgtagtattaagcaatgaagattaagacgttatcaagatcggttgatgaatacactcgagaaagaagtcaggatcttcagaggggtctttcacaacttcgacccaagtcttcgacctatggagaaggccgtggaataccagagagctcttacagctgccaaattagaaaagatatttgcaaggccgtttgttggagcaatggatggtcatcgtgatggagtctcatgtatggcgaagaacccaaattacctcaaaggaatcttctctgcttctatggatggagatattcgcctttgggatatctcttcaaggcgtacagtttgccaattccctggtcatcaaggtgctgtgcgtggtcttactgcatcaaccgatggaaatgtattggtttcatgcggaactgattgcactgttcgtttgtggaatgttcctcgtccttcacttgaagattctagcatttcatctgagaatttcattgagccatctgcaacctatgtctggaagaatgctttctgggctgttgatcatcagtttgaaggtgacctttttgctacggccggagctcaacttgatatatggaatcataataggtctcagccagttcagagtttccagtggggaactgactctgtaatatctgttcggtttaatcctggagagcctaatttattggctacatcagctagtgaccggagcataaccatatatgatctccgcttgtcttctgcggcaaggaaaattatcatgatgacaaaaacaaattcaattgcatggaaccccatggagcctatgaacctgacagctgctaatgaagatggaagttgctatagctttgatggtagaaagttggacgaagccaagtgcgtgcataaagatcatgtttctgcagtgatggatattgacttttcaccgactggtcgtgagtttgttacgggttcttatgatcgatctgtgagaatcttcccatacaatggaggacacagcagggaaatctaccatacaaagaggatgcagagagtattctgtgtcaaatatagctgtgatgctacatatgtaatatcgggcagtgatgacaccaatctcaggctatggaaggcaaaggcatcagagcaattgggagttattcttccaagggaacaaaagaagcatgagtacaacgaggctgtgaagaaccggtacaagcatctttctgaggttaagcgcattgtgagacacaggcacttgccaaaaccaatatacaaagcgatgggtatcattcgaactgtgaacgattcgaagagaagaaaagaagcacgaaggaaagctcacagtgctccaggaacagtggtcacagcacctctgcgcaaaagaaagatcatcaaagaagtggagtgactctactctttctccgtttgttcctttcaaggatgatgatacgtggagaggattgtattggtatagtgagggtaagattaggaacatgaacatttttgctgtgttgtaagcctttctttatgccattaagttattacccatttcgttttcttttttctcttcactacgtattgtgttcattaactattcgtttttggtgttacaaagctgatcttcaaagtaacattctgatttcaaagatttataaagtttggaattagacc

SEQ ID NO: 81231 - protein, 442 aa, Arabidopsis thaliana
  peptide (1)..(442): Ceres Seq. ID no. 12658885
MNTLEKEVRIFRGVFHNFDPSLRPMEKAVEYQRALTAAKLEKIFARPFVGAMDGHRDGVSCMAKNPNYLKGIFSASMDGDIRLWDISSRRTVCQFPGHQGAVRGLTASTDGNVLVSCGTDCTVRLWNVPRPSLEDSSISSENFIEPSATYVWKNAFWAVDHQFEGDLFATAGAQLDIWNHNRSQPVQSFQWGTDSVISVRFNPGEPNLLATSASDRSITIYDLRLSSAARKIIMMTKTNSIAWNPMEPMNLTAANEDGSCYSFDGRKLDEAKCVHKDHVSAVMDIDFSPTGREFVTGSYDRSVRIFPYNGGHSREIYHTKRMQRVFCVKYSCDATYVISGSDDTNLRLWKAKASEQLGVILPREQKKHEYNEAVKNRYKHLSEVKRIVRHRHLPKPIYKAMGIIRTVNDSKRRKEARRKAHSAPGTVVTAPLRKRKIIKEVE

SEQ ID NO: 81232 - protein, 418 aa, Arabidopsis thaliana
  peptide (1)..(418): Ceres Seq. ID no. 12658886
MEKAVEYQRALTAAKLEKIFARPFVGAMDGHRDGVSCMAKNPNYLKGIFSASMDGDIRLWDISSRRTVCQFPGHQGAVRGLTASTDGNVLVSCGTDCTVRLWNVPRPSLEDSSISSENFIEPSATYVWKNAFWAVDHQFEGDLFATAGAQLDIWNHNRSQPVQSFQWGTDSVISVRFNPGEPNLLATSASDRSITIYDLRLSSAARKIIMMTKTNSIAWNPMEPMNLTAANEDGSCYSFDGRKLDEAKCVHKDHVSAVMDIDFSPTGREFVTGSYDRSVRIFPYNGGHSREIYHTKRMQRVFCVKYSCDATYVISGSDDTNLRLWKAKASEQLGVILPREQKKHEYNEAVKNRYKHLSEVKRIVRHRHLPKPIYKAMGIIRTVNDSKRRKEARRKAHSAPGTVVTAPLRKRKIIKEVE

SEQ ID NO: 81233 - protein, 391 aa, Arabidopsis thaliana
  peptide (1)..(391): Ceres Seq. ID no. 12658887
MDGHRDGVSCMAKNPNYLKGIFSASMDGDIRLWDISSRRTVCQFPGHQGAVRGLTASTDGNVLVSCGTDCTVRLWNVPRPSLEDSSISSENFIEPSATYVWKNAFWAVDHQFEGDLFATAGAQLDIWNHNRSQPVQSFQWGTDSVISVRFNPGEPNLLATSASDRSITIYDLRLSSAARKIIMMTKTNSIAWNPMEPMNLTAANEDGSCYSFDGRKLDEAKCVHKDHVSAVMDIDFSPTGREFVTGSYDRSVRIFPYNGGHSREIYHTKRMQRVFCVKYSCDATYVISGSDDTNLRLWKAKASEQLGVILPREQKKHEYNEAVKNRYKHLSEVKRIVRHRHLPKPIYKAMGIIRTVNDSKRRKEARRKAHSAPGTVVTAPLRKRKIIKEVE

SEQ ID NO: 81234 - DNA, 2043 bp, Arabidopsis thaliana
  misc_feature (1)..(2043): Ceres Seq. ID no. 12658904
  misc_feature (1)..(2043): Ortholog of  Ceres SEQ ID NO 15176963 as cited in SEQ ID NO 52894
atgatgagagtttctcaactccaactctgtcgcacttctctttcgtaccgtcttcgctctggttatcatcatcatcatcatcttcaccacagtttcttcaagctcatcaaacgtaactcaattcttgaatctccacctactaatgcatctcatcaatctccatccccgattactcctatggtcaacgcacgcgtcatgttcttctccacttcaacttcagctccacatccagagaaaatcaacaggacgtcgtcggagaatatccttcggatgatttcaagctatctatggatgaaagacaacccaaaactctgtttcagagtcatctctgcttttgcgtgtctcgtgggagctaagttcttgaatgttcaagttcctttcctcttcaaagtagctatagattggctctcttcatcttcattcgttgattcaaacccttacctagttgctgctttcgctactccttcctctgttctcattggttatggcattgctcgatctggttcttctgctttcaacgagcttcgtactagtgttttctccaaagtagctctccgcaccatacgaaccatctctagaaaagttctctcgcgtttacacgatctcgatcttcgttaccatctaaatagagacacaggtgctttgaacagaatcattgatcgtggaagccgcgctataaacacgattctctcagctatggttttcaacattatgcccacgatcttggagatatcaatggtctcatgtatattagcatacaaatttggagctgtttatgcattgattacttgtctttctgttggatcatatatagcattcacgttggctatgacgcagtggagaatcaagattagaaaagctatgaatgaagctgaaaacgatgctagcaccagagccattgactctctcataaactacgagactgttaagtatttcaacaacgaagattacgaagctcgaaagtacgatcagttacacgaaaattacgaagatgctgcattgcaaagtcggaaaagctttgccttattaaattttggacagagttttatatttagtacagctttgtcaacagcaatggtgttgtgttctcaggggattatgaatggtcagatgacagttggtgatttggtgatggtgaatggtctcctctttcaactgtctcttcctctttactttctcggggttgtttacagcgacaccgttcagggacttgtcgacatgaaatcgatgtttaagtttctagaggagagatctgatatcggagataaagatatagacaggaagctccctcctcttgttctgaaaggtggaagcattagttttgagaatgtacattttagttatctaccggagagaaagattttagatgggatttcatttgaggtaccggcagggaaaagtgtggcgattgtcggtagtagcggaagcggaaaatcgactattcttagaatgatattcaggttctttgatgtagattccggaaatgtaaaaattgatggtcaggatataaaggaagtgagactagagagtcttagaagctccattggagttgtccctcaagatactgtgctctttaacgacactatatttcacaacattcactatggaaacctttcagcaacagaggaagaggtgtacaatgcagctcgacgagcagcgattcacgatacgatcatgaaattccctgataaatattcgaccgcggtgggagaaagagggctgatgctgagtggtggagagaaacagagggtggcacttgctcgtgcatttctgaaatcaccagcaatcctattgtgtgacgaagcaacaagtgcactcgacagtaaaaccgaggcagagataatgaaaacgctgaggtcgctagcgagtaacaggacttgcattttcattgcacatagactgaccactgcaatgcaatgtgatgagatattagtaatggagaaaggaaaagtggtggaaaaagggacacacgaagtgttgttggggaaatctggcagatacgctaaattatggacacaacaaaacagtaaattggaggtgtga

SEQ ID NO: 81235 - protein, 680 aa, Arabidopsis thaliana
  peptide (1)..(680): Ceres Seq. ID no. 12658905
MMRVSQLQLCRTSLSYRLRSGYHHHHHLHHSFFKLIKRNSILESPPTNASHQSPSPITPMVNARVMFFSTSTSAPHPEKINRTSSENILRMISSYLWMKDNPKLCFRVISAFACLVGAKFLNVQVPFLFKVAIDWLSSSSFVDSNPYLVAAFATPSSVLIGYGIARSGSSAFNELRTSVFSKVALRTIRTISRKVLSRLHDLDLRYHLNRDTGALNRIIDRGSRAINTILSAMVFNIMPTILEISMVSCILAYKFGAVYALITCLSVGSYIAFTLAMTQWRIKIRKAMNEAENDASTRAIDSLINYETVKYFNNEDYEARKYDQLHENYEDAALQSRKSFALLNFGQSFIFSTALSTAMVLCSQGIMNGQMTVGDLVMVNGLLFQLSLPLYFLGVVYSDTVQGLVDMKSMFKFLEERSDIGDKDIDRKLPPLVLKGGSISFENVHFSYLPERKILDGISFEVPAGKSVAIVGSSGSGKSTILRMIFRFFDVDSGNVKIDGQDIKEVRLESLRSSIGVVPQDTVLFNDTIFHNIHYGNLSATEEEVYNAARRAAIHDTIMKFPDKYSTAVGERGLMLSGGEKQRVALARAFLKSPAILLCDEATSALDSKTEAEIMKTLRSLASNRTCIFIAHRLTTAMQCDEILVMEKGKVVEKGTHEVLLGKSGRYAKLWTQQNSKLEV

SEQ ID NO: 81236 - protein, 679 aa, Arabidopsis thaliana
  peptide (1)..(679): Ceres Seq. ID no. 12658906
MRVSQLQLCRTSLSYRLRSGYHHHHHLHHSFFKLIKRNSILESPPTNASHQSPSPITPMVNARVMFFSTSTSAPHPEKINRTSSENILRMISSYLWMKDNPKLCFRVISAFACLVGAKFLNVQVPFLFKVAIDWLSSSSFVDSNPYLVAAFATPSSVLIGYGIARSGSSAFNELRTSVFSKVALRTIRTISRKVLSRLHDLDLRYHLNRDTGALNRIIDRGSRAINTILSAMVFNIMPTILEISMVSCILAYKFGAVYALITCLSVGSYIAFTLAMTQWRIKIRKAMNEAENDASTRAIDSLINYETVKYFNNEDYEARKYDQLHENYEDAALQSRKSFALLNFGQSFIFSTALSTAMVLCSQGIMNGQMTVGDLVMVNGLLFQLSLPLYFLGVVYSDTVQGLVDMKSMFKFLEERSDIGDKDIDRKLPPLVLKGGSISFENVHFSYLPERKILDGISFEVPAGKSVAIVGSSGSGKSTILRMIFRFFDVDSGNVKIDGQDIKEVRLESLRSSIGVVPQDTVLFNDTIFHNIHYGNLSATEEEVYNAARRAAIHDTIMKFPDKYSTAVGERGLMLSGGEKQRVALARAFLKSPAILLCDEATSALDSKTEAEIMKTLRSLASNRTCIFIAHRLTTAMQCDEILVMEKGKVVEKGTHEVLLGKSGRYAKLWTQQNSKLEV

SEQ ID NO: 81237 - protein, 621 aa, Arabidopsis thaliana
  peptide (1)..(621): Ceres Seq. ID no. 12658907
MVNARVMFFSTSTSAPHPEKINRTSSENILRMISSYLWMKDNPKLCFRVISAFACLVGAKFLNVQVPFLFKVAIDWLSSSSFVDSNPYLVAAFATPSSVLIGYGIARSGSSAFNELRTSVFSKVALRTIRTISRKVLSRLHDLDLRYHLNRDTGALNRIIDRGSRAINTILSAMVFNIMPTILEISMVSCILAYKFGAVYALITCLSVGSYIAFTLAMTQWRIKIRKAMNEAENDASTRAIDSLINYETVKYFNNEDYEARKYDQLHENYEDAALQSRKSFALLNFGQSFIFSTALSTAMVLCSQGIMNGQMTVGDLVMVNGLLFQLSLPLYFLGVVYSDTVQGLVDMKSMFKFLEERSDIGDKDIDRKLPPLVLKGGSISFENVHFSYLPERKILDGISFEVPAGKSVAIVGSSGSGKSTILRMIFRFFDVDSGNVKIDGQDIKEVRLESLRSSIGVVPQDTVLFNDTIFHNIHYGNLSATEEEVYNAARRAAIHDTIMKFPDKYSTAVGERGLMLSGGEKQRVALARAFLKSPAILLCDEATSALDSKTEAEIMKTLRSLASNRTCIFIAHRLTTAMQCDEILVMEKGKVVEKGTHEVLLGKSGRYAKLWTQQNSKLEV

SEQ ID NO: 81238 - DNA, 1299 bp, Arabidopsis thaliana
  misc_feature (1)..(1299): Ceres Seq. ID no. 12658938
  misc_feature (1)..(1299): Ortholog of  Ceres SEQ ID NO 13594402 as cited in SEQ ID NO 58196
atgtatcaaatcttctttttctttcttcctctcctccacagttatgcctctgcccagactcctcctccgttcagaaacggtgacctcgtcgcaaattttgagccgagtttagccgtcgtcaccggagttctcgccatcatgttcgcactcactttcgtcctcctcgtctacgctaagtgctgccacatcgatctccgatcaggttccggcgacagaagaaggcacgatcgccggctcagacaaggaatattctttaaccggtcaacggcatcatcggatcgattctctggtttagacaaaacagcaatcgagtctcttcctctgtttagattctctgctttgaaaggatcaaaacaaggtcttgattgttctgtctgtttgtctaaattcgaaagtgttgagattcttagattgttgcctaagtgtagacacgctttccacatcggatgtatcgatcagtggcttgagcaacacgcaacttgtcctctttgcagagatagagtctcaatggaagaagattcctctgttctcactaacggaaacagtttcaggttcttgaatcagtctgagattagagaagattcgagcttggagctttacatcgagagagaagaagaagaagaaagaatacacagagaagaacttagtgggtcgtcgagattcagcatcggagagagtttccggaagattctgaaattaggtaataaagaaaaaacgttacttgatgaacacgtgaacgataaagatgagaagaagcttatgcacaagttcaatcataggatcgttgtgtcggatgttgttttcaagaatcgttggagcaacgtgagttcatcagatttgatgtttttgaattccgagatggttaattcgatttctagcgagagattttcttcattggatcatgtgaagagaggagatgaagaggatcagataggtatcttgcgaatcaaggaagagatggaagcgaagagaatgttggagaacaagttaacttcgatgacaactatgttttcctcggaaaacggagactctggttcgaaatcaagaagcgttatgatcgaaccaggacgaagatcggtgtctgacatcactgcggttcctagactcagtatatcgattcatggagattgcagcggttcagccgcagagactgcgtctgcgttacaaaacggtgggaatgagacggaggagagaagacggcgtttgtggctgccgatcgctagaaaaactgctcaatggtttgctaacagagaaaaaagaagtcaaattaacacaacacaccaacactttgatgtttag

SEQ ID NO: 81239 - protein, 432 aa, Arabidopsis thaliana
  peptide (1)..(432): Ceres Seq. ID no. 12658939
MYQIFFFFLPLLHSYASAQTPPPFRNGDLVANFEPSLAVVTGVLAIMFALTFVLLVYAKCCHIDLRSGSGDRRRHDRRLRQGIFFNRSTASSDRFSGLDKTAIESLPLFRFSALKGSKQGLDCSVCLSKFESVEILRLLPKCRHAFHIGCIDQWLEQHATCPLCRDRVSMEEDSSVLTNGNSFRFLNQSEIREDSSLELYIEREEEEERIHREELSGSSRFSIGESFRKILKLGNKEKTLLDEHVNDKDEKKLMHKFNHRIVVSDVVFKNRWSNVSSSDLMFLNSEMVNSISSERFSSLDHVKRGDEEDQIGILRIKEEMEAKRMLENKLTSMTTMFSSENGDSGSKSRSVMIEPGRRSVSDITAVPRLSISIHGDCSGSAAETASALQNGGNETEERRRRLWLPIARKTAQWFANREKRSQINTTHQHFDV

SEQ ID NO: 81240 - protein, 386 aa, Arabidopsis thaliana
  peptide (1)..(386): Ceres Seq. ID no. 12658940
MFALTFVLLVYAKCCHIDLRSGSGDRRRHDRRLRQGIFFNRSTASSDRFSGLDKTAIESLPLFRFSALKGSKQGLDCSVCLSKFESVEILRLLPKCRHAFHIGCIDQWLEQHATCPLCRDRVSMEEDSSVLTNGNSFRFLNQSEIREDSSLELYIEREEEEERIHREELSGSSRFSIGESFRKILKLGNKEKTLLDEHVNDKDEKKLMHKFNHRIVVSDVVFKNRWSNVSSSDLMFLNSEMVNSISSERFSSLDHVKRGDEEDQIGILRIKEEMEAKRMLENKLTSMTTMFSSENGDSGSKSRSVMIEPGRRSVSDITAVPRLSISIHGDCSGSAAETASALQNGGNETEERRRRLWLPIARKTAQWFANREKRSQINTTHQHFDV

SEQ ID NO: 81241 - protein, 263 aa, Arabidopsis thaliana
  peptide (1)..(263): Ceres Seq. ID no. 12658941
MEEDSSVLTNGNSFRFLNQSEIREDSSLELYIEREEEEERIHREELSGSSRFSIGESFRKILKLGNKEKTLLDEHVNDKDEKKLMHKFNHRIVVSDVVFKNRWSNVSSSDLMFLNSEMVNSISSERFSSLDHVKRGDEEDQIGILRIKEEMEAKRMLENKLTSMTTMFSSENGDSGSKSRSVMIEPGRRSVSDITAVPRLSISIHGDCSGSAAETASALQNGGNETEERRRRLWLPIARKTAQWFANREKRSQINTTHQHFDV

SEQ ID NO: 81242 - DNA, 2010 bp, Arabidopsis thaliana
  misc_feature (1)..(2010): Ceres Seq. ID no. 12658957
  misc_feature (1)..(2010): Ortholog of  Ceres SEQ ID NO 13655640 as cited in SEQ ID NO 63844
atgaaattttttgtactagtgcttcttctggtgctgcaattcttctccaacaaagcactttctcagagtgaagaaggagagtttggttttaatggttacttgtacgacaactctggaattgcaattactaactccaaaggcttgatgaagctcacaaattcgtctgaattctcatatggtcacgttttctacaactctccagttagattcaagaactcaccaaacggtaccgtttcgtctttctccactacctttgttttcgctatagtctctaatgttaatgcacttgatggccatggacttgcatttgtcatctctcccaccaaaggcttgccctatagttcatcctcacaatatctagggctctttaatttgacaaacaatggagatccctctaatcatattgtagcagttgagtttgatacatttcaaaatcaagaatttgatgacatggataataaccatgttggtattgacatcaatagcttgagctcagagaaagcttctacagcaggttattacgaagacgatgatggtactttcaaaaacatccgcctcataaatcaaaaacctatacaagcctggattgaatatgattcctcaaggagacaacttaacgtcacaatccatcctattcatctccctaagccaaagattccattgctttctctaaccaaagatttatctccatatcttttcgactctatgtatgttggcttcacttcagccacaggccgtcttcgttcatctcactatattcttggttggaccttcaagctcaatgggacagcttcaaatatagatatttctcgtcttccaaaacttcctagagactctcggagtacaagtgtgaaaaagatcttggctattagtttgagtttaaccagcctcgccatcctcgtcttcttgaccataagctatatgcttttcttgaaaaggaagaagttaatggaagttcttgaagactgggaggttcagtttggtccacataggtttgcttacaaggatctttacattgccacaaagggtttcaggaacagcgagcttcttggtaaaggagggtttggaaaagtatataaaggtacattatcgacgtctaacatggacatcgcggtgaagaaagtttctcatgattcaagacaaggaatgagagagtttgtggcagagatcgcgaccattgggcgtctcagacatcctaatctagttcggcttcttggctactgtaggcgcaaaggagaactctatttggtttacgactgtatgccaaaaggcagtcttgataagtttctctaccaccaaccagaacagagtcttgattggtcacaaagattcaagatcatcaaagatgttgcttctggtctctgctatttacaccaccagtgggttcaagtcattattcacagagacattaagccagcaaacgttcttcttgatgattctatgaacggaaagctcggtgattttggtctcgcaaagctctgtgaacacgggtttgatcctcaaacctctaacgtggctggtacgtttggatacatctcaccagagctttcaagaacagggaaggcaagcacaagttctgatgtattcgcgtttggaatactaatgttagagattacttgcgggcgaagacccgtcttgccacgagcatcttcgccgagcgagatggttcttacggattgggtgctagattgttgggaagatgacatattgcaagtggttgatgagagggtaaagcaggatgataagtaccttgaggagcaagtagcactggttctgaagctcggcttgttctgttcgcatccggttgcagccgtcagaccaagcatgtcgagcgtcatccagttcttggacggtgtggctcagctaccaaacaacttgtttgacattgtgaaagctagggagaacgttggagccattgaaggcttcggtgaagcagctgagtcccttgcagagccctgttcggtggctacattgacgtttacagaaccatttgtctcgcatgggcgctaa

SEQ ID NO: 81243 - protein, 669 aa, Arabidopsis thaliana
  peptide (1)..(669): Ceres Seq. ID no. 12658958
MKFFVLVLLLVLQFFSNKALSQSEEGEFGFNGYLYDNSGIAITNSKGLMKLTNSSEFSYGHVFYNSPVRFKNSPNGTVSSFSTTFVFAIVSNVNALDGHGLAFVISPTKGLPYSSSSQYLGLFNLTNNGDPSNHIVAVEFDTFQNQEFDDMDNNHVGIDINSLSSEKASTAGYYEDDDGTFKNIRLINQKPIQAWIEYDSSRRQLNVTIHPIHLPKPKIPLLSLTKDLSPYLFDSMYVGFTSATGRLRSSHYILGWTFKLNGTASNIDISRLPKLPRDSRSTSVKKILAISLSLTSLAILVFLTISYMLFLKRKKLMEVLEDWEVQFGPHRFAYKDLYIATKGFRNSELLGKGGFGKVYKGTLSTSNMDIAVKKVSHDSRQGMREFVAEIATIGRLRHPNLVRLLGYCRRKGELYLVYDCMPKGSLDKFLYHQPEQSLDWSQRFKIIKDVASGLCYLHHQWVQVIIHRDIKPANVLLDDSMNGKLGDFGLAKLCEHGFDPQTSNVAGTFGYISPELSRTGKASTSSDVFAFGILMLEITCGRRPVLPRASSPSEMVLTDWVLDCWEDDILQVVDERVKQDDKYLEEQVALVLKLGLFCSHPVAAVRPSMSSVIQFLDGVAQLPNNLFDIVKARENVGAIEGFGEAAESLAEPCSVATLTFTEPFVSHGR

SEQ ID NO: 81244 - protein, 621 aa, Arabidopsis thaliana
  peptide (1)..(621): Ceres Seq. ID no. 12658959
MKLTNSSEFSYGHVFYNSPVRFKNSPNGTVSSFSTTFVFAIVSNVNALDGHGLAFVISPTKGLPYSSSSQYLGLFNLTNNGDPSNHIVAVEFDTFQNQEFDDMDNNHVGIDINSLSSEKASTAGYYEDDDGTFKNIRLINQKPIQAWIEYDSSRRQLNVTIHPIHLPKPKIPLLSLTKDLSPYLFDSMYVGFTSATGRLRSSHYILGWTFKLNGTASNIDISRLPKLPRDSRSTSVKKILAISLSLTSLAILVFLTISYMLFLKRKKLMEVLEDWEVQFGPHRFAYKDLYIATKGFRNSELLGKGGFGKVYKGTLSTSNMDIAVKKVSHDSRQGMREFVAEIATIGRLRHPNLVRLLGYCRRKGELYLVYDCMPKGSLDKFLYHQPEQSLDWSQRFKIIKDVASGLCYLHHQWVQVIIHRDIKPANVLLDDSMNGKLGDFGLAKLCEHGFDPQTSNVAGTFGYISPELSRTGKASTSSDVFAFGILMLEITCGRRPVLPRASSPSEMVLTDWVLDCWEDDILQVVDERVKQDDKYLEEQVALVLKLGLFCSHPVAAVRPSMSSVIQFLDGVAQLPNNLFDIVKARENVGAIEGFGEAAESLAEPCSVATLTFTEPFVSHGR

SEQ ID NO: 81245 - protein, 519 aa, Arabidopsis thaliana
  peptide (1)..(519): Ceres Seq. ID no. 12658960
MDNNHVGIDINSLSSEKASTAGYYEDDDGTFKNIRLINQKPIQAWIEYDSSRRQLNVTIHPIHLPKPKIPLLSLTKDLSPYLFDSMYVGFTSATGRLRSSHYILGWTFKLNGTASNIDISRLPKLPRDSRSTSVKKILAISLSLTSLAILVFLTISYMLFLKRKKLMEVLEDWEVQFGPHRFAYKDLYIATKGFRNSELLGKGGFGKVYKGTLSTSNMDIAVKKVSHDSRQGMREFVAEIATIGRLRHPNLVRLLGYCRRKGELYLVYDCMPKGSLDKFLYHQPEQSLDWSQRFKIIKDVASGLCYLHHQWVQVIIHRDIKPANVLLDDSMNGKLGDFGLAKLCEHGFDPQTSNVAGTFGYISPELSRTGKASTSSDVFAFGILMLEITCGRRPVLPRASSPSEMVLTDWVLDCWEDDILQVVDERVKQDDKYLEEQVALVLKLGLFCSHPVAAVRPSMSSVIQFLDGVAQLPNNLFDIVKARENVGAIEGFGEAAESLAEPCSVATLTFTEPFVSHGR

SEQ ID NO: 81246 - DNA, 2223 bp, Arabidopsis thaliana
  misc_feature (1)..(2223): Ceres Seq. ID no. 12658997
  misc_feature (1)..(2223): Ortholog of  Ceres SEQ ID NO 12586556 as cited in SEQ ID NO 64667
  misc_feature (1)..(2223): Ortholog of  Ceres SEQ ID NO 13660894 as cited in SEQ ID NO 67475
atgggaatgaagagtgatacttatctatgtaatcgtttacttgatttgtatattgagtgtggtgatggggattatgcacggaaggtgtttgatgaaatgtctgtaagagatgtttattcttggaatgcttttttgacgtttagatgtaaagttggggatttgggggaagcgtgtgaggtgtttgatggaatgcctgagagagatgttgtgtcgtggaataatatgattagtgttttggtgaggaaagggtttgaagagaaggctttggttgtctataagaggatggtttgtgatgggtttttgccttctcggttcacgttagctagtgttttaagtgcgtgtagcaaggttttggatggtgtttttggtatgaggtgtcatggggttgctgttaaaacgggtcttgataagaatatttttgttgggaatgcgttgttgtctatgtatgcaaagtgtgggtttattgttgattatggtgttcgagtctttgaatctctctctcagcctaatgaagtctcttatacagcggtgattggcgggttagctcgggaaaataaagtgttggaggcagttcagatgttcagattgatgtgcgagaaaggcgtgcaggtggattctgtttgcttatctaatattcttagcatctctgctccaagagaaggatgtgatagcctgagtgaaatctatggcaatgagcttgggaaacagattcattgtcttgctttgagacttgggtttggaggagatcttcatctgaacaattcgttgcttgaaatatatgcaaagaataaagacatgaatggtgcagagctaatttttgctgagatgcctgaagtgaatgttgtctcttggaacataatgatagttgggtttggtcaggagtatcgaagtgacaaatctgttgaattcctaacgagaatgagagattctggttttcaaccaaatgaagttacttgcattagtgttcttggagcgtgctttcgttcaggggatgtcgaaaccggaaggagaatattcagtagcattccccagccaagtgttagcgcttggaatgctatgctttctggttattccaactatgaacactatgaggaagcaataagcaatttcagacaaatgcagtttcagaacctgaaacctgataaaaccactttgagtgtgatattaagttcgtgtgcgagattgagatttctggaaggagggaagcagatccatggggtagtgataaggaccgagatttcgaagaacagtcacatagttagtggtcttattgcagtgtactccgaatgcgagaagatggagatatctgaatgtatctttgatgattgtataaacgaattggatatcgcttgttggaactcgatgatctcaggttttagacacaacatgctggacacaaaagctctaatactctttagaaggatgcatcagactgccgtgttgtgtcctaatgaaacttcattcgctactgtactaagtagctgttcaaggttatgtagtttgctccatggaagacagtttcatggactggtagtgaagagtggatatgtaagtgattcctttgttgaaaccgctcttaccgacatgtactgcaagtgtggggaaatagattcagctcgacagttcttcgatgctgttttgaggaaaaacacggttatttggaatgagatgatacatgggtatggtcataatggacgaggtgatgaagctgttggtctctacagaaagatgatttcatcaggagagaagcctgatgggataaccttcgtttctgtcttgactgcttgtagccactcaggactggtggaaaccgggcttgagatacttagttcgatgcagagaattcatggaattgagccggagctggatcattacatctgtatagttgattgtcttggaagagctggccggcttgaagatgcagagaagcttgcagaagctacaccatacaaaagtagctctgttctatgggagattctactaagttcatgtagagtccatggagatgtgagcttggctagacgagttgcagaaaaactaatgcgtctggatcctcagagctcagcagcatatgtgctgctaagcaacacatatagttctttgagacagtgggatgattctgcagctcttcaaggattaatgaacaagaacagagttcataaaactccaggtcaaagctggaccacatatggcaatgatttggactcagggtttcgaaaatag

SEQ ID NO: 81247 - protein, 740 aa, Arabidopsis thaliana
  peptide (1)..(740): Ceres Seq. ID no. 12658998
MGMKSDTYLCNRLLDLYIECGDGDYARKVFDEMSVRDVYSWNAFLTFRCKVGDLGEACEVFDGMPERDVVSWNNMISVLVRKGFEEKALVVYKRMVCDGFLPSRFTLASVLSACSKVLDGVFGMRCHGVAVKTGLDKNIFVGNALLSMYAKCGFIVDYGVRVFESLSQPNEVSYTAVIGGLARENKVLEAVQMFRLMCEKGVQVDSVCLSNILSISAPREGCDSLSEIYGNELGKQIHCLALRLGFGGDLHLNNSLLEIYAKNKDMNGAELIFAEMPEVNVVSWNIMIVGFGQEYRSDKSVEFLTRMRDSGFQPNEVTCISVLGACFRSGDVETGRRIFSSIPQPSVSAWNAMLSGYSNYEHYEEAISNFRQMQFQNLKPDKTTLSVILSSCARLRFLEGGKQIHGVVIRTEISKNSHIVSGLIAVYSECEKMEISECIFDDCINELDIACWNSMISGFRHNMLDTKALILFRRMHQTAVLCPNETSFATVLSSCSRLCSLLHGRQFHGLVVKSGYVSDSFVETALTDMYCKCGEIDSARQFFDAVLRKNTVIWNEMIHGYGHNGRGDEAVGLYRKMISSGEKPDGITFVSVLTACSHSGLVETGLEILSSMQRIHGIEPELDHYICIVDCLGRAGRLEDAEKLAEATPYKSSSVLWEILLSSCRVHGDVSLARRVAEKLMRLDPQSSAAYVLLSNTYSSLRQWDDSAALQGLMNKNRVHKTPGQSWTTYGNDLDSGFRK

SEQ ID NO: 81248 - protein, 738 aa, Arabidopsis thaliana
  peptide (1)..(738): Ceres Seq. ID no. 12658999
MKSDTYLCNRLLDLYIECGDGDYARKVFDEMSVRDVYSWNAFLTFRCKVGDLGEACEVFDGMPERDVVSWNNMISVLVRKGFEEKALVVYKRMVCDGFLPSRFTLASVLSACSKVLDGVFGMRCHGVAVKTGLDKNIFVGNALLSMYAKCGFIVDYGVRVFESLSQPNEVSYTAVIGGLARENKVLEAVQMFRLMCEKGVQVDSVCLSNILSISAPREGCDSLSEIYGNELGKQIHCLALRLGFGGDLHLNNSLLEIYAKNKDMNGAELIFAEMPEVNVVSWNIMIVGFGQEYRSDKSVEFLTRMRDSGFQPNEVTCISVLGACFRSGDVETGRRIFSSIPQPSVSAWNAMLSGYSNYEHYEEAISNFRQMQFQNLKPDKTTLSVILSSCARLRFLEGGKQIHGVVIRTEISKNSHIVSGLIAVYSECEKMEISECIFDDCINELDIACWNSMISGFRHNMLDTKALILFRRMHQTAVLCPNETSFATVLSSCSRLCSLLHGRQFHGLVVKSGYVSDSFVETALTDMYCKCGEIDSARQFFDAVLRKNTVIWNEMIHGYGHNGRGDEAVGLYRKMISSGEKPDGITFVSVLTACSHSGLVETGLEILSSMQRIHGIEPELDHYICIVDCLGRAGRLEDAEKLAEATPYKSSSVLWEILLSSCRVHGDVSLARRVAEKLMRLDPQSSAAYVLLSNTYSSLRQWDDSAALQGLMNKNRVHKTPGQSWTTYGNDLDSGFRK

SEQ ID NO: 81249 - protein, 708 aa, Arabidopsis thaliana
  peptide (1)..(708): Ceres Seq. ID no. 12659000
MSVRDVYSWNAFLTFRCKVGDLGEACEVFDGMPERDVVSWNNMISVLVRKGFEEKALVVYKRMVCDGFLPSRFTLASVLSACSKVLDGVFGMRCHGVAVKTGLDKNIFVGNALLSMYAKCGFIVDYGVRVFESLSQPNEVSYTAVIGGLARENKVLEAVQMFRLMCEKGVQVDSVCLSNILSISAPREGCDSLSEIYGNELGKQIHCLALRLGFGGDLHLNNSLLEIYAKNKDMNGAELIFAEMPEVNVVSWNIMIVGFGQEYRSDKSVEFLTRMRDSGFQPNEVTCISVLGACFRSGDVETGRRIFSSIPQPSVSAWNAMLSGYSNYEHYEEAISNFRQMQFQNLKPDKTTLSVILSSCARLRFLEGGKQIHGVVIRTEISKNSHIVSGLIAVYSECEKMEISECIFDDCINELDIACWNSMISGFRHNMLDTKALILFRRMHQTAVLCPNETSFATVLSSCSRLCSLLHGRQFHGLVVKSGYVSDSFVETALTDMYCKCGEIDSARQFFDAVLRKNTVIWNEMIHGYGHNGRGDEAVGLYRKMISSGEKPDGITFVSVLTACSHSGLVETGLEILSSMQRIHGIEPELDHYICIVDCLGRAGRLEDAEKLAEATPYKSSSVLWEILLSSCRVHGDVSLARRVAEKLMRLDPQSSAAYVLLSNTYSSLRQWDDSAALQGLMNKNRVHKTPGQSWTTYGNDLDSGFRK

SEQ ID NO: 81250 - DNA, 1599 bp, Arabidopsis thaliana
  misc_feature (1)..(1599): Ceres Seq. ID no. 12659007
  misc_feature (1)..(1599): Ortholog of  Ceres SEQ ID NO 14313216 as cited in SEQ ID NO 66103
atgaaattccaaagcttctttagctctgttctgatcttcttcactactagtactttacttctatcaattcctcatccggtttcagctaaccggtctaatcaatccagtttcctccaatgtctatctctccagttaaacgactccaacatcgtctcaaaagtcatacacacaccaaacgacacttctttctcctcagtcttagcttcatcaatacaaaatcaaagattctctgctcctgatgtacctaaaccggttttaatcctaactccggttcaaccttctgatgttcaatcagcggttaaatgcgcacgccggttcggtatccacatcagaacccgaagcggaggacacgactacgaaggcctctcttacgttacacacaaacccttcgtaatcctcgatttaagaaacctccggtctatcacagttgacgtcgataaccggtcggtttgggtccaaaccggagccacgatcggtgaactatattacgaaatcggtaaaaagaatcgtactttagcgtttcccgccggagtttgccccaccgtcggcgtcggaggacattttagcggcggaggatacggtactttactgagaaaacacggtttagcagctgatcacgtgatagacgcacgtgttgtcgacgcaagaggaaggattcttgagagacgagagatgggtgaagatttcttctgggcgattcgtggaggtggtggatcaagcttttgcgttgttctttcatggaagatcggtttaatcaatgttccatcaacagtaactgtcttcaacgtcacgaaattctcagaacagagtgctttaaagatcattcatcgttggcaattcgtggctgataaagtctctgatgatttattcataagagttatgttgcagagatacaagaacatggttcgagcttcgtttccgggtttgtatcttggttcggttaagaatctgttgaaaatggtaaacaaagaatttcctgaattgggtttggaggaagatgattgtacagagatgagttggattgagtcagtaatttggtttgctgagttaggagaagaaccaatcaatgttcttactaaacgtacacgagcatcgttggctttcaaggctaaatctgattttgttcaagaaccgatgcctaaaaccgcgatttcgaagctttggagacggttgcaagaaccggaagcagagcatgctcagctaattttcactccatttggtggtaaaatgagtgagattgcagattacgaaacaccatttccgcataggaaggggaatatatatgagattcagtacttgaattactggagaggagacgtgaaagagaagtatatgagatgggtggagagagtttacgatgatatgagtgagtttgtggcgaagtctccgagaggagcttatataaatctgagagatcttgatttgggaatgtatgttggagttaagaggagtaagtacgaggaagggaagagttggggagtgaagtattttaagaataattttgagagattggtgagagttaagacaagtgttgatccttctgatttcttctgtgatgaacagagtattcctccttttacgtttgttgaagttatttga

SEQ ID NO: 81251 - protein, 532 aa, Arabidopsis thaliana
  peptide (1)..(532): Ceres Seq. ID no. 12659008
MKFQSFFSSVLIFFTTSTLLLSIPHPVSANRSNQSSFLQCLSLQLNDSNIVSKVIHTPNDTSFSSVLASSIQNQRFSAPDVPKPVLILTPVQPSDVQSAVKCARRFGIHIRTRSGGHDYEGLSYVTHKPFVILDLRNLRSITVDVDNRSVWVQTGATIGELYYEIGKKNRTLAFPAGVCPTVGVGGHFSGGGYGTLLRKHGLAADHVIDARVVDARGRILERREMGEDFFWAIRGGGGSSFCVVLSWKIGLINVPSTVTVFNVTKFSEQSALKIIHRWQFVADKVSDDLFIRVMLQRYKNMVRASFPGLYLGSVKNLLKMVNKEFPELGLEEDDCTEMSWIESVIWFAELGEEPINVLTKRTRASLAFKAKSDFVQEPMPKTAISKLWRRLQEPEAEHAQLIFTPFGGKMSEIADYETPFPHRKGNIYEIQYLNYWRGDVKEKYMRWVERVYDDMSEFVAKSPRGAYINLRDLDLGMYVGVKRSKYEEGKSWGVKYFKNNFERLVRVKTSVDPSDFFCDEQSIPPFTFVEVI

SEQ ID NO: 81252 - protein, 308 aa, Arabidopsis thaliana
  peptide (1)..(308): Ceres Seq. ID no. 12659009
MGEDFFWAIRGGGGSSFCVVLSWKIGLINVPSTVTVFNVTKFSEQSALKIIHRWQFVADKVSDDLFIRVMLQRYKNMVRASFPGLYLGSVKNLLKMVNKEFPELGLEEDDCTEMSWIESVIWFAELGEEPINVLTKRTRASLAFKAKSDFVQEPMPKTAISKLWRRLQEPEAEHAQLIFTPFGGKMSEIADYETPFPHRKGNIYEIQYLNYWRGDVKEKYMRWVERVYDDMSEFVAKSPRGAYINLRDLDLGMYVGVKRSKYEEGKSWGVKYFKNNFERLVRVKTSVDPSDFFCDEQSIPPFTFVEVI

SEQ ID NO: 81253 - DNA, 4572 bp, Arabidopsis thaliana
  misc_feature (1)..(4572): Ceres Seq. ID no. 12659029
  misc_feature (1)..(4572): Ortholog of  Ceres SEQ ID NO 14312989 as cited in SEQ ID NO 59121
  misc_feature (1)..(4572): Ortholog of  Ceres SEQ ID NO 12586556 as cited in SEQ ID NO 64667
  misc_feature (1)..(4572): Ortholog of  Ceres SEQ ID NO 13660894 as cited in SEQ ID NO 67475
atgtctccattctcagaaacctctgttctgctacttcccatggtcgagaaatgcataaacctcttgcaaacctacggcgtttcatcgataacgaaactcagacaaatccacgctttttcaatccgccatggagtctcaatctcagacgccgagcttgggaaacacctcatcttctaccttgtttctcttccttctccacctcccatgtcttacgctcacaaagtcttctccaagattgagaaacccatcaatgtctttatttggaacacattgatcagaggctacgccgagattggtaattccatctctgctttttctctataccgtgagatgagagtctctggtttggtcgagccagatactcatacttatccgtttcttattaaggctgtgacgacaatggcggatgttagattaggagagacgattcattcggttgttataagaagtggctttggttcgttgatctatgttcagaactctctgcttcatttatacgcaaattgtggagatgtagctagtgcgtacaaggtgtttgataaaatgcctgagaaagatttagtggcttggaactctgtgattaatgggtttgcggaaaacggtaaaccagaagaagctttagcgctttatactgagatgaattccaagggtatcaagcctgatgggttcacaattgttagcttgttgtctgcttgtgcaaagattggtgctttgacattgggtaagagagttcatgtctatatgatcaaagtaggtttgacacgaaacttgcattccagcaatgtgctcttggacttgtatgcgagatgtggaagagtggaagaagccaaaacacttttcgatgaaatggtggacaagaacagtgtctcgtggacttcgttgatagtcggtttagctgttaatggttttgggaaagaagccattgagcttttcaagtatatggaatcaacggagggattgttaccatgtgagatcacgtttgttgggatattatacgcttgtagccattgcgggatggtgaaggaaggttttgagtatttcaggagaatgagagaggagtataagattgaacctaggatcgagcattttggttgtatggtcgatttgttagctagagctggacaagtgaagaaagcatatgaatacatcaagagtatgccgatgcagcctaatgttgtaatctggagaacattgttaggagcttgtactgttcatggtgattcagatttagcagagtttgctagaatccagatcttacaactagaaccaaaccacagcggcgattatgttctcttgtcgaatatgtacgcatccgagcagcgttggtccgatgtgcaaaagatacggaaacaaatgttaagagacggtgtgaaaaaagtccccggtcacagcttagtagaagtaggaaacagagttcatgagtttcttatgggtgataagtctcacccacaaagcgatgctatttacgctaagctgaaagaaatgactggtagattgagatcagaaggttacgttccacaaatttctaatgtctatgtagatgttgaagaggaagagaaggagaatgctgtggtttatcacagtgagaagattgctattgcatttatgttaattagtacaccagaaagatcaccgattacagtcgtgaagaatcttagagtatgtgcagattgtcacttagcaatcaaacttgtgtcaaaggtttataaccgagagattgtagtcagagatcgtagcagatcgaaaatggcggacactagtcacctggagaggatgggaagagaactcaagtgccctatttgcttgagtctatataattctgcagtttcactttcgtgtaaccatgtattttgcaatgcgtgtatagtgaaatctatgaaaatggatgctacttgtcctgtttgtaaaatcccttaccatcgtagagagattcgaggtgctccacatatggatagcttggtgagcatttacaagaacatggaagatgcttctgggattaaattattcgttagccagaataatccgtcaccatcagataaagaaaagcaagtaagagatgcttccgttgaaaaggcaagtgataagaatcgtcagggatctaggaagggccgagcatccaagaggaacgagtatgggaaaaccaaggaaatagatgtagatgcacctgggcctattgttatgaaaccttcatcccaaaccaagaagagggtgcagctgctccagaatctgtctgctgaaagtttaactaaacctactgagtctgttgaaacagctgaaaaacccaaggactacactgaaaacactgtgattcgtttggatgagcatccatctctgaataaagaaggaaatctttcacccttcttttggttgagagatgaagatgatggggagaactcaagtcagcgtacagaaagtgatcaacttttagggactacaccagttaatgttccctctttcagcgatttgatggactcagatcatgagagcccatcgaaggaagacgagcaacaaaagcccaatccaggtgacatgtttgatagcgaaatgtttgaatggactcagaggccttgttctccggagattctacctagtcctgtgaaggccaaggtcctaggtagagatgagattgatcttactcaaaagaagctacctaaagttaaagttgcatcatccaaatgtaaaaaccgcaaagcaggaagtgcaagaaatacagttgctagacgaagcattggggtttcacaagaggacaacatggaatcatctgcagcagcaaccattagtgagcaacaagatagtcgtgggacttctggcacaattatcaggaatgatgtgaatactgatgaaaatgtgaaagctaaaagagctacaagaagcaaggctcagagtacacgagttcagtctgatctaaatgtatccaatgaagctgatgggaagcaggggacaaagaggaaaagatctagcattaaatcctctccagctcacccaatcgcaggacctaatgagctctcacttggaacagaaattgtgggaaagggggatcaggatcaagcccatggtccatctgatacacatcctgaaaaacgaagtcccaccgagaaaccctctctgaagaagaggggaagaaaatccaatgcaagctcctctttaaaagatctatctggaaaaacacaaaagaagacttcagagaagaaattgaaactagattcccatatgatctcaagcaaagctacacaaccgcatggaaatggtattctaactgctgggttgaatcaagggggtgataaacaagattcaagaaacaataggaaatccactgtgggtaaagacgatcataccatgcaagttatagagaaatgctcaacgataaacaagtcttcatctggaggcagtgcacatttgcgacgatgtaatggatctttaacgaagaaattcacatgtgccttttgtcagtgttcagaagacacagaggcttcaggagaaatgactcactactacagaggtgaacctgtctctgcggattttaatggtgggtctaaggtcatacatgttcacaaaaactgtgctgaatgggctccaaatgtatacttcaacgaccttaccatagtgaatcttgatgtggagttgacaagaagccggagaataagttgcagctgctgtgggcttaaaggcgcagcacttggttgttacaataagagttgcaagaatagttttcatgttacgtgtgcaaaactcataccagaatgcagatgggacaatgtaaaatttgtaatgctatgccctttggatgcatccattaagttgccctgtgaagaggctaattcaaaagacaggaaatgcaagcgtactcctaaagaaccactgcactctcagcctaaacaagtatctggaaaagctaacatccgtgagctccatatcaagcagttccatggattttccaagaaattggtcttatcttgctcagggctcacagttgaagagaagactgttattgcagaatttgcggaactgtctggagttacgatctcaaaaaactgggattcaactgttacacatgttattgcatcaatcaatgaaaacggagcctgcaaaaggaccctcaaattcatgatggcaatcttggaggggaaatggatactaaccattgattggattaaggcgtgtatgaaaaatacaaaatatgtaagcgaggagccatatgagatcactatggatgttcatggaatacgagaaggaccttatcttggaagacaaagagctttgaaaaagaagccaaaactttttactggacttaagttttacatcatgggagatttcgagcttgcttacaaaggatatcttcaagatctgattgtagcagcaggaggaacaatcttgcgtaggcggcctgtttcttctgatgataatgaagcttcaacaatcgtagtatttagtgttgagcctagcaagaagaaaactctgacccaaagaagatctgatgctgaagccttggctaaatctgctagagccagagctgcaagcagttcatgggttttggattctattgcaggttgccaaattttagtcttgatataa

SEQ ID NO: 81254 - protein, 1523 aa, Arabidopsis thaliana
  peptide (1)..(1523): Ceres Seq. ID no. 12659030
MSPFSETSVLLLPMVEKCINLLQTYGVSSITKLRQIHAFSIRHGVSISDAELGKHLIFYLVSLPSPPPMSYAHKVFSKIEKPINVFIWNTLIRGYAEIGNSISAFSLYREMRVSGLVEPDTHTYPFLIKAVTTMADVRLGETIHSVVIRSGFGSLIYVQNSLLHLYANCGDVASAYKVFDKMPEKDLVAWNSVINGFAENGKPEEALALYTEMNSKGIKPDGFTIVSLLSACAKIGALTLGKRVHVYMIKVGLTRNLHSSNVLLDLYARCGRVEEAKTLFDEMVDKNSVSWTSLIVGLAVNGFGKEAIELFKYMESTEGLLPCEITFVGILYACSHCGMVKEGFEYFRRMREEYKIEPRIEHFGCMVDLLARAGQVKKAYEYIKSMPMQPNVVIWRTLLGACTVHGDSDLAEFARIQILQLEPNHSGDYVLLSNMYASEQRWSDVQKIRKQMLRDGVKKVPGHSLVEVGNRVHEFLMGDKSHPQSDAIYAKLKEMTGRLRSEGYVPQISNVYVDVEEEEKENAVVYHSEKIAIAFMLISTPERSPITVVKNLRVCADCHLAIKLVSKVYNREIVVRDRSRSKMADTSHLERMGRELKCPICLSLYNSAVSLSCNHVFCNACIVKSMKMDATCPVCKIPYHRREIRGAPHMDSLVSIYKNMEDASGIKLFVSQNNPSPSDKEKQVRDASVEKASDKNRQGSRKGRASKRNEYGKTKEIDVDAPGPIVMKPSSQTKKRVQLLQNLSAESLTKPTESVETAEKPKDYTENTVIRLDEHPSLNKEGNLSPFFWLRDEDDGENSSQRTESDQLLGTTPVNVPSFSDLMDSDHESPSKEDEQQKPNPGDMFDSEMFEWTQRPCSPEILPSPVKAKVLGRDEIDLTQKKLPKVKVASSKCKNRKAGSARNTVARRSIGVSQEDNMESSAAATISEQQDSRGTSGTIIRNDVNTDENVKAKRATRSKAQSTRVQSDLNVSNEADGKQGTKRKRSSIKSSPAHPIAGPNELSLGTEIVGKGDQDQAHGPSDTHPEKRSPTEKPSLKKRGRKSNASSSLKDLSGKTQKKTSEKKLKLDSHMISSKATQPHGNGILTAGLNQGGDKQDSRNNRKSTVGKDDHTMQVIEKCSTINKSSSGGSAHLRRCNGSLTKKFTCAFCQCSEDTEASGEMTHYYRGEPVSADFNGGSKVIHVHKNCAEWAPNVYFNDLTIVNLDVELTRSRRISCSCCGLKGAALGCYNKSCKNSFHVTCAKLIPECRWDNVKFVMLCPLDASIKLPCEEANSKDRKCKRTPKEPLHSQPKQVSGKANIRELHIKQFHGFSKKLVLSCSGLTVEEKTVIAEFAELSGVTISKNWDSTVTHVIASINENGACKRTLKFMMAILEGKWILTIDWIKACMKNTKYVSEEPYEITMDVHGIREGPYLGRQRALKKKPKLFTGLKFYIMGDFELAYKGYLQDLIVAAGGTILRRRPVSSDDNEASTIVVFSVEPSKKKTLTQRRSDAEALAKSARARAASSSWVLDSIAGCQILVLI

SEQ ID NO: 81255 - protein, 1510 aa, Arabidopsis thaliana
  peptide (1)..(1510): Ceres Seq. ID no. 12659031
MVEKCINLLQTYGVSSITKLRQIHAFSIRHGVSISDAELGKHLIFYLVSLPSPPPMSYAHKVFSKIEKPINVFIWNTLIRGYAEIGNSISAFSLYREMRVSGLVEPDTHTYPFLIKAVTTMADVRLGETIHSVVIRSGFGSLIYVQNSLLHLYANCGDVASAYKVFDKMPEKDLVAWNSVINGFAENGKPEEALALYTEMNSKGIKPDGFTIVSLLSACAKIGALTLGKRVHVYMIKVGLTRNLHSSNVLLDLYARCGRVEEAKTLFDEMVDKNSVSWTSLIVGLAVNGFGKEAIELFKYMESTEGLLPCEITFVGILYACSHCGMVKEGFEYFRRMREEYKIEPRIEHFGCMVDLLARAGQVKKAYEYIKSMPMQPNVVIWRTLLGACTVHGDSDLAEFARIQILQLEPNHSGDYVLLSNMYASEQRWSDVQKIRKQMLRDGVKKVPGHSLVEVGNRVHEFLMGDKSHPQSDAIYAKLKEMTGRLRSEGYVPQISNVYVDVEEEEKENAVVYHSEKIAIAFMLISTPERSPITVVKNLRVCADCHLAIKLVSKVYNREIVVRDRSRSKMADTSHLERMGRELKCPICLSLYNSAVSLSCNHVFCNACIVKSMKMDATCPVCKIPYHRREIRGAPHMDSLVSIYKNMEDASGIKLFVSQNNPSPSDKEKQVRDASVEKASDKNRQGSRKGRASKRNEYGKTKEIDVDAPGPIVMKPSSQTKKRVQLLQNLSAESLTKPTESVETAEKPKDYTENTVIRLDEHPSLNKEGNLSPFFWLRDEDDGENSSQRTESDQLLGTTPVNVPSFSDLMDSDHESPSKEDEQQKPNPGDMFDSEMFEWTQRPCSPEILPSPVKAKVLGRDEIDLTQKKLPKVKVASSKCKNRKAGSARNTVARRSIGVSQEDNMESSAAATISEQQDSRGTSGTIIRNDVNTDENVKAKRATRSKAQSTRVQSDLNVSNEADGKQGTKRKRSSIKSSPAHPIAGPNELSLGTEIVGKGDQDQAHGPSDTHPEKRSPTEKPSLKKRGRKSNASSSLKDLSGKTQKKTSEKKLKLDSHMISSKATQPHGNGILTAGLNQGGDKQDSRNNRKSTVGKDDHTMQVIEKCSTINKSSSGGSAHLRRCNGSLTKKFTCAFCQCSEDTEASGEMTHYYRGEPVSADFNGGSKVIHVHKNCAEWAPNVYFNDLTIVNLDVELTRSRRISCSCCGLKGAALGCYNKSCKNSFHVTCAKLIPECRWDNVKFVMLCPLDASIKLPCEEANSKDRKCKRTPKEPLHSQPKQVSGKANIRELHIKQFHGFSKKLVLSCSGLTVEEKTVIAEFAELSGVTISKNWDSTVTHVIASINENGACKRTLKFMMAILEGKWILTIDWIKACMKNTKYVSEEPYEITMDVHGIREGPYLGRQRALKKKPKLFTGLKFYIMGDFELAYKGYLQDLIVAAGGTILRRRPVSSDDNEASTIVVFSVEPSKKKTLTQRRSDAEALAKSARARAASSSWVLDSIAGCQILVLI

SEQ ID NO: 81256 - protein, 1455 aa, Arabidopsis thaliana
  peptide (1)..(1455): Ceres Seq. ID no. 12659032
MSYAHKVFSKIEKPINVFIWNTLIRGYAEIGNSISAFSLYREMRVSGLVEPDTHTYPFLIKAVTTMADVRLGETIHSVVIRSGFGSLIYVQNSLLHLYANCGDVASAYKVFDKMPEKDLVAWNSVINGFAENGKPEEALALYTEMNSKGIKPDGFTIVSLLSACAKIGALTLGKRVHVYMIKVGLTRNLHSSNVLLDLYARCGRVEEAKTLFDEMVDKNSVSWTSLIVGLAVNGFGKEAIELFKYMESTEGLLPCEITFVGILYACSHCGMVKEGFEYFRRMREEYKIEPRIEHFGCMVDLLARAGQVKKAYEYIKSMPMQPNVVIWRTLLGACTVHGDSDLAEFARIQILQLEPNHSGDYVLLSNMYASEQRWSDVQKIRKQMLRDGVKKVPGHSLVEVGNRVHEFLMGDKSHPQSDAIYAKLKEMTGRLRSEGYVPQISNVYVDVEEEEKENAVVYHSEKIAIAFMLISTPERSPITVVKNLRVCADCHLAIKLVSKVYNREIVVRDRSRSKMADTSHLERMGRELKCPICLSLYNSAVSLSCNHVFCNACIVKSMKMDATCPVCKIPYHRREIRGAPHMDSLVSIYKNMEDASGIKLFVSQNNPSPSDKEKQVRDASVEKASDKNRQGSRKGRASKRNEYGKTKEIDVDAPGPIVMKPSSQTKKRVQLLQNLSAESLTKPTESVETAEKPKDYTENTVIRLDEHPSLNKEGNLSPFFWLRDEDDGENSSQRTESDQLLGTTPVNVPSFSDLMDSDHESPSKEDEQQKPNPGDMFDSEMFEWTQRPCSPEILPSPVKAKVLGRDEIDLTQKKLPKVKVASSKCKNRKAGSARNTVARRSIGVSQEDNMESSAAATISEQQDSRGTSGTIIRNDVNTDENVKAKRATRSKAQSTRVQSDLNVSNEADGKQGTKRKRSSIKSSPAHPIAGPNELSLGTEIVGKGDQDQAHGPSDTHPEKRSPTEKPSLKKRGRKSNASSSLKDLSGKTQKKTSEKKLKLDSHMISSKATQPHGNGILTAGLNQGGDKQDSRNNRKSTVGKDDHTMQVIEKCSTINKSSSGGSAHLRRCNGSLTKKFTCAFCQCSEDTEASGEMTHYYRGEPVSADFNGGSKVIHVHKNCAEWAPNVYFNDLTIVNLDVELTRSRRISCSCCGLKGAALGCYNKSCKNSFHVTCAKLIPECRWDNVKFVMLCPLDASIKLPCEEANSKDRKCKRTPKEPLHSQPKQVSGKANIRELHIKQFHGFSKKLVLSCSGLTVEEKTVIAEFAELSGVTISKNWDSTVTHVIASINENGACKRTLKFMMAILEGKWILTIDWIKACMKNTKYVSEEPYEITMDVHGIREGPYLGRQRALKKKPKLFTGLKFYIMGDFELAYKGYLQDLIVAAGGTILRRRPVSSDDNEASTIVVFSVEPSKKKTLTQRRSDAEALAKSARARAASSSWVLDSIAGCQILVLI

SEQ ID NO: 81257 - DNA, 1602 bp, Arabidopsis thaliana
  misc_feature (1)..(1602): Ceres Seq. ID no. 12659040
  misc_feature (1)..(1602): Ortholog of  Ceres SEQ ID NO 13596319 as cited in SEQ ID NO 67933
atgaaggctcgtagtggtcacgagatgaagaagacgttgacgtggtgggatctcatgtggtttggtatcggtgcagtcatcggctctgggatattcgttctcactggactcgaagcacgtaatcattccggtccagccgtcgtgttgtcttacgttgtctctggtgtctccgccatgctctccgtcttttgttacaccgagttcgccgttgagattcccgtcgcaggcggttcttttgcctacttaagagtggagctcggcgacttcatggccttcatcgccgcgggaaacataatcctcgaatacgttgtcggtggagctgccgtggctcgatcgtggacctcttacttcgccactctcttaaaccataaacctgaagacttccgcatcatagttcacaaactcggcgaagactatagccacttagatccaatagccgtcggcgtttgcgccatcatttgtgttttagctgtcgttggcacaaaaggctcctcaagattcaattacattgcttctataatccacatggtcgtgattctctttgttatcatcgccggatttactaaagccgatgtgaaaaactacagcgatttcactccttacggcgttagaggagtgtttaaatccgccgcggttcttttctttgcctatattggatttgatgcggtttcaacgatggctgaggagacaaagaatccagggagagatattcctattggtcttgttggatcgatggtggttactacggtttgttattgtctcatggcggttacgttgtgtcttatgcagccgtatcaacagattgatccggacgcgccattctcggttgcgttttctgccgttggatgggattgggctaagtacattgtcgcctttggggctcttaaaggtatgacgacggttttgttagttggggccattggtcaagctaggtacatgacacacatagcccgagcccatatgatgcctccatggctagctcaagtcaacgcaaagaccggaacaccaattaacgcgaccgtggtaatgcttgccgcgacagctctcatagcattcttcacaaaactgaaaattttagccgatctcttgtctgtttccacacttttcatcttcatgttcgttgctgtggctcttctcgttagaagatattacgtcaccggagaaacatcgacccgtgaccgtaacaagtttttagtgttcttaggtttgattcttgcgtcctctaccgcgactgctgtttattgggctttggaagaagaaggttggattgggtattgcattacggttcctatatggtttctgtctacggttgccatgaagtttcttgtaccgcaagctagggctccgaaaatttggggtgttcctttggttccgtggttgccttctgcttccatcgctattaatatcttccttcttggttccatcgatacaaaatcgttcgttaggtttgcaatctggacaggtattctgctcatatattacgtcttgtttgggttgcacgcaacgtatgatacagctaaggcgacgttgaaggagaagcaggcattgcagaaagctgaggaaggtggtgttgttgctgataattcttgttctgcaacttaa

SEQ ID NO: 81258 - protein, 533 aa, Arabidopsis thaliana
  peptide (1)..(533): Ceres Seq. ID no. 12659041
MKARSGHEMKKTLTWWDLMWFGIGAVIGSGIFVLTGLEARNHSGPAVVLSYVVSGVSAMLSVFCYTEFAVEIPVAGGSFAYLRVELGDFMAFIAAGNIILEYVVGGAAVARSWTSYFATLLNHKPEDFRIIVHKLGEDYSHLDPIAVGVCAIICVLAVVGTKGSSRFNYIASIIHMVVILFVIIAGFTKADVKNYSDFTPYGVRGVFKSAAVLFFAYIGFDAVSTMAEETKNPGRDIPIGLVGSMVVTTVCYCLMAVTLCLMQPYQQIDPDAPFSVAFSAVGWDWAKYIVAFGALKGMTTVLLVGAIGQARYMTHIARAHMMPPWLAQVNAKTGTPINATVVMLAATALIAFFTKLKILADLLSVSTLFIFMFVAVALLVRRYYVTGETSTRDRNKFLVFLGLILASSTATAVYWALEEEGWIGYCITVPIWFLSTVAMKFLVPQARAPKIWGVPLVPWLPSASIAINIFLLGSIDTKSFVRFAIWTGILLIYYVLFGLHATYDTAKATLKEKQALQKAEEGGVVADNSCSAT

SEQ ID NO: 81259 - protein, 525 aa, Arabidopsis thaliana
  peptide (1)..(525): Ceres Seq. ID no. 12659042
MKKTLTWWDLMWFGIGAVIGSGIFVLTGLEARNHSGPAVVLSYVVSGVSAMLSVFCYTEFAVEIPVAGGSFAYLRVELGDFMAFIAAGNIILEYVVGGAAVARSWTSYFATLLNHKPEDFRIIVHKLGEDYSHLDPIAVGVCAIICVLAVVGTKGSSRFNYIASIIHMVVILFVIIAGFTKADVKNYSDFTPYGVRGVFKSAAVLFFAYIGFDAVSTMAEETKNPGRDIPIGLVGSMVVTTVCYCLMAVTLCLMQPYQQIDPDAPFSVAFSAVGWDWAKYIVAFGALKGMTTVLLVGAIGQARYMTHIARAHMMPPWLAQVNAKTGTPINATVVMLAATALIAFFTKLKILADLLSVSTLFIFMFVAVALLVRRYYVTGETSTRDRNKFLVFLGLILASSTATAVYWALEEEGWIGYCITVPIWFLSTVAMKFLVPQARAPKIWGVPLVPWLPSASIAINIFLLGSIDTKSFVRFAIWTGILLIYYVLFGLHATYDTAKATLKEKQALQKAEEGGVVADNSCSAT

SEQ ID NO: 81260 - protein, 515 aa, Arabidopsis thaliana
  peptide (1)..(515): Ceres Seq. ID no. 12659043
MWFGIGAVIGSGIFVLTGLEARNHSGPAVVLSYVVSGVSAMLSVFCYTEFAVEIPVAGGSFAYLRVELGDFMAFIAAGNIILEYVVGGAAVARSWTSYFATLLNHKPEDFRIIVHKLGEDYSHLDPIAVGVCAIICVLAVVGTKGSSRFNYIASIIHMVVILFVIIAGFTKADVKNYSDFTPYGVRGVFKSAAVLFFAYIGFDAVSTMAEETKNPGRDIPIGLVGSMVVTTVCYCLMAVTLCLMQPYQQIDPDAPFSVAFSAVGWDWAKYIVAFGALKGMTTVLLVGAIGQARYMTHIARAHMMPPWLAQVNAKTGTPINATVVMLAATALIAFFTKLKILADLLSVSTLFIFMFVAVALLVRRYYVTGETSTRDRNKFLVFLGLILASSTATAVYWALEEEGWIGYCITVPIWFLSTVAMKFLVPQARAPKIWGVPLVPWLPSASIAINIFLLGSIDTKSFVRFAIWTGILLIYYVLFGLHATYDTAKATLKEKQALQKAEEGGVVADNSCSAT

SEQ ID NO: 81261 - DNA, 2849 bp, Arabidopsis thaliana
  misc_feature (1)..(2849): Ceres Seq. ID no. 12659055
  misc_feature (1)..(2849): Ortholog of  Ceres SEQ ID NO 13600310 as cited in SEQ ID NO 5086
gaaactacaggctcctgcttcagtcacacacttacacacacacaaaaatccccaaattaggaaaaagtaagaatcctagtttctcgacttcgattgagaaggttttcgatttgattctctaagatcttgagaatcaatcggagattttattgtcggtaacccgaatttagggagaagactaccattttgggatttttatgcacttgacgagcgaaaggagaagaaatttgtagcaattttgagtctcggagatggcttctcgcaaccagaatcgtcctcctcgcagtccaaacgccaaaaaggagggtctcggtggcatttcatttgacaagcgaaggaaagtggaaacgcaaggaggtactgggagaagacaagctttttcggctgtgaataaacaagatgtcacgatgaacagcgatgtagggagcattgaagaatgtggtaaagttgactttacaaaagatgaaatattggcgttgctcagtgagagagcaaaagctggaaagtttgatactaaggctaagattgagcaaatgacggatattatcaagaggctgaaggtttgtgtaaaatggttccaacaagctgatgaaacccatgtccaagagaaggaaaatttgaaggtttctttggaatcttcagaacaaaaatacaaccacaaagagttggaggctaggacaaaagaggaagagctacaggccactatctcaaagttggaagagaatgtagtgtcactacatgaaaagcttgcaaaggaggagtctagtacacaggacgccattgaatgtcatagaagagaaaaagaagctagagttgcagctgaaaaagtgcaggcttctctcggagaagaacttgataaagttaaggaagagaaaatggctgccaagcagaaggtgacgtcacttgaggatatgtacaaaaggctgcaagagtacaacacaagtttgcaacaatataacagcaaacttcagactgatcttgaaacagttcgagctgcactcacacgtgctgaaaaagagaagtcaagcatcctggagaatcttagtacacttaggggacacagcaagtcgctgcaggatcaactatcttcaagcagagtgttgcaagatgacgctataaaacagaaggattcattgctttcggaagttactaatcttcggaatgagctccaacaagtccgggatgaccgtgatcgccaagttgtacagtcacagaagctgtctgaggagatcaggaagtaccaggagaatgtcggaaagtcatcgcaagagctagacatcttgacagcaaaatcaggatcgttggaggagacatgttcgttgcagaaggagcgtttaaatatgttagagcagcaattagcaatcgccaatgaaaggcaaaagatggcagatgcatcagtatctcttactaggacagagtttgaggagcagaagcatctactgtgcgaactacaagaccggcttgcagacatggagcatcaactgtgtgagggagagttattgcggaagaagcttcataacactattcttgaattaaaaggaaatatacgtgtcttctgccgagtgcgtcccttgttaccagacgatggaggacgacatgaagcaactgtaatagcctatcctacttcaacagaagcccaaggaagaggtgttgatttggttcagagtgggaacaaacatcctttcacctttgacaaagttttcaaccacgaagcttcccaggaggaagtattctttgaaatatctcaacttgtacagagtgcattggatggctataaggtttgtatctttgcctacggtcagaccggttctggaaagacctacaccatgatgggccggcctgaggcgccagatcagaaaggactgatccctcgatcacttgaacagatattccaagccagtcaatcactcggtgcacaaggctggaagtacaagatgcaggtatcgatgttggagatatataatgagaccatcagagatttgctctctacaaatcgaacaacttctatggacttggtgcgagcagacagtggcacctcaggaaagcaatatacaatcactcatgacgtaaatggacacacccatgtcagcgacttgaccatatttgatgtgtgcagcgttggaaagatatcctcactcttgcagcaggctgctcagagcaggtcagtagggaagactcaaatgaatgagcaatcatctagaagtcatttcgtgtttactatgaggatttcaggtgttaatgagagcaccgaacagcaggtacaaggtgttctcaacctaatagatcttgctggaagcgagaggctatcgaagagtggggcaactggagatcgattaaaagagacacaggctataaacaaaagtttatcagctttgagtgatgtaatatttgcattggctaagaaagaagatcatgttcctttcagaaactcaaagctaacatatctgctccagccttgcctaggaggagattcaaagaccttgatgttcgtaaacatttcgcctgacccaacttctgctggagagtctctttgctcactccggtttgctgctagagtaaatgcgtgtgaaattggtatacctaggcgacaaacttcaacgaagctccttgactctcgcttaagctatggctaaaaatgttcagaagatctgccaattattgattcacaactcttctcttgtgggttttgacacatcaatctcttatcttgtaacctcttaaactcattactaacattttttccggatctttatgatagtagagcagcttgctgtcttagcaatgtggctttctctatgttgtatgagaaacataatcctctgctattcaatgtttaaatgtattttttc

SEQ ID NO: 81262 - protein, 793 aa, Arabidopsis thaliana
  peptide (1)..(793): Ceres Seq. ID no. 12659056
MASRNQNRPPRSPNAKKEGLGGISFDKRRKVETQGGTGRRQAFSAVNKQDVTMNSDVGSIEECGKVDFTKDEILALLSERAKAGKFDTKAKIEQMTDIIKRLKVCVKWFQQADETHVQEKENLKVSLESSEQKYNHKELEARTKEEELQATISKLEENVVSLHEKLAKEESSTQDAIECHRREKEARVAAEKVQASLGEELDKVKEEKMAAKQKVTSLEDMYKRLQEYNTSLQQYNSKLQTDLETVRAALTRAEKEKSSILENLSTLRGHSKSLQDQLSSSRVLQDDAIKQKDSLLSEVTNLRNELQQVRDDRDRQVVQSQKLSEEIRKYQENVGKSSQELDILTAKSGSLEETCSLQKERLNMLEQQLAIANERQKMADASVSLTRTEFEEQKHLLCELQDRLADMEHQLCEGELLRKKLHNTILELKGNIRVFCRVRPLLPDDGGRHEATVIAYPTSTEAQGRGVDLVQSGNKHPFTFDKVFNHEASQEEVFFEISQLVQSALDGYKVCIFAYGQTGSGKTYTMMGRPEAPDQKGLIPRSLEQIFQASQSLGAQGWKYKMQVSMLEIYNETIRDLLSTNRTTSMDLVRADSGTSGKQYTITHDVNGHTHVSDLTIFDVCSVGKISSLLQQAAQSRSVGKTQMNEQSSRSHFVFTMRISGVNESTEQQVQGVLNLIDLAGSERLSKSGATGDRLKETQAINKSLSALSDVIFALAKKEDHVPFRNSKLTYLLQPCLGGDSKTLMFVNISPDPTSAGESLCSLRFAARVNACEIGIPRRQTSTKLLDSRLSYG

SEQ ID NO: 81263 - protein, 741 aa, Arabidopsis thaliana
  peptide (1)..(741): Ceres Seq. ID no. 12659057
MNSDVGSIEECGKVDFTKDEILALLSERAKAGKFDTKAKIEQMTDIIKRLKVCVKWFQQADETHVQEKENLKVSLESSEQKYNHKELEARTKEEELQATISKLEENVVSLHEKLAKEESSTQDAIECHRREKEARVAAEKVQASLGEELDKVKEEKMAAKQKVTSLEDMYKRLQEYNTSLQQYNSKLQTDLETVRAALTRAEKEKSSILENLSTLRGHSKSLQDQLSSSRVLQDDAIKQKDSLLSEVTNLRNELQQVRDDRDRQVVQSQKLSEEIRKYQENVGKSSQELDILTAKSGSLEETCSLQKERLNMLEQQLAIANERQKMADASVSLTRTEFEEQKHLLCELQDRLADMEHQLCEGELLRKKLHNTILELKGNIRVFCRVRPLLPDDGGRHEATVIAYPTSTEAQGRGVDLVQSGNKHPFTFDKVFNHEASQEEVFFEISQLVQSALDGYKVCIFAYGQTGSGKTYTMMGRPEAPDQKGLIPRSLEQIFQASQSLGAQGWKYKMQVSMLEIYNETIRDLLSTNRTTSMDLVRADSGTSGKQYTITHDVNGHTHVSDLTIFDVCSVGKISSLLQQAAQSRSVGKTQMNEQSSRSHFVFTMRISGVNESTEQQVQGVLNLIDLAGSERLSKSGATGDRLKETQAINKSLSALSDVIFALAKKEDHVPFRNSKLTYLLQPCLGGDSKTLMFVNISPDPTSAGESLCSLRFAARVNACEIGIPRRQTSTKLLDSRLSYG

SEQ ID NO: 81264 - protein, 699 aa, Arabidopsis thaliana
  peptide (1)..(699): Ceres Seq. ID no. 12659058
MTDIIKRLKVCVKWFQQADETHVQEKENLKVSLESSEQKYNHKELEARTKEEELQATISKLEENVVSLHEKLAKEESSTQDAIECHRREKEARVAAEKVQASLGEELDKVKEEKMAAKQKVTSLEDMYKRLQEYNTSLQQYNSKLQTDLETVRAALTRAEKEKSSILENLSTLRGHSKSLQDQLSSSRVLQDDAIKQKDSLLSEVTNLRNELQQVRDDRDRQVVQSQKLSEEIRKYQENVGKSSQELDILTAKSGSLEETCSLQKERLNMLEQQLAIANERQKMADASVSLTRTEFEEQKHLLCELQDRLADMEHQLCEGELLRKKLHNTILELKGNIRVFCRVRPLLPDDGGRHEATVIAYPTSTEAQGRGVDLVQSGNKHPFTFDKVFNHEASQEEVFFEISQLVQSALDGYKVCIFAYGQTGSGKTYTMMGRPEAPDQKGLIPRSLEQIFQASQSLGAQGWKYKMQVSMLEIYNETIRDLLSTNRTTSMDLVRADSGTSGKQYTITHDVNGHTHVSDLTIFDVCSVGKISSLLQQAAQSRSVGKTQMNEQSSRSHFVFTMRISGVNESTEQQVQGVLNLIDLAGSERLSKSGATGDRLKETQAINKSLSALSDVIFALAKKEDHVPFRNSKLTYLLQPCLGGDSKTLMFVNISPDPTSAGESLCSLRFAARVNACEIGIPRRQTSTKLLDSRLSYG

SEQ ID NO: 81265 - DNA, 507 bp, Arabidopsis thaliana
  misc_feature (1)..(507): Ceres Seq. ID no. 12659059
  misc_feature (1)..(507): Ortholog of  Ceres SEQ ID NO 13599603 as cited in SEQ ID NO 0
atggcgaggaatgtagggttcttcatctgcatcttgatcctagccatggatgtttcggctggaattctcggcattgaagccgaaatagctcagaacaaggtgaagcatttgaagatgtggatattcgagtgtagagacccgagttacacagccttcaagtacggtttagctgcgtgcatccttttggtgttagcccatgtaacggctaattttcttggtgggtgtctctgtgttgcctcaagacaagaccttgaaaaatcctctgccaataaacagctcgctgtggcttctctgatattcacgtggatcatattggcgattgcattttcgatgttgatagtagggacgatggcaaactcaagatcgagaaaaaactgtgggatatcacaccatcgggttctgtccataggagggatcctctgtttcgttcacggcctctttgctgttgcttattacatctctgcaactgcttcaacacgagaacagacaagcgcaggccacgcttga

SEQ ID NO: 81266 - protein, 168 aa, Arabidopsis thaliana
  peptide (1)..(168): Ceres Seq. ID no. 12659060
MARNVGFFICILILAMDVSAGILGIEAEIAQNKVKHLKMWIFECRDPSYTAFKYGLAACILLVLAHVTANFLGGCLCVASRQDLEKSSANKQLAVASLIFTWIILAIAFSMLIVGTMANSRSRKNCGISHHRVLSIGGILCFVHGLFAVAYYISATASTREQTSAGHA

SEQ ID NO: 81267 - protein, 153 aa, Arabidopsis thaliana
  peptide (1)..(153): Ceres Seq. ID no. 12659061
MDVSAGILGIEAEIAQNKVKHLKMWIFECRDPSYTAFKYGLAACILLVLAHVTANFLGGCLCVASRQDLEKSSANKQLAVASLIFTWIILAIAFSMLIVGTMANSRSRKNCGISHHRVLSIGGILCFVHGLFAVAYYISATASTREQTSAGHA

SEQ ID NO: 81268 - protein, 130 aa, Arabidopsis thaliana
  peptide (1)..(130): Ceres Seq. ID no. 12659062
MWIFECRDPSYTAFKYGLAACILLVLAHVTANFLGGCLCVASRQDLEKSSANKQLAVASLIFTWIILAIAFSMLIVGTMANSRSRKNCGISHHRVLSIGGILCFVHGLFAVAYYISATASTREQTSAGHA

SEQ ID NO: 81269 - DNA, 2550 bp, Arabidopsis thaliana
  misc_feature (1)..(2550): Ceres Seq. ID no. 12659089
  misc_feature (1)..(2550): Ortholog of  Ceres SEQ ID NO 13582534 as cited in SEQ ID NO 57409
  misc_feature (1)..(2550): Ortholog of  Ceres SEQ ID NO 14302384 as cited in SEQ ID NO 67177
  misc_feature (1)..(2550): Ortholog of  Ceres SEQ ID NO 13584744 as cited in SEQ ID NO 69137
atgagattcttccgcaaaacctcactttatctttctctcttcttatacttctttctttatgaatcttccatggctgcaaatacaatcagaagaggcgaatctttaagagacggaatcaatcacaaacctttagtctctccacaaaagacattcgagctaggtttcttcagtcctggaagctctacgcatcgtttcctagggatttggtatgggaacatcgaggataaagctgtggtatgggtagcaaacagagcaactccaatttcagaccaatctggagttctcatgataagcaacgatggtaatctcgtgttattagacgggaagaacatcactgtctggtcttcaaacatcgagtcaagcactaccaacaacaacaacagagtcgtttctatacatgacactgggaactttgttttgtctgaaaccgacacagatagacctatttgggagagtttcaatcacccaacagataccttcttaccgcagatgagagttcgtgtgaatccacaaaccggagacaatcacgcttttgtctcatggagatctgagactgatccttcccctggtaattactcattaggggttgatccctctggagcaccagagattgtgctttgggaagggaacaagacgaggaaatggagaagcgggcaatggaactctgcgatttttaccgggattccgaatatgtctctgttgacgaattatctttacggattcaagctttcatctcctccagatgaaacaggtagcgtgtacttcacgtatgttccttcagatccatcagtgttacttaggtttaaggttctttataatggaaccgaagaggaattgagatggaatgagactttgaagaagtggactaagtttcagtctgagccagatagtgagtgtgatcagtataatcgttgtggcaagtttggtatttgtgatatgaagggctctaatggaatctgtagctgtattcatggttatgagcaagtttctgttgggaattggagtagaggttgtagaagaagaacaccgttgaagtgtgaaaggaacattagtgttggagaggatgagttcttgactttgaaatctgtgaagttgcctgattttgaaattcctgaacataatcttgttgatcctgaggattgcagagagaggtgtctgaggaattgttcttgcaatgcttattctcttgttggtggtattggatgcatgatttggaaccaagatttagtggatttacaacagtttgaagctggtggttcttcgcttcatatccgtcttgctgattccgaagtaggggagaacaggaaaacaaagattgcagtgattgtcgcggttcttgttggtgtgatcttgataggaatctttgctctgcttctatggagattcaagagaaagaaagatgtttcaggagcatattgtggtaagaacaccgatacatcggttgttgttgctgatctgaccaagagcaaagaaactacttcagcgttttcaggatcagtagacataatgattgaagggaaagctgttaacacatccgagttacctgtcttttctctgaatgctatagccatagctactaatgatttctgcaaagaaaatgagcttggaagaggtggattcggaccagtctacaagggtgttctcgaagatggacgtgagatagctgtgaagagattgtctggtaaatcaggacaaggagttgatgaattcaagaatgagattattctcatagcgaagcttcaacatcggaatcttgtgagattacttggatgttgcttcgagggagaagagaaaatgcttgtttatgagtatatgcctaacaagagcttggatttcttcctctttgatgaaacgaaacaagcgttgatagactggaaactgcggttttcgataattgaagggattgcgagaggattgctttatcttcatagagattcaagattgagaatcattcatagagacttgaaggttagcaatgtgttgttagatgcagagatgaatccaaagatctcagattttggtatggcaaggatctttggtggtaaccaaaatgaagctaacacggttcgcgttgttggaacttacggatacatgtctcctgaatacgcgatggaaggacttttctcggtgaaatccgatgtttacagcttcggtgtcttgttgctagagattgtaagtgggaagaggaacacaagtcttcgatcttctgaacatggaagtctcattggttatgcttggtatttgtatactcatgggagatcagaggagcttgtggatcctaagatcagggtcacatgcagtaagcgagaggccttgagatgcatacacgtagcgatgctatgtgttcaagattcggctgcggagagacccaacatggcttcagttttgcttatgttagagagtgacacagcgacgctcgctgcgcctagacaaccaacgtttacttccaccagaagaaactccattgatgtcaactttgctcttgattcgagccaacaatacatcgtttcttctaatgagatcacttcaacggttgttcttggacgataa

SEQ ID NO: 81270 - protein, 849 aa, Arabidopsis thaliana
  peptide (1)..(849): Ceres Seq. ID no. 12659090
MRFFRKTSLYLSLFLYFFLYESSMAANTIRRGESLRDGINHKPLVSPQKTFELGFFSPGSSTHRFLGIWYGNIEDKAVVWVANRATPISDQSGVLMISNDGNLVLLDGKNITVWSSNIESSTTNNNNRVVSIHDTGNFVLSETDTDRPIWESFNHPTDTFLPQMRVRVNPQTGDNHAFVSWRSETDPSPGNYSLGVDPSGAPEIVLWEGNKTRKWRSGQWNSAIFTGIPNMSLLTNYLYGFKLSSPPDETGSVYFTYVPSDPSVLLRFKVLYNGTEEELRWNETLKKWTKFQSEPDSECDQYNRCGKFGICDMKGSNGICSCIHGYEQVSVGNWSRGCRRRTPLKCERNISVGEDEFLTLKSVKLPDFEIPEHNLVDPEDCRERCLRNCSCNAYSLVGGIGCMIWNQDLVDLQQFEAGGSSLHIRLADSEVGENRKTKIAVIVAVLVGVILIGIFALLLWRFKRKKDVSGAYCGKNTDTSVVVADLTKSKETTSAFSGSVDIMIEGKAVNTSELPVFSLNAIAIATNDFCKENELGRGGFGPVYKGVLEDGREIAVKRLSGKSGQGVDEFKNEIILIAKLQHRNLVRLLGCCFEGEEKMLVYEYMPNKSLDFFLFDETKQALIDWKLRFSIIEGIARGLLYLHRDSRLRIIHRDLKVSNVLLDAEMNPKISDFGMARIFGGNQNEANTVRVVGTYGYMSPEYAMEGLFSVKSDVYSFGVLLLEIVSGKRNTSLRSSEHGSLIGYAWYLYTHGRSEELVDPKIRVTCSKREALRCIHVAMLCVQDSAAERPNMASVLLMLESDTATLAAPRQPTFTSTRRNSIDVNFALDSSQQYIVSSNEITSTVVLGR

SEQ ID NO: 81271 - protein, 826 aa, Arabidopsis thaliana
  peptide (1)..(826): Ceres Seq. ID no. 12659091
MAANTIRRGESLRDGINHKPLVSPQKTFELGFFSPGSSTHRFLGIWYGNIEDKAVVWVANRATPISDQSGVLMISNDGNLVLLDGKNITVWSSNIESSTTNNNNRVVSIHDTGNFVLSETDTDRPIWESFNHPTDTFLPQMRVRVNPQTGDNHAFVSWRSETDPSPGNYSLGVDPSGAPEIVLWEGNKTRKWRSGQWNSAIFTGIPNMSLLTNYLYGFKLSSPPDETGSVYFTYVPSDPSVLLRFKVLYNGTEEELRWNETLKKWTKFQSEPDSECDQYNRCGKFGICDMKGSNGICSCIHGYEQVSVGNWSRGCRRRTPLKCERNISVGEDEFLTLKSVKLPDFEIPEHNLVDPEDCRERCLRNCSCNAYSLVGGIGCMIWNQDLVDLQQFEAGGSSLHIRLADSEVGENRKTKIAVIVAVLVGVILIGIFALLLWRFKRKKDVSGAYCGKNTDTSVVVADLTKSKETTSAFSGSVDIMIEGKAVNTSELPVFSLNAIAIATNDFCKENELGRGGFGPVYKGVLEDGREIAVKRLSGKSGQGVDEFKNEIILIAKLQHRNLVRLLGCCFEGEEKMLVYEYMPNKSLDFFLFDETKQALIDWKLRFSIIEGIARGLLYLHRDSRLRIIHRDLKVSNVLLDAEMNPKISDFGMARIFGGNQNEANTVRVVGTYGYMSPEYAMEGLFSVKSDVYSFGVLLLEIVSGKRNTSLRSSEHGSLIGYAWYLYTHGRSEELVDPKIRVTCSKREALRCIHVAMLCVQDSAAERPNMASVLLMLESDTATLAAPRQPTFTSTRRNSIDVNFALDSSQQYIVSSNEITSTVVLGR

SEQ ID NO: 81272 - protein, 754 aa, Arabidopsis thaliana
  peptide (1)..(754): Ceres Seq. ID no. 12659092
MISNDGNLVLLDGKNITVWSSNIESSTTNNNNRVVSIHDTGNFVLSETDTDRPIWESFNHPTDTFLPQMRVRVNPQTGDNHAFVSWRSETDPSPGNYSLGVDPSGAPEIVLWEGNKTRKWRSGQWNSAIFTGIPNMSLLTNYLYGFKLSSPPDETGSVYFTYVPSDPSVLLRFKVLYNGTEEELRWNETLKKWTKFQSEPDSECDQYNRCGKFGICDMKGSNGICSCIHGYEQVSVGNWSRGCRRRTPLKCERNISVGEDEFLTLKSVKLPDFEIPEHNLVDPEDCRERCLRNCSCNAYSLVGGIGCMIWNQDLVDLQQFEAGGSSLHIRLADSEVGENRKTKIAVIVAVLVGVILIGIFALLLWRFKRKKDVSGAYCGKNTDTSVVVADLTKSKETTSAFSGSVDIMIEGKAVNTSELPVFSLNAIAIATNDFCKENELGRGGFGPVYKGVLEDGREIAVKRLSGKSGQGVDEFKNEIILIAKLQHRNLVRLLGCCFEGEEKMLVYEYMPNKSLDFFLFDETKQALIDWKLRFSIIEGIARGLLYLHRDSRLRIIHRDLKVSNVLLDAEMNPKISDFGMARIFGGNQNEANTVRVVGTYGYMSPEYAMEGLFSVKSDVYSFGVLLLEIVSGKRNTSLRSSEHGSLIGYAWYLYTHGRSEELVDPKIRVTCSKREALRCIHVAMLCVQDSAAERPNMASVLLMLESDTATLAAPRQPTFTSTRRNSIDVNFALDSSQQYIVSSNEITSTVVLGR

SEQ ID NO: 81273 - DNA, 2136 bp, Arabidopsis thaliana
  misc_feature (1)..(2136): Ceres Seq. ID no. 12659093
  misc_feature (1)..(2136): Ortholog of  Ceres SEQ ID NO 14312351 as cited in SEQ ID NO 55278
  misc_feature (1)..(2136): Ortholog of  Ceres SEQ ID NO 13584744 as cited in SEQ ID NO 69137
atggaacatgtcagagttatctttttcttctttgcttgtgtcctaaagattgtaccatttatctgcttagcacagaaggataaatatgagtttcctccaggtttcaactgtgtagctagtggaggcaatttcacggccaacagctctttcgctggtaatctcaacggccttgtctcctctctctcgtcactcacatccaaaccttatggcttctacaacctctcttctggagattcatctggagaaagagcttatgcaattggtctttgtagaagagaagtaaaaagagatgattgtctcagctgcattcagatagctgcaagaaacctcatcgagcagtgtccactgacaaatcaagctgttgtgtggtacacacactgtatgtttcgttactcgaacatgataatctatggaagaaaagagacgaccccaactctgtcttttcaagccggtaaaaatatatcagcaaacagagatgagtttgatcgtctgcagatagaactattggacagactcaaagggattgctgcagctggtgggccaaatagaaaatacgctcaagggagcggttcgggtgtggcagggtacccgcaattctacggaagtgcacactgtacgccggatttgtctgaacaggattgtaatgactgtctagtctttggttttgaaaagatcccaggttgttgtgctggtcaggttggtcttaggtggttttttcctagttgtagctacagatttgagacctggcgattctacgagttcgatgccgatctagagcctgatccacctgctattcagcctgctgactccccaacatcagctgcaagaactgagagaacaggaaagggcaaaggtggatctaaagtcattgttgcgatagtcatcccaatagtttttgttgcgttatttgcaatttgcctatgcttgctcttgaagtggaagaagaacaagtctgtaggtagagtcaaaggtaacaaacacaaccttcttcttttggttatcgttatcttgttacaaaaggatgagttctcagattcgttggtagttgactttgaaactctaaaggcagcaacagataacttttcaccagaaaatgaacttggacgtggtgggtttggctcagtttataagggtgtgttctcgggtgggcaagaaatcgcggtgaaaagattatcgtgtacttcaggacaaggagacagtgaattcaagaacgaaattttacttcttgcaaagcttcaacataggaacttggttaggctattaggtttttgcatagaaggacaagaacgaatccttgtctatgagttcatcaagaacgctagtcttgacaatttcatcttcggtaattgttttccgccgttttctccatatgatgatcctaccgttctgttttttctgctctgtgttgatctttacgctgttacagatcttaaaaagcgtcaacttttggattggggagtgcgatacaaaatgataggtggagttgctagaggacttctttatcttcatgaagactctcgttaccggataattcaccgtgatcttaaagctagcaacattcttttggaccaagaaatgaatccgaaaatcgcagattttggattagctaaactctatgacacagaccaaacttcgacacatcgatttacaagcaaaattgcaggaacttacgggtatatggctccagaatacgctatttacggtcaattctcggtgaaaacagacgttttcagcttcggtgtattagtcatagagatcattacgggtaagggaaacaataatggtcgatcaaatgatgacgaagaggcagaaaatctccttagttgggtgtggagatgttggagagaagacattatactaagcgttattgatccgagtctaaccacgggatcaagaagcgagatcttgagatgcatacacattggtcttttatgtgttcaagaaagtccagcgagtagaccaactatggattcggttgctctaatgctcaatagctattcctatactctcccaacgccttcaaggcccgcctttgcgttagagagtgtcatgccttcgatgaatgtttcttcttccacagaaccgttattaatgtccttgaatgatgtcactgtttctgagttatctcctcgttag

SEQ ID NO: 81274 - protein, 711 aa, Arabidopsis thaliana
  peptide (1)..(711): Ceres Seq. ID no. 12659094
MEHVRVIFFFFACVLKIVPFICLAQKDKYEFPPGFNCVASGGNFTANSSFAGNLNGLVSSLSSLTSKPYGFYNLSSGDSSGERAYAIGLCRREVKRDDCLSCIQIAARNLIEQCPLTNQAVVWYTHCMFRYSNMIIYGRKETTPTLSFQAGKNISANRDEFDRLQIELLDRLKGIAAAGGPNRKYAQGSGSGVAGYPQFYGSAHCTPDLSEQDCNDCLVFGFEKIPGCCAGQVGLRWFFPSCSYRFETWRFYEFDADLEPDPPAIQPADSPTSAARTERTGKGKGGSKVIVAIVIPIVFVALFAICLCLLLKWKKNKSVGRVKGNKHNLLLLVIVILLQKDEFSDSLVVDFETLKAATDNFSPENELGRGGFGSVYKGVFSGGQEIAVKRLSCTSGQGDSEFKNEILLLAKLQHRNLVRLLGFCIEGQERILVYEFIKNASLDNFIFGNCFPPFSPYDDPTVLFFLLCVDLYAVTDLKKRQLLDWGVRYKMIGGVARGLLYLHEDSRYRIIHRDLKASNILLDQEMNPKIADFGLAKLYDTDQTSTHRFTSKIAGTYGYMAPEYAIYGQFSVKTDVFSFGVLVIEIITGKGNNNGRSNDDEEAENLLSWVWRCWREDIILSVIDPSLTTGSRSEILRCIHIGLLCVQESPASRPTMDSVALMLNSYSYTLPTPSRPAFALESVMPSMNVSSSTEPLLMSLNDVTVSELSPR

SEQ ID NO: 81275 - protein, 584 aa, Arabidopsis thaliana
  peptide (1)..(584): Ceres Seq. ID no. 12659095
MFRYSNMIIYGRKETTPTLSFQAGKNISANRDEFDRLQIELLDRLKGIAAAGGPNRKYAQGSGSGVAGYPQFYGSAHCTPDLSEQDCNDCLVFGFEKIPGCCAGQVGLRWFFPSCSYRFETWRFYEFDADLEPDPPAIQPADSPTSAARTERTGKGKGGSKVIVAIVIPIVFVALFAICLCLLLKWKKNKSVGRVKGNKHNLLLLVIVILLQKDEFSDSLVVDFETLKAATDNFSPENELGRGGFGSVYKGVFSGGQEIAVKRLSCTSGQGDSEFKNEILLLAKLQHRNLVRLLGFCIEGQERILVYEFIKNASLDNFIFGNCFPPFSPYDDPTVLFFLLCVDLYAVTDLKKRQLLDWGVRYKMIGGVARGLLYLHEDSRYRIIHRDLKASNILLDQEMNPKIADFGLAKLYDTDQTSTHRFTSKIAGTYGYMAPEYAIYGQFSVKTDVFSFGVLVIEIITGKGNNNGRSNDDEEAENLLSWVWRCWREDIILSVIDPSLTTGSRSEILRCIHIGLLCVQESPASRPTMDSVALMLNSYSYTLPTPSRPAFALESVMPSMNVSSSTEPLLMSLNDVTVSELSPR

SEQ ID NO: 81276 - protein, 578 aa, Arabidopsis thaliana
  peptide (1)..(578): Ceres Seq. ID no. 12659096
MIIYGRKETTPTLSFQAGKNISANRDEFDRLQIELLDRLKGIAAAGGPNRKYAQGSGSGVAGYPQFYGSAHCTPDLSEQDCNDCLVFGFEKIPGCCAGQVGLRWFFPSCSYRFETWRFYEFDADLEPDPPAIQPADSPTSAARTERTGKGKGGSKVIVAIVIPIVFVALFAICLCLLLKWKKNKSVGRVKGNKHNLLLLVIVILLQKDEFSDSLVVDFETLKAATDNFSPENELGRGGFGSVYKGVFSGGQEIAVKRLSCTSGQGDSEFKNEILLLAKLQHRNLVRLLGFCIEGQERILVYEFIKNASLDNFIFGNCFPPFSPYDDPTVLFFLLCVDLYAVTDLKKRQLLDWGVRYKMIGGVARGLLYLHEDSRYRIIHRDLKASNILLDQEMNPKIADFGLAKLYDTDQTSTHRFTSKIAGTYGYMAPEYAIYGQFSVKTDVFSFGVLVIEIITGKGNNNGRSNDDEEAENLLSWVWRCWREDIILSVIDPSLTTGSRSEILRCIHIGLLCVQESPASRPTMDSVALMLNSYSYTLPTPSRPAFALESVMPSMNVSSSTEPLLMSLNDVTVSELSPR

SEQ ID NO: 81277 - DNA, 900 bp, Arabidopsis thaliana
  misc_feature (1)..(900): Ceres Seq. ID no. 12659108
  misc_feature (1)..(900): Ortholog of  Ceres SEQ ID NO 13594560 as cited in SEQ ID NO 51329
  misc_feature (1)..(900): Ortholog of  Ceres SEQ ID NO 12613701 as cited in SEQ ID NO 67983
atgagttcgtcgctgcgacagtggtttgctagagtactcgtgcttacacagctcatcaatggagctctgtgttggggaaaagaaggtcactacacagtctgcaaaatagccgagagctactttgaggaagaaactgtagctgcggtgaagaaacttctacctaaatcagctgatggagatctagcatctgtttgctcatggcctgatgagattaagcaccattggcaatggcgatggactagccctttgcactatgttgacacacctgattacagatgcaactacgagtattgtcgggattgccatgatactcataagaatcaagaccggtgtgtgacaggagctattttcaattacactatgcaacttatgtccgcttctgaaaactcggatactatagtccactacaacttgacagaggctctcatgttcttatcacattttattggagatattcaccagcccttgcatgttggttttctgggagatgaaggtggaaacacgataacagtccgctggtaccgtcgcaaaacaaatttacaccatgtctgggataacatgataattgagtctgctcttaaaacatactacaataaaagtcttccactcatgattgaagcacttcaagccaatcttacgaacgactggtcaaatgatgttccattgtgggagtcatgtcaacttaaccaaacggcctgtccaaatccgtacgcatctgaaagcataaatctagcctgcaagtatgcttataggaacgctaccccagggactactttaggagatgactatttcctctctcggttacccattgtggagaagagacttgcgcaaggtgggatacgcttggcagccactcttaaccgtatcttttcttcaaaacctaagcatgctggatcatga

SEQ ID NO: 81278 - protein, 299 aa, Arabidopsis thaliana
  peptide (1)..(299): Ceres Seq. ID no. 12659109
MSSSLRQWFARVLVLTQLINGALCWGKEGHYTVCKIAESYFEEETVAAVKKLLPKSADGDLASVCSWPDEIKHHWQWRWTSPLHYVDTPDYRCNYEYCRDCHDTHKNQDRCVTGAIFNYTMQLMSASENSDTIVHYNLTEALMFLSHFIGDIHQPLHVGFLGDEGGNTITVRWYRRKTNLHHVWDNMIIESALKTYYNKSLPLMIEALQANLTNDWSNDVPLWESCQLNQTACPNPYASESINLACKYAYRNATPGTTLGDDYFLSRLPIVEKRLAQGGIRLAATLNRIFSSKPKHAGS

SEQ ID NO: 81279 - protein, 179 aa, Arabidopsis thaliana
  peptide (1)..(179): Ceres Seq. ID no. 12659110
MQLMSASENSDTIVHYNLTEALMFLSHFIGDIHQPLHVGFLGDEGGNTITVRWYRRKTNLHHVWDNMIIESALKTYYNKSLPLMIEALQANLTNDWSNDVPLWESCQLNQTACPNPYASESINLACKYAYRNATPGTTLGDDYFLSRLPIVEKRLAQGGIRLAATLNRIFSSKPKHAGS

SEQ ID NO: 81280 - protein, 176 aa, Arabidopsis thaliana
  peptide (1)..(176): Ceres Seq. ID no. 12659111
MSASENSDTIVHYNLTEALMFLSHFIGDIHQPLHVGFLGDEGGNTITVRWYRRKTNLHHVWDNMIIESALKTYYNKSLPLMIEALQANLTNDWSNDVPLWESCQLNQTACPNPYASESINLACKYAYRNATPGTTLGDDYFLSRLPIVEKRLAQGGIRLAATLNRIFSSKPKHAGS

SEQ ID NO: 81281 - DNA, 1050 bp, Arabidopsis thaliana
  misc_feature (1)..(1050): Ceres Seq. ID no. 12659112
  misc_feature (1)..(1050): Ortholog of  Ceres SEQ ID NO 14311866 as cited in SEQ ID NO 51178
  misc_feature (1)..(1050): Ortholog of  Ceres SEQ ID NO 13582350 as cited in SEQ ID NO 56734
  misc_feature (1)..(1050): Ortholog of  Ceres SEQ ID NO 12476493 as cited in SEQ ID NO 58163
  misc_feature (1)..(1050): Ortholog of  Ceres SEQ ID NO 12617090 as cited in SEQ ID NO 64005
  misc_feature (1)..(1050): Ortholog of  Ceres SEQ ID NO 13597233 as cited in SEQ ID NO 64370
atgagctctgtcacacagctattcaagaacaaccccgtgaaccgtgaccggatcatcccactagatttcaccaacaccaaaaccctacccgactcccacgtctggtccaaacccgaacccgaaaccacgagcggacccattcccgtcatcagcttgtccaacccggaggaacatgggctactacgacaagcctgtgaggaatggggtgtgtttcatatcacagaccatggagtctcacactcgttactccataacgttgattgccaaatgaagaggcttttctctttacccatgcatcgtaagatcttagccgttcgatctcccgacgagtccactggttacggtgtggttcggatctccatgttctatgataagctcatgtggtctgaaggattctccgtcatgggttcctctcttcgacgtcacgctacactcttatggcccgatgatcatgccgagttctgcaatgtgatggaagagtatcagaaggcaatggatgatttaagtcatagactaataagcatgttgatgggctcgttagggctaacacatgaagatttgggatggcttgtaccagacaaaactggttcaggaactgactcgatccaatcctttctgcagttgaactcctacccggtttgccctgaccctcatctagctatgggtttagcccctcacaccgactcctccctacttaccattctctaccaaggcaatattccaggtctagagattgaaagtccacaagaagaagggtcgagatggattggagtagagccaatagaaggtagtctcgttgttataatgggagatttatctcatatcatatccaatggacagttcagaagtacaatgcaccgtgcggtggtgaacaagacgcaccaccgtgtctcagccgcttatttcgctggccctcccaagaaccttcagatcggaccgttgaccagcgacaagaaccatcctcctatttacaggcgtttgatatgggaagagtaccttgcagccaaagcaacacactttaacaaagccttgactttgttccgttgctga

SEQ ID NO: 81282 - protein, 349 aa, Arabidopsis thaliana
  peptide (1)..(349): Ceres Seq. ID no. 12659113
MSSVTQLFKNNPVNRDRIIPLDFTNTKTLPDSHVWSKPEPETTSGPIPVISLSNPEEHGLLRQACEEWGVFHITDHGVSHSLLHNVDCQMKRLFSLPMHRKILAVRSPDESTGYGVVRISMFYDKLMWSEGFSVMGSSLRRHATLLWPDDHAEFCNVMEEYQKAMDDLSHRLISMLMGSLGLTHEDLGWLVPDKTGSGTDSIQSFLQLNSYPVCPDPHLAMGLAPHTDSSLLTILYQGNIPGLEIESPQEEGSRWIGVEPIEGSLVVIMGDLSHIISNGQFRSTMHRAVVNKTHHRVSAAYFAGPPKNLQIGPLTSDKNHPPIYRRLIWEEYLAAKATHFNKALTLFRC

SEQ ID NO: 81283 - protein, 260 aa, Arabidopsis thaliana
  peptide (1)..(260): Ceres Seq. ID no. 12659114
MKRLFSLPMHRKILAVRSPDESTGYGVVRISMFYDKLMWSEGFSVMGSSLRRHATLLWPDDHAEFCNVMEEYQKAMDDLSHRLISMLMGSLGLTHEDLGWLVPDKTGSGTDSIQSFLQLNSYPVCPDPHLAMGLAPHTDSSLLTILYQGNIPGLEIESPQEEGSRWIGVEPIEGSLVVIMGDLSHIISNGQFRSTMHRAVVNKTHHRVSAAYFAGPPKNLQIGPLTSDKNHPPIYRRLIWEEYLAAKATHFNKALTLFRC

SEQ ID NO: 81284 - protein, 252 aa, Arabidopsis thaliana
  peptide (1)..(252): Ceres Seq. ID no. 12659115
MHRKILAVRSPDESTGYGVVRISMFYDKLMWSEGFSVMGSSLRRHATLLWPDDHAEFCNVMEEYQKAMDDLSHRLISMLMGSLGLTHEDLGWLVPDKTGSGTDSIQSFLQLNSYPVCPDPHLAMGLAPHTDSSLLTILYQGNIPGLEIESPQEEGSRWIGVEPIEGSLVVIMGDLSHIISNGQFRSTMHRAVVNKTHHRVSAAYFAGPPKNLQIGPLTSDKNHPPIYRRLIWEEYLAAKATHFNKALTLFRC

SEQ ID NO: 81285 - DNA, 1608 bp, Arabidopsis thaliana
  misc_feature (1)..(1608): Ceres Seq. ID no. 12659130
  misc_feature (1)..(1608): Ortholog of  Ceres SEQ ID NO 13600220 as cited in SEQ ID NO 0
atgaaaaaatctatagtttatgaaataatggagactaagtcatcaatgtacctttctcagttccgactttggctctgcttcatcatcacaaccttggtctcattgtcatcttcaacaagatggtatgatgatcatatctcattgaaagagattcacgcagaagaaactttccattttccaaaaaactttctctttggcacagcttcttctgcttaccagtatgaaggagcttacttaactgacggcaaaaccctaagcaactgggacgttttcacaaacatctctggaaaaattgcggatggaagccatgggaaagtcgctgttgatcattaccatcgatatccgggagatttggatctgatggaagatcttggagttaatagctatcgactttctttatcatgggctcggattcttccaaagggaagatttggagatgtgaacatgggtggtatcgatcattacaacagaatgatcaatgatattctcaaaacaggaatcgagccatttgtcacgttgacacattacgacattcctcaagaactcgaatatagatacggaagttggctaaacccccaaatccgggaagatttcgaacattacgcaaatatttgcttccgacactttggagacagggttaaattctggtctactttcaacgaaccaaacgttcaagtgattttgggttaccggacaggaacttacccgccttcacgttgttccaagccttttggaaactgctcgtgtggcgattcttacatagagccacttgtagccgctcacaacattatcctttcacatttagccgccgtcaacttataccgtacaaaatttcaggaacaacaaagaggacagatcggtattgttatgaacacaatctggtttgaaccgattagtgattctttagcagatagattagctgctgacagagctcaagctttctatttgacttggttcttggatccggttgtgtttggaagatatccaagagaaatgcgagaaattcttggcgatgatcttcctgaattcacgaaggatgatcttaaaagctccaagaatgcattagacttcattgggattaatcagtacacaagcagatacgcgaaagattgtctgcattccgtatgtgaaccgggcaaaggaggttcgagagctgaaggttttgtctatgcaaacgccctcaaagacggtttacgtttaggagaaccagtaggaatggaggagatgttgatgtatgcaacagagcgatacaaaaacattacattgtatgtaacagaaaacggttttggtgagaacaataccggagtattgttaaacgattaccagagagtgaagttcatgagcaactacttagatgcactcaaaagagcaatgaggaaaggagcagatgtaagaggatacttcgcctggtctttactagacaacttcgagtggatatccggttataccataaggttcggtatgtaccatgtcgatttcagtactcaagagagaaccccgagactgtcagcttcttggtacaaaaacttcatcttccagcacagagctctatcaaaagatgattggtgcctgaaacaaaaggaagacacaaatttctttcttatttga

SEQ ID NO: 81286 - protein, 535 aa, Arabidopsis thaliana
  peptide (1)..(535): Ceres Seq. ID no. 12659131
MKKSIVYEIMETKSSMYLSQFRLWLCFIITTLVSLSSSTRWYDDHISLKEIHAEETFHFPKNFLFGTASSAYQYEGAYLTDGKTLSNWDVFTNISGKIADGSHGKVAVDHYHRYPGDLDLMEDLGVNSYRLSLSWARILPKGRFGDVNMGGIDHYNRMINDILKTGIEPFVTLTHYDIPQELEYRYGSWLNPQIREDFEHYANICFRHFGDRVKFWSTFNEPNVQVILGYRTGTYPPSRCSKPFGNCSCGDSYIEPLVAAHNIILSHLAAVNLYRTKFQEQQRGQIGIVMNTIWFEPISDSLADRLAADRAQAFYLTWFLDPVVFGRYPREMREILGDDLPEFTKDDLKSSKNALDFIGINQYTSRYAKDCLHSVCEPGKGGSRAEGFVYANALKDGLRLGEPVGMEEMLMYATERYKNITLYVTENGFGENNTGVLLNDYQRVKFMSNYLDALKRAMRKGADVRGYFAWSLLDNFEWISGYTIRFGMYHVDFSTQERTPRLSASWYKNFIFQHRALSKDDWCLKQKEDTNFFLI

SEQ ID NO: 81287 - protein, 526 aa, Arabidopsis thaliana
  peptide (1)..(526): Ceres Seq. ID no. 12659132
METKSSMYLSQFRLWLCFIITTLVSLSSSTRWYDDHISLKEIHAEETFHFPKNFLFGTASSAYQYEGAYLTDGKTLSNWDVFTNISGKIADGSHGKVAVDHYHRYPGDLDLMEDLGVNSYRLSLSWARILPKGRFGDVNMGGIDHYNRMINDILKTGIEPFVTLTHYDIPQELEYRYGSWLNPQIREDFEHYANICFRHFGDRVKFWSTFNEPNVQVILGYRTGTYPPSRCSKPFGNCSCGDSYIEPLVAAHNIILSHLAAVNLYRTKFQEQQRGQIGIVMNTIWFEPISDSLADRLAADRAQAFYLTWFLDPVVFGRYPREMREILGDDLPEFTKDDLKSSKNALDFIGINQYTSRYAKDCLHSVCEPGKGGSRAEGFVYANALKDGLRLGEPVGMEEMLMYATERYKNITLYVTENGFGENNTGVLLNDYQRVKFMSNYLDALKRAMRKGADVRGYFAWSLLDNFEWISGYTIRFGMYHVDFSTQERTPRLSASWYKNFIFQHRALSKDDWCLKQKEDTNFFLI

SEQ ID NO: 81288 - protein, 520 aa, Arabidopsis thaliana
  peptide (1)..(520): Ceres Seq. ID no. 12659133
MYLSQFRLWLCFIITTLVSLSSSTRWYDDHISLKEIHAEETFHFPKNFLFGTASSAYQYEGAYLTDGKTLSNWDVFTNISGKIADGSHGKVAVDHYHRYPGDLDLMEDLGVNSYRLSLSWARILPKGRFGDVNMGGIDHYNRMINDILKTGIEPFVTLTHYDIPQELEYRYGSWLNPQIREDFEHYANICFRHFGDRVKFWSTFNEPNVQVILGYRTGTYPPSRCSKPFGNCSCGDSYIEPLVAAHNIILSHLAAVNLYRTKFQEQQRGQIGIVMNTIWFEPISDSLADRLAADRAQAFYLTWFLDPVVFGRYPREMREILGDDLPEFTKDDLKSSKNALDFIGINQYTSRYAKDCLHSVCEPGKGGSRAEGFVYANALKDGLRLGEPVGMEEMLMYATERYKNITLYVTENGFGENNTGVLLNDYQRVKFMSNYLDALKRAMRKGADVRGYFAWSLLDNFEWISGYTIRFGMYHVDFSTQERTPRLSASWYKNFIFQHRALSKDDWCLKQKEDTNFFLI

SEQ ID NO: 81289 - DNA, 1459 bp, Arabidopsis thaliana
  misc_feature (1)..(1459): Ceres Seq. ID no. 12659134
  misc_feature (1)..(1459): Ortholog of  Ceres SEQ ID NO 14303423 as cited in SEQ ID NO 54243
  misc_feature (1)..(1459): Ortholog of  Ceres SEQ ID NO 12611314 as cited in SEQ ID NO 56535
  misc_feature (1)..(1459): Ortholog of  Ceres SEQ ID NO 14312016 as cited in SEQ ID NO 60412
  misc_feature (1)..(1459): Ortholog of  Ceres SEQ ID NO 13661438 as cited in SEQ ID NO 61414
aattcacctgagaaaaacaatatcaatcggctcgttttctctcctcagtgtttcttcagtagtcctgcgagatcgtataagagattcgaaaccctaatctatcaatttgatcctgtccattctctgttattgtttgagaattgtgcaatccgatggggacgatgcaccggagtggtgctcccagaaggacaaatgaaaatgcgaagcttatcataacgacaatcgtgggagtggtgtttggtttttttgttggtatcacattaccattaggttcctttagaaagattagcttaccttcaggccttatgtcatctcttgatgtagccatgtcagatgggaaattgttttctggtggcagatcacctgaagatattggttcaagaaagtctcctaagatatatgttccaaccaatccgcatggtgcagaactacttcctcctgggattatagtggcagaaacagatttctacttgcgccgattatggggtgaacctagtgaagatttgaagaagaagccaaagtatctcgtaacttttacagttggatttgagcagagaaacaacattaatgcagctgttaagaagttttctgaagatttccaaatattgttattccattatgatggccgaacaactgagtgggaccagtttgagtggtctaaaaatgcaatacatatcagtgcaaaaaagcaaacaaaatggtggtatgcaaagagatttttgcatcctgatgttgtctcagcttatgagtatatatttatatgggatgaagatcttggagtcgagcacttcaatgcagataggtacgttgagttagttaagaagcatggtttggagatttctcaaccaggcttagagccaaacaacggacttacatgggaaatgacaaagaggagaggtgaccgagatgtccacaaagaaactaaggaaaaaccaggatggtgcagtgatccacatttacctccatgtgctgcgtttgttgagattatggcacctgtattttctagagaagcatggcgatgtgtatggcatatgattcagaatgatcttgttcatggatggggtctcgattttgctctcagacgatgcgttgagcctgctcatgagaagattggtgtggtagattcacagtggattatccatcaagtgattccttcccttggaagtcagggtgagtcggaggaggggaaatctccatggcaaggggtgagggagagatgcagaaacgaatggacgatgttccagaatcgcgtggcagaagctgataaagcatacatggaacaacacaaggtaaaagaataatttgggcctcttcttactctgtctctgtaaatgaagcttacgtttccctgatcaagtgagtgtgaggagagagatctatgtagtcccctatttagtttaaaacatctcagatatatctacattattagctttttacctaatatatttcttattccctg

SEQ ID NO: 81290 - protein, 382 aa, Arabidopsis thaliana
  peptide (1)..(382): Ceres Seq. ID no. 12659135
MGTMHRSGAPRRTNENAKLIITTIVGVVFGFFVGITLPLGSFRKISLPSGLMSSLDVAMSDGKLFSGGRSPEDIGSRKSPKIYVPTNPHGAELLPPGIIVAETDFYLRRLWGEPSEDLKKKPKYLVTFTVGFEQRNNINAAVKKFSEDFQILLFHYDGRTTEWDQFEWSKNAIHISAKKQTKWWYAKRFLHPDVVSAYEYIFIWDEDLGVEHFNADRYVELVKKHGLEISQPGLEPNNGLTWEMTKRRGDRDVHKETKEKPGWCSDPHLPPCAAFVEIMAPVFSREAWRCVWHMIQNDLVHGWGLDFALRRCVEPAHEKIGVVDSQWIIHQVIPSLGSQGESEEGKSPWQGVRERCRNEWTMFQNRVAEADKAYMEQHKVKE

SEQ ID NO: 81291 - protein, 379 aa, Arabidopsis thaliana
  peptide (1)..(379): Ceres Seq. ID no. 12659136
MHRSGAPRRTNENAKLIITTIVGVVFGFFVGITLPLGSFRKISLPSGLMSSLDVAMSDGKLFSGGRSPEDIGSRKSPKIYVPTNPHGAELLPPGIIVAETDFYLRRLWGEPSEDLKKKPKYLVTFTVGFEQRNNINAAVKKFSEDFQILLFHYDGRTTEWDQFEWSKNAIHISAKKQTKWWYAKRFLHPDVVSAYEYIFIWDEDLGVEHFNADRYVELVKKHGLEISQPGLEPNNGLTWEMTKRRGDRDVHKETKEKPGWCSDPHLPPCAAFVEIMAPVFSREAWRCVWHMIQNDLVHGWGLDFALRRCVEPAHEKIGVVDSQWIIHQVIPSLGSQGESEEGKSPWQGVRERCRNEWTMFQNRVAEADKAYMEQHKVKE

SEQ ID NO: 81292 - protein, 331 aa, Arabidopsis thaliana
  peptide (1)..(331): Ceres Seq. ID no. 12659137
MSSLDVAMSDGKLFSGGRSPEDIGSRKSPKIYVPTNPHGAELLPPGIIVAETDFYLRRLWGEPSEDLKKKPKYLVTFTVGFEQRNNINAAVKKFSEDFQILLFHYDGRTTEWDQFEWSKNAIHISAKKQTKWWYAKRFLHPDVVSAYEYIFIWDEDLGVEHFNADRYVELVKKHGLEISQPGLEPNNGLTWEMTKRRGDRDVHKETKEKPGWCSDPHLPPCAAFVEIMAPVFSREAWRCVWHMIQNDLVHGWGLDFALRRCVEPAHEKIGVVDSQWIIHQVIPSLGSQGESEEGKSPWQGVRERCRNEWTMFQNRVAEADKAYMEQHKVKE

SEQ ID NO: 81293 - DNA, 1419 bp, Arabidopsis thaliana
  misc_feature (1)..(1419): Ceres Seq. ID no. 12659210
  misc_feature (1)..(1419): Ortholog of  Ceres SEQ ID NO 13664220 as cited in SEQ ID NO 61151
  misc_feature (1)..(1419): Ortholog of  Ceres SEQ ID NO 13597477 as cited in SEQ ID NO 65160
aaccagaaaagtgtactctactgcaactacttcttctctacttctctaccttaaaacttccccaaccattttcttcttcaaatcatcatcatcatccctcgtacaaagaaaatggccatgagcatactcgcgaagatctttctcgtctttgccatctattgcgctatcgatcccttcagtcacagctccatttccaagttcccggatttcaaaacttacaagattgacatgcctccgttatcgtcacttccaaaggagagagaccgccagaatctgttgcagaattcagagatcaggtttcttaacgaggttcaaggtcccgagagcattgctttcgatccgcaaggtcgtggtccttataccggagtcgccgacggtcgaattctcttttggaatggcactcgttggacagatttcgcatatacttcgaacaatcggtcagagctatgtgatcctaagccatcgcttttggattacttaaaggatgaagatatctgtggtcggcctttaggtcttcgattcgacaagaaaaatggggatttgtacattgcagatgcgtatttggggataatgaaagttggtccggaaggaggtttagcaacttctgttacaaacgaggctgatggtgtgcctttgagatttaccaatgatcttgacattgatgatgaaggcaatgtttactttactgatagcagctctttcttccaacgaaggaaatttatgcttttgattgtctcgggggaagacagtgggagggtgttgaaatacaatccaaaaacaaaggagactaccactctcgtgagaaatctccagtttcctaacggattatccctcggcaaagacggctcctttttcatcttttgtgaaggatctattggaagattacggaaatactggttgaaaggggagaaagctggaacgtcagaagtggtagctctattacatgggttcccagacaacatccgcacaaacaaagatggagatttctgggtggcggtgcactgccacagaaacatattcacacacttgatggcgcattacccgagggtgaggaagttctttctgaagctgccgatatcagtgaagtttcagtacttgctgcaggtaggtggttggcctcatgctgtagctgtgaagtacagtgaagaagggaaagtgctaaaggtgttggaagatagtaaagggaaagtggtgaaggcagtgagtgaagtggaggagaaagatgggaagctttggatgggaagtgtattgatgtccttcattgccgtatatgacttgccttagttcgtttctttttctattcaaatttgtatatttctagtttggctatgggattgcaatatgcatctcgttatcaaactatatttgacgtaatcaattcaaacacaaacaattactaaatacagtatcctttttgcc

SEQ ID NO: 81294 - protein, 390 aa, Arabidopsis thaliana
  peptide (1)..(390): Ceres Seq. ID no. 12659211
MAMSILAKIFLVFAIYCAIDPFSHSSISKFPDFKTYKIDMPPLSSLPKERDRQNLLQNSEIRFLNEVQGPESIAFDPQGRGPYTGVADGRILFWNGTRWTDFAYTSNNRSELCDPKPSLLDYLKDEDICGRPLGLRFDKKNGDLYIADAYLGIMKVGPEGGLATSVTNEADGVPLRFTNDLDIDDEGNVYFTDSSSFFQRRKFMLLIVSGEDSGRVLKYNPKTKETTTLVRNLQFPNGLSLGKDGSFFIFCEGSIGRLRKYWLKGEKAGTSEVVALLHGFPDNIRTNKDGDFWVAVHCHRNIFTHLMAHYPRVRKFFLKLPISVKFQYLLQVGGWPHAVAVKYSEEGKVLKVLEDSKGKVVKAVSEVEEKDGKLWMGSVLMSFIAVYDLP

SEQ ID NO: 81295 - protein, 388 aa, Arabidopsis thaliana
  peptide (1)..(388): Ceres Seq. ID no. 12659212
MSILAKIFLVFAIYCAIDPFSHSSISKFPDFKTYKIDMPPLSSLPKERDRQNLLQNSEIRFLNEVQGPESIAFDPQGRGPYTGVADGRILFWNGTRWTDFAYTSNNRSELCDPKPSLLDYLKDEDICGRPLGLRFDKKNGDLYIADAYLGIMKVGPEGGLATSVTNEADGVPLRFTNDLDIDDEGNVYFTDSSSFFQRRKFMLLIVSGEDSGRVLKYNPKTKETTTLVRNLQFPNGLSLGKDGSFFIFCEGSIGRLRKYWLKGEKAGTSEVVALLHGFPDNIRTNKDGDFWVAVHCHRNIFTHLMAHYPRVRKFFLKLPISVKFQYLLQVGGWPHAVAVKYSEEGKVLKVLEDSKGKVVKAVSEVEEKDGKLWMGSVLMSFIAVYDLP

SEQ ID NO: 81296 - protein, 351 aa, Arabidopsis thaliana
  peptide (1)..(351): Ceres Seq. ID no. 12659213
MPPLSSLPKERDRQNLLQNSEIRFLNEVQGPESIAFDPQGRGPYTGVADGRILFWNGTRWTDFAYTSNNRSELCDPKPSLLDYLKDEDICGRPLGLRFDKKNGDLYIADAYLGIMKVGPEGGLATSVTNEADGVPLRFTNDLDIDDEGNVYFTDSSSFFQRRKFMLLIVSGEDSGRVLKYNPKTKETTTLVRNLQFPNGLSLGKDGSFFIFCEGSIGRLRKYWLKGEKAGTSEVVALLHGFPDNIRTNKDGDFWVAVHCHRNIFTHLMAHYPRVRKFFLKLPISVKFQYLLQVGGWPHAVAVKYSEEGKVLKVLEDSKGKVVKAVSEVEEKDGKLWMGSVLMSFIAVYDLP

SEQ ID NO: 81297 - DNA, 3416 bp, Arabidopsis thaliana
  misc_feature (1)..(3416): Ceres Seq. ID no. 12659214
  misc_feature (1)..(3416): Ortholog of  Ceres SEQ ID NO 14303870 as cited in SEQ ID NO 53632
agttgcacaaaaatgccataaaactagccaaaaagtgaagaaatagaggagaaaaatggcgatccctcgacttttcttcctcttctattacattggtttcgctcttttcccttttgtttcttctgaaacatttcaaaactccgaacaagagatcttgttggccttcaagtcagacctttttgatccttcaaataatctccaagattggaagagacctgagaatgccacaacattttctgagttggttcattgtcattggacaggagttcactgtgatgcaaatggctatgtggctaagcttcttctctccaacatgaatctcagcggaaacgtgtcagatcagattcagagcttcccttctctgcaagcccttgatctcagcaataacgcatttgagtcttctcttcctaaatctctttctaatctcacgtctttgaaggtcattgatgtgagtgtgaacagcttctttggaaccttcccttatggtctaggaatggcaactggtcttacacacgtcaatgcctcaagcaacaatttttcggggtttctacctgaagatcttggcaacgcaactacacttgaggttttggactttcgaggaggttacttcgagggctcagtgccttcttctttcaagaatctcaagaatctgaagtttctcggtctttcgggtaacaactttggtggaaaggtaccgaaggtgattggtgagctctcttccttggagaccattattcttggttacaatggcttcatgggtgagattccagaagagtttgggaaattgacgcgccttcagtaccttgatttggctgttggaaaccttacaggccagattccatcttctttggggcagctgaaacaacttacaacagtttatctctaccagaaccgtctcacagggaaacttcctcgagaacttggtggtatgacttctcttgtgtttcttgatctgtctgataaccagatcacaggagaaatacctatggaagtaggtgagttgaagaatctgcagcttctaaatttgatgaggaatcaactcacgggaatcattccgtcaaaaattgctgaattaccaaaccttgaggttcttgagctgtggcagaactctctcatgggttcattaccggtgcatctcggcaaaaattccccattgaagtggttagacgtctcatcaaacaagctttcaggagatataccatcaggattgtgctattccagaaacctcacaaagctcattctcttcaacaactcattctcaggtcagattccggaggaaatcttctcatgtccgactttagttcgtgttcgaatccagaaaaatcacatttccggatctataccagctggttcaggtgacttaccaatgcttcagcatctagagctcgcaaaaaacaacctcaccggtaaaattccagatgatatagccttatccacatcactctcatttatagacatatcatttaatcatctctcatccctatcttcctccattttctcaagtcctaatcttcaaaccttcattgcctcacataacaactttgccggaaaaattcctaaccagattcaagatcgtccatctttgtctgtcctcgatctttccttcaaccatttctcaggtggaatcccagaaaggatcgcttcttttgaaaaacttgtgagtctaaatctcaagagcaaccaattggttggagaaatccctaaggcattagccgggatgcacatgttagctgttcttgatctctcaaacaactctttgacggggaatataccagcggacttgggagcttctccaacactggagatgttaaacgtgtcattcaacaaactcgacggacccattccttcaaacatgctgtttgcagccatagacccaaaagacctcgtgggaaacaatggcttatgcggtggagttctaccaccttgctctaagagcctagctttgtcagcaaaaggccgaaatccagggagaattcacgtgaatcacgcagtcttcgggttcattgttggaacttcagtcatcgtggctatggggatgatgttcttggcagggagatggatatacacaagatgggatctttacagcaactttgctagagagtatatattctgcaagaaacctcgggaggaatggccatggagactcgtggctttccagagactgtgcttcactgcaggagacatcttatcacatatcaaagaatcaaacatcattggaatgggagccatagggattgtttacaaagcagaagtcatgagacggccattactcactgtagctgtgaaaaaactgtggagatcaccatcaccacaaaatgatatcgaagatcatcatcaagaagaagatgaagaggacgacatactcagagaagtgaacctacttggtggtctacgacatagaaacattgtgaagattctaggttacgttcacaacgagagagaagtgatgatggtatacgagtacatgcccaatggaaacctaggaactgctttgcattccaaagatgagaaattcttactaagagattggctctcacgatacaatgtcgccgtcggagtcgttcaaggtctcaattacttgcacaacgattgctatcctccgatcattcacagagacatcaagtctaataacatcctcctcgattcaaaccttgaagcgaggatagcagatttcggattggcgaagatgatgcttcataagaacgagaccgtttctatggtggctggatcttacgggtatatagcgccggagtacggatacacactgaagattgacgaaaagagtgatatatacagtctaggcgttgtgcttctggaattggtgactgggaaaatgccgatagatccttcgtttgaggattcgattgacgtggttgagtggattcggaggaaggtgaagaagaacgagagcttggaagaagtgatcgacgcgagcatcgccggagattgtaaacacgtgatcgaagagatgctcctggcactgcgaatcgctcttctctgcaccgcgaagctaccgaaggatagaccatcgattagagacgtcatcacaatgctcgcggaggcgaagccacgccggaaaagtgtttgccaagtcgccggggatttgccgattttcagaaactcgccagtggtagggctgatttagatgacggaggcgataagggtagttttgtcatttcatcagctggggctaattttaacattgggctaacaagttaactttgggctgaatcaaaaacccatgttttcaaatctgatgggtgcactaaagcccattgaaccaaatgacatgattcaaaattgtaataggccccttgttgatggctgatccagcaaattgtagttaccagaggctaaaaaaataataaataaagattttaattagttttgttttaatggaatattaatctttcaat

SEQ ID NO: 81298 - protein, 1029 aa, Arabidopsis thaliana [sequence omitted]

SEQ ID NO: 81299 - protein, 943 aa, Arabidopsis thaliana
  peptide (1)..(943): Ceres Seq. ID no. 12659216
MNLSGNVSDQIQSFPSLQALDLSNNAFESSLPKSLSNLTSLKVIDVSVNSFFGTFPYGLGMATGLTHVNASSNNFSGFLPEDLGNATTLEVLDFRGGYFEGSVPSSFKNLKNLKFLGLSGNNFGGKVPKVIGELSSLETIILGYNGFMGEIPEEFGKLTRLQYLDLAVGNLTGQIPSSLGQLKQLTTVYLYQNRLTGKLPRELGGMTSLVFLDLSDNQITGEIPMEVGELKNLQLLNLMRNQLTGIIPSKIAELPNLEVLELWQNSLMGSLPVHLGKNSPLKWLDVSSNKLSGDIPSGLCYSRNLTKLILFNNSFSGQIPEEIFSCPTLVRVRIQKNHISGSIPAGSGDLPMLQHLELAKNNLTGKIPDDIALSTSLSFIDISFNHLSSLSSSIFSSPNLQTFIASHNNFAGKIPNQIQDRPSLSVLDLSFNHFSGGIPERIASFEKLVSLNLKSNQLVGEIPKALAGMHMLAVLDLSNNSLTGNIPADLGASPTLEMLNVSFNKLDGPIPSNMLFAAIDPKDLVGNNGLCGGVLPPCSKSLALSAKGRNPGRIHVNHAVFGFIVGTSVIVAMGMMFLAGRWIYTRWDLYSNFAREYIFCKKPREEWPWRLVAFQRLCFTAGDILSHIKESNIIGMGAIGIVYKAEVMRRPLLTVAVKKLWRSPSPQNDIEDHHQEEDEEDDILREVNLLGGLRHRNIVKILGYVHNEREVMMVYEYMPNGNLGTALHSKDEKFLLRDWLSRYNVAVGVVQGLNYLHNDCYPPIIHRDIKSNNILLDSNLEARIADFGLAKMMLHKNETVSMVAGSYGYIAPEYGYTLKIDEKSDIYSLGVVLLELVTGKMPIDPSFEDSIDVVEWIRRKVKKNESLEEVIDASIAGDCKHVIEEMLLALRIALLCTAKLPKDRPSIRDVITMLAEAKPRRKSVCQVAGDLPIFRNSPVVGLI

SEQ ID NO: 81300 - protein, 883 aa, Arabidopsis thaliana
  peptide (1)..(883): Ceres Seq. ID no. 12659217
MATGLTHVNASSNNFSGFLPEDLGNATTLEVLDFRGGYFEGSVPSSFKNLKNLKFLGLSGNNFGGKVPKVIGELSSLETIILGYNGFMGEIPEEFGKLTRLQYLDLAVGNLTGQIPSSLGQLKQLTTVYLYQNRLTGKLPRELGGMTSLVFLDLSDNQITGEIPMEVGELKNLQLLNLMRNQLTGIIPSKIAELPNLEVLELWQNSLMGSLPVHLGKNSPLKWLDVSSNKLSGDIPSGLCYSRNLTKLILFNNSFSGQIPEEIFSCPTLVRVRIQKNHISGSIPAGSGDLPMLQHLELAKNNLTGKIPDDIALSTSLSFIDISFNHLSSLSSSIFSSPNLQTFIASHNNFAGKIPNQIQDRPSLSVLDLSFNHFSGGIPERIASFEKLVSLNLKSNQLVGEIPKALAGMHMLAVLDLSNNSLTGNIPADLGASPTLEMLNVSFNKLDGPIPSNMLFAAIDPKDLVGNNGLCGGVLPPCSKSLALSAKGRNPGRIHVNHAVFGFIVGTSVIVAMGMMFLAGRWIYTRWDLYSNFAREYIFCKKPREEWPWRLVAFQRLCFTAGDILSHIKESNIIGMGAIGIVYKAEVMRRPLLTVAVKKLWRSPSPQNDIEDHHQEEDEEDDILREVNLLGGLRHRNIVKILGYVHNEREVMMVYEYMPNGNLGTALHSKDEKFLLRDWLSRYNVAVGVVQGLNYLHNDCYPPIIHRDIKSNNILLDSNLEARIADFGLAKMMLHKNETVSMVAGSYGYIAPEYGYTLKIDEKSDIYSLGVVLLELVTGKMPIDPSFEDSIDVVEWIRRKVKKNESLEEVIDASIAGDCKHVIEEMLLALRIALLCTAKLPKDRPSIRDVITMLAEAKPRRKSVCQVAGDLPIFRNSPVVGLI

SEQ ID NO: 81301 - DNA, 1680 bp, Arabidopsis thaliana
  misc_feature (1)..(1680): Ceres Seq. ID no. 12659222
  misc_feature (1)..(1680): Ortholog of  Ceres SEQ ID NO 13657677 as cited in SEQ ID NO 66119
atggcttcgtcgaatttgctacttgaggttcagttcttgcatattcctagtctgtctcaaaagcaggcgaatcctttatcttgcagaaagttttcttctttagattggaagcaagaaattgggctgaaaaaggatgttttttttagatgtcacggcttgttaagtagtgtgtgcattgacaatgtaaatgatcatgctgagagaagctcagagttccatcactatggtgtcggtactaacttgagagccagagtgaaacctatgaagcaatttggtttatcatctgatggaccaattacagagaacgacgaagagaccaacaatgagatccttcataacctgtgcagcaatgggaagttaacagatgcgtgcaaacttgtcgaggtgatggcacgacataatcaggttcctcattttccttcttgctcaaacttagtccgtggtctagccagaattgatcaactggataaagcaatgtgtatcttgagagtaatggtaatgtctggtggggttccagatactattacctataacatgatcatcggaaatctttgcaagaaagggcatataagaactgctttggtcctcttagaagatatgagtttgagtgggagccctcctgatgtgatcacgtataacacagtgattcggtgtatgtttgattatgggaatgctgagcaagccatcaggttttggaaggatcaactgcagaatggttgccctccatttatgattacatacacggttttggtcgaactcgtgtgcaggtactgtggaagcgctcgagctatagaagttttagaagacatggcagtggaaggttgctatcctgacattgtcacatataattctctggttaactataactgcaggcgagggaatttggaagaggtggcttcggttattcagcatatcttatctcatggattggaactgaacactgtaacttacaacactcttctacattccctctgttcccacgagtactgggatgaagtggaggagattctaaacatcatgtaccagacgtcctactgtccaactgttattacttacaacatcctgattaatggtttatgcaaagccaggcttttgagtcgtgcaattgatttcttctaccaaatgctggaacagaagtgtttgcctgatatagtcacttacaacacagttctcggagccatgtccaaagagggcatggtagatgatgcgattgagttgcttggattgctgaaaaacacatgttgtccgccgggcttgatcacttacaactctgtaatcgatggattggctaaaaagggcctgatgaagaaagcattggagctgtaccatcagatgctggatgctggaatctttccggatgatataactcgtcggtctttaatatatggtttctgccgggcaaacctagttgaagaagctggccaagttttaaaggagacgagcaatagagggaatgggatcagaggtagcacttacaggttggtgatccaagggctgtgcaagaagaaagagatagaaatggcgatagaggttgttgagataatgctaacaggtgggtgtaagccagatgagacaatatacaccgcaatagttaaaggcgtggaagagatgggaatgggaagcgaggctgttcagttgcagaagaaactgaagcaatggaaactcttgaaagaagtgtag

SEQ ID NO: 81302 - protein, 559 aa, Arabidopsis thaliana
  peptide (1)..(559): Ceres Seq. ID no. 12659223
MASSNLLLEVQFLHIPSLSQKQANPLSCRKFSSLDWKQEIGLKKDVFFRCHGLLSSVCIDNVNDHAERSSEFHHYGVGTNLRARVKPMKQFGLSSDGPITENDEETNNEILHNLCSNGKLTDACKLVEVMARHNQVPHFPSCSNLVRGLARIDQLDKAMCILRVMVMSGGVPDTITYNMIIGNLCKKGHIRTALVLLEDMSLSGSPPDVITYNTVIRCMFDYGNAEQAIRFWKDQLQNGCPPFMITYTVLVELVCRYCGSARAIEVLEDMAVEGCYPDIVTYNSLVNYNCRRGNLEEVASVIQHILSHGLELNTVTYNTLLHSLCSHEYWDEVEEILNIMYQTSYCPTVITYNILINGLCKARLLSRAIDFFYQMLEQKCLPDIVTYNTVLGAMSKEGMVDDAIELLGLLKNTCCPPGLITYNSVIDGLAKKGLMKKALELYHQMLDAGIFPDDITRRSLIYGFCRANLVEEAGQVLKETSNRGNGIRGSTYRLVIQGLCKKKEIEMAIEVVEIMLTGGCKPDETIYTAIVKGVEEMGMGSEAVQLQKKLKQWKLLKEV

SEQ ID NO: 81303 - protein, 472 aa, Arabidopsis thaliana
  peptide (1)..(472): Ceres Seq. ID no. 12659224
MKQFGLSSDGPITENDEETNNEILHNLCSNGKLTDACKLVEVMARHNQVPHFPSCSNLVRGLARIDQLDKAMCILRVMVMSGGVPDTITYNMIIGNLCKKGHIRTALVLLEDMSLSGSPPDVITYNTVIRCMFDYGNAEQAIRFWKDQLQNGCPPFMITYTVLVELVCRYCGSARAIEVLEDMAVEGCYPDIVTYNSLVNYNCRRGNLEEVASVIQHILSHGLELNTVTYNTLLHSLCSHEYWDEVEEILNIMYQTSYCPTVITYNILINGLCKARLLSRAIDFFYQMLEQKCLPDIVTYNTVLGAMSKEGMVDDAIELLGLLKNTCCPPGLITYNSVIDGLAKKGLMKKALELYHQMLDAGIFPDDITRRSLIYGFCRANLVEEAGQVLKETSNRGNGIRGSTYRLVIQGLCKKKEIEMAIEVVEIMLTGGCKPDETIYTAIVKGVEEMGMGSEAVQLQKKLKQWKLLKEV

SEQ ID NO: 81304 - protein, 430 aa, Arabidopsis thaliana
  peptide (1)..(430): Ceres Seq. ID no. 12659225
MARHNQVPHFPSCSNLVRGLARIDQLDKAMCILRVMVMSGGVPDTITYNMIIGNLCKKGHIRTALVLLEDMSLSGSPPDVITYNTVIRCMFDYGNAEQAIRFWKDQLQNGCPPFMITYTVLVELVCRYCGSARAIEVLEDMAVEGCYPDIVTYNSLVNYNCRRGNLEEVASVIQHILSHGLELNTVTYNTLLHSLCSHEYWDEVEEILNIMYQTSYCPTVITYNILINGLCKARLLSRAIDFFYQMLEQKCLPDIVTYNTVLGAMSKEGMVDDAIELLGLLKNTCCPPGLITYNSVIDGLAKKGLMKKALELYHQMLDAGIFPDDITRRSLIYGFCRANLVEEAGQVLKETSNRGNGIRGSTYRLVIQGLCKKKEIEMAIEVVEIMLTGGCKPDETIYTAIVKGVEEMGMGSEAVQLQKKLKQWKLLKEV

SEQ ID NO: 81305 - DNA, 3081 bp, Arabidopsis thaliana
  misc_feature (1)..(3081): Ceres Seq. ID no. 12659241
  misc_feature (1)..(3081): Ortholog of  Ceres SEQ ID NO 13593889 as cited in SEQ ID NO 53305
  misc_feature (1)..(3081): Ortholog of  Ceres SEQ ID NO 13581959 as cited in SEQ ID NO 56156
ccacttttttgattgaccaaaggaagaagaagaagaagaagaagaatctgaagagagcgatgaagcatattttcaagaagctacacagaggtgggaatcaagagcagcagaatcgaaccaacgatgcagctcctccatcggatcaaaatcggattcacgtttctgctaatcctcctcaagcaaccccttcgtcagtcactgagacgcttccggtggccggagctacttcttctatggcctctcctgctccaaccgctgcttcgaaccgtgcggattacatgtcttctgaggaggagtatcaagtgcagttagccctagcgatcagtgcttcgaattcgcagtccagtgaggatccggagaagcatcagatccgagcggcgacgcttctgagcttaggaagccatcaacggatggattcaaggagggattcatcggaggtggtagcccagaggttatcgagacagtactgggaatatggcgtgcttgactatgaggagaaagttgtcgatagtttctacgacgtatacagtctatccacagactccgcaaagcagggagaaatgccatcgctggaagatcttgaaagcaatcatggcacacctggctttgaagctgtagttgtaaatcgacctattgattcttccctgcatgagttgctagaaatcgcagagtgtattgcactgggttgttctactaccagtgttagtgtgttggtacagaggctggctgagcttgtcaccgagcatatgggtggatctgcggaagattccagtatagtattggcaaggtggactgaaaaaagcagcgagttcaaggcagcattgaatacttgcgtattccctattggatttgtaaagattggtatctcaaggcatcgtgctctgcttttcaaggttttggcagatagtgtcaggttaccttgtaggttggtaaaaggtagccactacacaggcaatgaggatgatgctgtgaacacgataagactggaagatgaaagagagtacttggttgatcttatgacagatcctgggacgcttatacccgctgattttgcaagtgctagtaataacaccgttgagccatgtaactcaaatggaaacaaatttcctacagctcagttttcaaatgacgtgccaaagctctcagaaggtgaaggaagtagtcacagttctatggccaactatagttcttctttggatagaaggacagaggctgaaaggacagattcttcatacccaaaggtgggaccacttcggaacatagactatagttctccttctagcgtaactagttctactcagttggagaacaattcctcaacagcaattggaaaggggagtcgaggagccataattgaatgttcaagaacaaacatgaatatagttccttacaatcagaacagtgaggaagacccaaaaaaccttttcgcagaccttaatccatttcaaaataagggagctgacaagctgtatatgcccactaaatcaggtttgaataacgttgatgattttcatcaacagaaaaataatcctctggttggtagatcacctgcgccaatgatgtggaagaattacagttgcaatgaagccccaaagagaaaggagaatagttatatagaaaatcttctcccgaaactccaccgtgatcctcgttatggaaacactcaatcctcatatgctacctcaagctccaatggagctatttcctcaaatgtgcatggcagagacaatgtgacatttgtgtcaccggttgctgtaccatcatccttcacatccactgaaaatcagtttagaccaagtatagtggaggatatgaacagaaacaccaacaatgaactagatcttcagcctcatactgctgctgtggtacatggacaacagaatgatgaatctcacatccatgatcacagaaagtacacaagtgatgacatatccactggctgtgatccgaggcttaaggatcacgaaagtacaagttcatctcttgattctacatcctaccggaatgatcctcaagttcttgatgatgcagatgttggtgaatgtgaaattccttggaatgatctcgttattgcggagagaataggattagggtcctatggagaggtctatcatgctgactggcatggcacggaagttgctgtcaagaaatttttggaccaggacttctcaggtgctgctttagccgagttcagaagcgaagtacggattatgcgaagattgcgtcatccaaatgttgtattcttccttggggctgttactcgtcctccaaatctttccatcgtcacagagtttctgcctagaggaagcttgtatcgaatccttcatcggcccaaatctcacattgacgagcggcgccggattaaaatggcccttgacgtggcaatggggatgaactgcttacacaccagtacaccgacaattgttcatcgtgatctcaaaacaccaaaccttttggttgataacaactggaatgttaaggtcggtgattttgggttgtctcgcttaaagcacaatacttttttatcctccaaatcaactgctggaacgcctgaatggatggctccagaagttctacgcaatgagccctcaaatgaaaagtgtgatgtgtacagtttcggggtaatactttgggaactagcaacattgagattaccatggagaggaatgaacccaatgcaagtagttggagcagttgggttccagaatcggcggcttgagatccccaaggaacttgatcctgtggtgggaaggatcatcctggaatgttggcaaacggatccgaatctgcggccgtcatttgctcagctgacggaagtgctgaagcctttgaaccggcttgtacttcctacaccacaatagatgtcatctgtgtgaatatgtgaaagaaaatttggttaatgtatactatttgacctctggtgctgcgcagagttattatacataagccagcctagaattgaggaatgtaaatgaaatcaatgtacactatactacgttttgatgtattatttgttataggaaaagccgctatgctgtgcttattttatcagaaataatgctaataagttaaacgtctgtc

SEQ ID NO: 81306 - protein, 952 aa, Arabidopsis thaliana
  peptide (1)..(952): Ceres Seq. ID no. 12659242
TFLIDQRKKKKKKKNLKRAMKHIFKKLHRGGNQEQQNRTNDAAPPSDQNRIHVSANPPQATPSSVTETLPVAGATSSMASPAPTAASNRADYMSSEEEYQVQLALAISASNSQSSEDPEKHQIRAATLLSLGSHQRMDSRRDSSEVVAQRLSRQYWEYGVLDYEEKVVDSFYDVYSLSTDSAKQGEMPSLEDLESNHGTPGFEAVVVNRPIDSSLHELLEIAECIALGCSTTSVSVLVQRLAELVTEHMGGSAEDSSIVLARWTEKSSEFKAALNTCVFPIGFVKIGISRHRALLFKVLADSVRLPCRLVKGSHYTGNEDDAVNTIRLEDEREYLVDLMTDPGTLIPADFASASNNTVEPCNSNGNKFPTAQFSNDVPKLSEGEGSSHSSMANYSSSLDRRTEAERTDSSYPKVGPLRNIDYSSPSSVTSSTQLENNSSTAIGKGSRGAIIECSRTNMNIVPYNQNSEEDPKNLFADLNPFQNKGADKLYMPTKSGLNNVDDFHQQKNNPLVGRSPAPMMWKNYSCNEAPKRKENSYIENLLPKLHRDPRYGNTQSSYATSSSNGAISSNVHGRDNVTFVSPVAVPSSFTSTENQFRPSIVEDMNRNTNNELDLQPHTAAVVHGQQNDESHIHDHRKYTSDDISTGCDPRLKDHESTSSSLDSTSYRNDPQVLDDADVGECEIPWNDLVIAERIGLGSYGEVYHADWHGTEVAVKKFLDQDFSGAALAEFRSEVRIMRRLRHPNVVFFLGAVTRPPNLSIVTEFLPRGSLYRILHRPKSHIDERRRIKMALDVAMGMNCLHTSTPTIVHRDLKTPNLLVDNNWNVKVGDFGLSRLKHNTFLSSKSTAGTPEWMAPEVLRNEPSNEKCDVYSFGVILWELATLRLPWRGMNPMQVVGAVGFQNRRLEIPKELDPVVGRIILECWQTDPNLRPSFAQLTEVLKPLNRLVLPTPQ

SEQ ID NO: 81307 - protein, 933 aa, Arabidopsis thaliana
  peptide (1)..(933): Ceres Seq. ID no. 12659243
MKHIFKKLHRGGNQEQQNRTNDAAPPSDQNRIHVSANPPQATPSSVTETLPVAGATSSMASPAPTAASNRADYMSSEEEYQVQLALAISASNSQSSEDPEKHQIRAATLLSLGSHQRMDSRRDSSEVVAQRLSRQYWEYGVLDYEEKVVDSFYDVYSLSTDSAKQGEMPSLEDLESNHGTPGFEAVVVNRPIDSSLHELLEIAECIALGCSTTSVSVLVQRLAELVTEHMGGSAEDSSIVLARWTEKSSEFKAALNTCVFPIGFVKIGISRHRALLFKVLADSVRLPCRLVKGSHYTGNEDDAVNTIRLEDEREYLVDLMTDPGTLIPADFASASNNTVEPCNSNGNKFPTAQFSNDVPKLSEGEGSSHSSMANYSSSLDRRTEAERTDSSYPKVGPLRNIDYSSPSSVTSSTQLENNSSTAIGKGSRGAIIECSRTNMNIVPYNQNSEEDPKNLFADLNPFQNKGADKLYMPTKSGLNNVDDFHQQKNNPLVGRSPAPMMWKNYSCNEAPKRKENSYIENLLPKLHRDPRYGNTQSSYATSSSNGAISSNVHGRDNVTFVSPVAVPSSFTSTENQFRPSIVEDMNRNTNNELDLQPHTAAVVHGQQNDESHIHDHRKYTSDDISTGCDPRLKDHESTSSSLDSTSYRNDPQVLDDADVGECEIPWNDLVIAERIGLGSYGEVYHADWHGTEVAVKKFLDQDFSGAALAEFRSEVRIMRRLRHPNVVFFLGAVTRPPNLSIVTEFLPRGSLYRILHRPKSHIDERRRIKMALDVAMGMNCLHTSTPTIVHRDLKTPNLLVDNNWNVKVGDFGLSRLKHNTFLSSKSTAGTPEWMAPEVLRNEPSNEKCDVYSFGVILWELATLRLPWRGMNPMQVVGAVGFQNRRLEIPKELDPVVGRIILECWQTDPNLRPSFAQLTEVLKPLNRLVLPTPQ

SEQ ID NO: 81308 - protein, 875 aa, Arabidopsis thaliana
  peptide (1)..(875): Ceres Seq. ID no. 12659244
MASPAPTAASNRADYMSSEEEYQVQLALAISASNSQSSEDPEKHQIRAATLLSLGSHQRMDSRRDSSEVVAQRLSRQYWEYGVLDYEEKVVDSFYDVYSLSTDSAKQGEMPSLEDLESNHGTPGFEAVVVNRPIDSSLHELLEIAECIALGCSTTSVSVLVQRLAELVTEHMGGSAEDSSIVLARWTEKSSEFKAALNTCVFPIGFVKIGISRHRALLFKVLADSVRLPCRLVKGSHYTGNEDDAVNTIRLEDEREYLVDLMTDPGTLIPADFASASNNTVEPCNSNGNKFPTAQFSNDVPKLSEGEGSSHSSMANYSSSLDRRTEAERTDSSYPKVGPLRNIDYSSPSSVTSSTQLENNSSTAIGKGSRGAIIECSRTNMNIVPYNQNSEEDPKNLFADLNPFQNKGADKLYMPTKSGLNNVDDFHQQKNNPLVGRSPAPMMWKNYSCNEAPKRKENSYIENLLPKLHRDPRYGNTQSSYATSSSNGAISSNVHGRDNVTFVSPVAVPSSFTSTENQFRPSIVEDMNRNTNNELDLQPHTAAVVHGQQNDESHIHDHRKYTSDDISTGCDPRLKDHESTSSSLDSTSYRNDPQVLDDADVGECEIPWNDLVIAERIGLGSYGEVYHADWHGTEVAVKKFLDQDFSGAALAEFRSEVRIMRRLRHPNVVFFLGAVTRPPNLSIVTEFLPRGSLYRILHRPKSHIDERRRIKMALDVAMGMNCLHTSTPTIVHRDLKTPNLLVDNNWNVKVGDFGLSRLKHNTFLSSKSTAGTPEWMAPEVLRNEPSNEKCDVYSFGVILWELATLRLPWRGMNPMQVVGAVGFQNRRLEIPKELDPVVGRIILECWQTDPNLRPSFAQLTEVLKPLNRLVLPTPQ

SEQ ID NO: 81309 - DNA, 1326 bp, Arabidopsis thaliana
  misc_feature (1)..(1326): Ceres Seq. ID no. 12659261
  misc_feature (1)..(1326): Ortholog of  Ceres SEQ ID NO 12611235 as cited in SEQ ID NO 56101
atgaatatgccgctgttggatattcaaccacgaacgttgcagtttgcagttgacctgaagaagcaaacttcctgcgtggtacagctaaccaatactacccatcattatgttgcatttaaggttaaaaccacatcaccaaagaagtactgtgttcgtccaaatgttggtgttgttgcacctaaatcaacctgtgaattcactgtcattatgcaagcttttaaagaaccacctccagatatggtttgcaaagacaaattcttaatccagagtactgctgtatctgcggaaacaactgatgaagacatcacagctagcatgttttcgaaagccgaaggcaaacacatagaggagaacaaactcagggtcacgctcgtaccgccctctgactcacctgaactatctccaatcaatacaccgaagcagggagcagtatttgaagattccatcctcaaggatcgtttatatagccagtcagagaccctagctccgccacaatatgagggtgagattgtaaaagagcctaggatggttggacatgatgagttaaaggcagccgacaatgcaaaggagttaaagacaccaaaaatggccacagtggattttgtggaagatcgatatactgctaatgacttgaaggcaactaaagatagctacgattcatcgaggatggcaaaagaaactggattcgatccaattaggtctcataaggatgcggatgatggaagggcgattaaggcaacaactaatttggacgctcccatgaagaaggccatggatctacctagggatcaagggtttactaatggaatagctgttgacagtgaaccaaagatatctaaggagagagatgttgtccagctgcagaaaacagatggccagaatgtcagaggattggatgaacttaagttggttaaagacattgaggagatgaagctgaaagtggatgctcttgaatccaagttaaaacaggtctgcttatcaaattttaaaatccataacttccgtgctatatgtaactgtgctaaagagtttaaatctggcggaactgagaacgaagaagatagtgaaagaagtgcacaatgggttccctctgctgtatgtatgcgttgtggcattcattgcctatgttatcgggcactttctgcgcacttgactgctcgctcggtgtctatatcatatcaagtgtgcagtaagggatatatagacaaagaaggtaaaaggattagatttcgtctgtttgggtttgctttgtgggagaggatgaatgatttctccgacacatttaagatggaatatgatagactgtatagcattggtgttagttaa

SEQ ID NO: 81310 - protein, 441 aa, Arabidopsis thaliana
  peptide (1)..(441): Ceres Seq. ID no. 12659262
MNMPLLDIQPRTLQFAVDLKKQTSCVVQLTNTTHHYVAFKVKTTSPKKYCVRPNVGVVAPKSTCEFTVIMQAFKEPPPDMVCKDKFLIQSTAVSAETTDEDITASMFSKAEGKHIEENKLRVTLVPPSDSPELSPINTPKQGAVFEDSILKDRLYSQSETLAPPQYEGEIVKEPRMVGHDELKAADNAKELKTPKMATVDFVEDRYTANDLKATKDSYDSSRMAKETGFDPIRSHKDADDGRAIKATTNLDAPMKKAMDLPRDQGFTNGIAVDSEPKISKERDVVQLQKTDGQNVRGLDELKLVKDIEEMKLKVDALESKLKQVCLSNFKIHNFRAICNCAKEFKSGGTENEEDSERSAQWVPSAVCMRCGIHCLCYRALSAHLTARSVSISYQVCSKGYIDKEGKRIRFRLFGFALWERMNDFSDTFKMEYDRLYSIGVS

SEQ ID NO: 81311 - protein, 439 aa, Arabidopsis thaliana
  peptide (1)..(439): Ceres Seq. ID no. 12659263
MPLLDIQPRTLQFAVDLKKQTSCVVQLTNTTHHYVAFKVKTTSPKKYCVRPNVGVVAPKSTCEFTVIMQAFKEPPPDMVCKDKFLIQSTAVSAETTDEDITASMFSKAEGKHIEENKLRVTLVPPSDSPELSPINTPKQGAVFEDSILKDRLYSQSETLAPPQYEGEIVKEPRMVGHDELKAADNAKELKTPKMATVDFVEDRYTANDLKATKDSYDSSRMAKETGFDPIRSHKDADDGRAIKATTNLDAPMKKAMDLPRDQGFTNGIAVDSEPKISKERDVVQLQKTDGQNVRGLDELKLVKDIEEMKLKVDALESKLKQVCLSNFKIHNFRAICNCAKEFKSGGTENEEDSERSAQWVPSAVCMRCGIHCLCYRALSAHLTARSVSISYQVCSKGYIDKEGKRIRFRLFGFALWERMNDFSDTFKMEYDRLYSIGVS

SEQ ID NO: 81312 - protein, 372 aa, Arabidopsis thaliana
  peptide (1)..(372): Ceres Seq. ID no. 12659264
MQAFKEPPPDMVCKDKFLIQSTAVSAETTDEDITASMFSKAEGKHIEENKLRVTLVPPSDSPELSPINTPKQGAVFEDSILKDRLYSQSETLAPPQYEGEIVKEPRMVGHDELKAADNAKELKTPKMATVDFVEDRYTANDLKATKDSYDSSRMAKETGFDPIRSHKDADDGRAIKATTNLDAPMKKAMDLPRDQGFTNGIAVDSEPKISKERDVVQLQKTDGQNVRGLDELKLVKDIEEMKLKVDALESKLKQVCLSNFKIHNFRAICNCAKEFKSGGTENEEDSERSAQWVPSAVCMRCGIHCLCYRALSAHLTARSVSISYQVCSKGYIDKEGKRIRFRLFGFALWERMNDFSDTFKMEYDRLYSIGVS

SEQ ID NO: 81313 - DNA, 2073 bp, Arabidopsis thaliana
  misc_feature (1)..(2073): Ceres Seq. ID no. 12659265
  misc_feature (1)..(2073): Ortholog of  Ceres SEQ ID NO 13596198 as cited in SEQ ID NO 68488
ttccctcaatcgttcaaatgcaagatttcttcggctccgttcgtcgatcgcttgttttccgtccttcttccgacgacgataaccaggagaaccagcctccgtttcccggtgttctcgccgataagatcacctcttgcatccgcaaatcgaagatttttatcaaaccctccttctcgcctcctcctcctgctaacactgtagacatggcacctccgatttcgtggaggaaaggtcagttaattggtcgcggcgcgtttggtacggtgtacatgggtatgaatcttgactccggggagcttctcgccgtcaaacaggttctgattgcagccaattttgcttccaaggaaaagactcaggctcatattcaggagcttgaagaagaagttaagcttcttaaaaatctctcccatcctaatatagttagatatttgggtacagtgagggaagatgataccctgaatatccttctcgagtttgttcccggtggatcgatatcatcgctcttggagaaatttggaccttttcctgaatcagttgtccggacatacacaaggcaactgcttttagggttggagtacctgcacaatcatgcaattatgcacagagacattaagggggctaatatccttgtggataataaaggatgcattaagcttgctgattttggtgcatccaaacaagtagctgagttggctacgatgactggtgcaaaatctatgaaagggacaccatattggatggctccggaagttattcttcaaactggacatagcttctctgctgacatatggagcgtcggctgtacagttattgaaatggtgactgggaaggctccttggagtcagcagtataaagaggttgctgctatcttcttcataggaacaacaaaatcacatcctccaatacctgatactctctcctctgatgcaaaagattttctgctcaagtgtctgcaggaggtaccaaatctgcggccaaccgcatctgagctactaaagcatccttttgttatggggaaacacaaggagtctgcttctactgatcttggttctgtcctgaacaatcttagcactccactaccgttacagataaataacaccaagagcactccagattctacttgcgacgatatgatgagaatttcttgacatttgacggagaaatgagttctacccttgaaaaagattgtcatctgaagaagagctgtgatgacataagtgatatgtccattgctttgaagtccaaatttgacgaaagtcctggtaatggagagaaagagtctacaatgagcatggaatgtgaccaaccttcatactcagaggatgatgatgagctgaccgagtcaaaaattaaagctttcttagatgagaaggctgcagatctaaagaagttacagactcctctctatgaagaattctacaatagtttgatcacattctctcccagttgtatggagagtaatttaagtaacagtaaaagagaggacactgctcgtggtttcctgaaactgcctccaaaaagcaggtcaccgagtcggggccctcttggtggttcaccttcaagagcaacagacgcaactagttgttccaagagcccaggaagtggaggtagtcgtgaattgaatattaacaatggaggtgatgaagcttcacaggatggtgtatcagcacgggtcacagactggaggggtctcgttgttgacactaagcaggaattaagccagtgtgttgctttgtcagagatagagaagaagtggaaggaagagcttgatcaagaactggaaagaaagcgacaagaaatcatgcgccaagcagggttgggatcatccccaagagacagaggcatgagccgacagagagagaagtcgaggtttgcatcaccaggaaaatgacttgcacaaaaagtctccggctttttgatttttgattgctcaactagtatatatatctgtaactcttatcttgctgtgatgaaaagtagacacgaggtttggtctgaatatatgattctgaactggttgttgaaggtattagatgtgtgtaatgtgagtgtcgggtgcatatttaagtgcgc

SEQ ID NO: 81314 - protein, 381 aa, Arabidopsis thaliana
  peptide (1)..(381): Ceres Seq. ID no. 12659266
PSIVQMQDFFGSVRRSLVFRPSSDDDNQENQPPFPGVLADKITSCIRKSKIFIKPSFSPPPPANTVDMAPPISWRKGQLIGRGAFGTVYMGMNLDSGELLAVKQVLIAANFASKEKTQAHIQELEEEVKLLKNLSHPNIVRYLGTVREDDTLNILLEFVPGGSISSLLEKFGPFPESVVRTYTRQLLLGLEYLHNHAIMHRDIKGANILVDNKGCIKLADFGASKQVAELATMTGAKSMKGTPYWMAPEVILQTGHSFSADIWSVGCTVIEMVTGKAPWSQQYKEVAAIFFIGTTKSHPPIPDTLSSDAKDFLLKCLQEVPNLRPTASELLKHPFVMGKHKESASTDLGSVLNNLSTPLPLQINNTKSTPDSTCDDMMRIS

SEQ ID NO: 81315 - protein, 376 aa, Arabidopsis thaliana
  peptide (1)..(376): Ceres Seq. ID no. 12659267
MQDFFGSVRRSLVFRPSSDDDNQENQPPFPGVLADKITSCIRKSKIFIKPSFSPPPPANTVDMAPPISWRKGQLIGRGAFGTVYMGMNLDSGELLAVKQVLIAANFASKEKTQAHIQELEEEVKLLKNLSHPNIVRYLGTVREDDTLNILLEFVPGGSISSLLEKFGPFPESVVRTYTRQLLLGLEYLHNHAIMHRDIKGANILVDNKGCIKLADFGASKQVAELATMTGAKSMKGTPYWMAPEVILQTGHSFSADIWSVGCTVIEMVTGKAPWSQQYKEVAAIFFIGTTKSHPPIPDTLSSDAKDFLLKCLQEVPNLRPTASELLKHPFVMGKHKESASTDLGSVLNNLSTPLPLQINNTKSTPDSTCDDMMRIS

SEQ ID NO: 81316 - protein, 314 aa, Arabidopsis thaliana
  peptide (1)..(314): Ceres Seq. ID no. 12659268
MAPPISWRKGQLIGRGAFGTVYMGMNLDSGELLAVKQVLIAANFASKEKTQAHIQELEEEVKLLKNLSHPNIVRYLGTVREDDTLNILLEFVPGGSISSLLEKFGPFPESVVRTYTRQLLLGLEYLHNHAIMHRDIKGANILVDNKGCIKLADFGASKQVAELATMTGAKSMKGTPYWMAPEVILQTGHSFSADIWSVGCTVIEMVTGKAPWSQQYKEVAAIFFIGTTKSHPPIPDTLSSDAKDFLLKCLQEVPNLRPTASELLKHPFVMGKHKESASTDLGSVLNNLSTPLPLQINNTKSTPDSTCDDMMRIS

SEQ ID NO: 81317 - DNA, 1299 bp, Arabidopsis thaliana
  misc_feature (1)..(1299): Ceres Seq. ID no. 12659310
  misc_feature (1)..(1299): Ortholog of  Ceres SEQ ID NO 13662367 as cited in SEQ ID NO 67774
acttatcaacaactcaaaactgatcatcacaaagaaaagagttttctctgataatctttctcggacaagatggcacctgagatgaacaacaagttgagctacggagaaaagaagagagcgtacgttacgttcctcgccggaaccggagactacgtgaaaggagtggttggtctggctaaagggctaaggaaaactaaaagcaagtacccattagtggttgctgtgttacctgacgtgccggccgatcaccggagacagctattggaccaaggctgcgtcatcaaggagattcagccggtttacccaccggataaccaaactcagtttgctatggcttactacgtcctcaactactctaaacttcgtatttggaagtttgtagagtacagcaagctgatatacttagacggagacatacaagtgtttgagaacatagatcacttgtttgatcttcctgacggcaacttctacgccgttaaagactgtttctgcgagaagacttggagccacacgcctcagtacaagattggctactgccaacagtgtccggacaaggtgacgtggcctgagtcagagcttggtcctaagccaccgttgtacttcaacgccggcatgttcgtctacgagccaagcctccccacttattacaaccttttggagacactcaaagttgtccctcccacaccttttgctgaacaggatttcttgaacatgtacttcaaagacatatacaagcctattccaccagtttacaatcttgtcttggccatgctctggaggcatccagagaacatagagcttaacgaagctaaggttgttcattactgtgcagccggtgctaagccttggaggttcacaggccaagaaggaaatatggagagggaagacatcaagatgcttgtagagaaatggtgggacatttacaacgacgagtctcttgactacaaaaactttaatgtgcattgcggacaaaaagaagatgttcacaggaaaccgaaaacccttccacagttctttacagatttgtctgaagctgatgtgcttcaatgtgccaaagctccatccgcggcttagacaactttgtgagggctgacgagcgaggttcttgtcaacaccagtttgctaatagtttgtgaaactggtgatgtttacttaggaatttgttatatgaaattgtgctttactgttttttaatttactgaattaagaggactttttaatccccaaaccctctttgtaccttatatgtttgctatggactttccttcctaaaatacaatgaaaatatatatagttttg

SEQ ID NO: 81318 - protein, 334 aa, Arabidopsis thaliana
  peptide (1)..(334): Ceres Seq. ID no. 12659311
MAPEMNNKLSYGEKKRAYVTFLAGTGDYVKGVVGLAKGLRKTKSKYPLVVAVLPDVPADHRRQLLDQGCVIKEIQPVYPPDNQTQFAMAYYVLNYSKLRIWKFVEYSKLIYLDGDIQVFENIDHLFDLPDGNFYAVKDCFCEKTWSHTPQYKIGYCQQCPDKVTWPESELGPKPPLYFNAGMFVYEPSLPTYYNLLETLKVVPPTPFAEQDFLNMYFKDIYKPIPPVYNLVLAMLWRHPENIELNEAKVVHYCAAGAKPWRFTGQEGNMEREDIKMLVEKWWDIYNDESLDYKNFNVHCGQKEDVHRKPKTLPQFFTDLSEADVLQCAKAPSAA

SEQ ID NO: 81319 - protein, 330 aa, Arabidopsis thaliana
  peptide (1)..(330): Ceres Seq. ID no. 12659312
MNNKLSYGEKKRAYVTFLAGTGDYVKGVVGLAKGLRKTKSKYPLVVAVLPDVPADHRRQLLDQGCVIKEIQPVYPPDNQTQFAMAYYVLNYSKLRIWKFVEYSKLIYLDGDIQVFENIDHLFDLPDGNFYAVKDCFCEKTWSHTPQYKIGYCQQCPDKVTWPESELGPKPPLYFNAGMFVYEPSLPTYYNLLETLKVVPPTPFAEQDFLNMYFKDIYKPIPPVYNLVLAMLWRHPENIELNEAKVVHYCAAGAKPWRFTGQEGNMEREDIKMLVEKWWDIYNDESLDYKNFNVHCGQKEDVHRKPKTLPQFFTDLSEADVLQCAKAPSAA

SEQ ID NO: 81320 - protein, 247 aa, Arabidopsis thaliana
  peptide (1)..(247): Ceres Seq. ID no. 12659313
MAYYVLNYSKLRIWKFVEYSKLIYLDGDIQVFENIDHLFDLPDGNFYAVKDCFCEKTWSHTPQYKIGYCQQCPDKVTWPESELGPKPPLYFNAGMFVYEPSLPTYYNLLETLKVVPPTPFAEQDFLNMYFKDIYKPIPPVYNLVLAMLWRHPENIELNEAKVVHYCAAGAKPWRFTGQEGNMEREDIKMLVEKWWDIYNDESLDYKNFNVHCGQKEDVHRKPKTLPQFFTDLSEADVLQCAKAPSAA

SEQ ID NO: 81321 - DNA, 2118 bp, Arabidopsis thaliana
  misc_feature (1)..(2118): Ceres Seq. ID no. 12659314
  misc_feature (1)..(2118): Ortholog of  Ceres SEQ ID NO 12586556 as cited in SEQ ID NO 64667
  misc_feature (1)..(2118): Ortholog of  Ceres SEQ ID NO 13660894 as cited in SEQ ID NO 67475
atgaagtcacagatactcctacgtcgaacgtatagcacaaccatccctcctcccacagcaaatgttagaatcactcatctctctcgtatcggcaagattcatgaagctcggaagcttttcgattcatgtgactcgaaatcaatctcttcctggaactctatggttgctgggtactttgcgaatctaatgccccgagatgcacggaaactgttcgatgaaatgcctgacagaaacatcatctcttggaatggtttggtgtccgggtatatgaagaacggggagattgacgaagctaggaaagtgtttgatttaatgcctgagaggaatgttgtctcatggacggcgttggtgaaagggtatgtgcacaatggtaaggttgatgtggcagagtcgttgttttggaaaatgcctgagaagaataaggtttcttggactgtgatgcttattgggtttttgcaagatgggcgaatcgatgatgcgtgtaagctgtatgaaatgataccggataaagataatattgcaaggactagtatgattcatggattgtgcaaagaaggaagagtggatgaggcaagagagatttttgatgagatgtcagagagaagtgtgattacttggactacaatggtcacaggatatgggcagaacaatcgtgtggatgatgctaggaagatttttgatgtgatgccagagaaaactgaagtttcatggacttccatgcttatgggctatgtacagaatgggcgaattgaggatgctgaagaactttttgaagttatgccagtgaagccagttattgcgtgtaatgctatgatttccgggcttggacagaaaggagagatagcaaaagcaagaagggtttttgattcaatgaaggagagaaatgatgcatcttggcaaacggtgatcaaaattcacgaaagaaacggttttgaattggaggctcttgatttatttattctgatgcagaaacagggagttagacccacttttccaacattgataagcattctttcggtctgcgccagcttagcaagcctccaccatggtaaacaggtccatgctcagttggttagatgtcaatttgatgttgatgtgtatgttgcgtctgttttaatgacaatgtacattaaatgcggcgagcttgtgaagtctaaactaatatttgacaggtttccttcaaaggacattatcatgtggaattcaatcatatctggttatgcctcacacggtcttggagaggaagcattaaaggttttctgtgagatgcctttgtctggtagtactaagcctaacgaagtcaccttcgttgcaactctctcagcatgtagttacgctgggatggttgaggaagggcttaagatctatgaatctatggaatcagtttttggggttaagccaatcaccgcgcattatgcttgcatggtagatatgcttgggcgtgcaggacggtttaatgaggcaatggaaatgattgatagtatgactgtcgaaccagatgctgcagtttggggttctctattaggagcgtgcagaactcactcgcagctggatgtggcagaattttgtgcgaagaaactcatagagattgaaccggagaattctgggacttacatcttgctctccaacatgtatgcatctcaaggtaggtgggctgacgttgcagaactgagaaaacttatgaagactaggttggtaagaaaatcaccaggttgtagctggactgaagtcgagaacaaggtgcatgcattcactcgtgggggtattaatagccatcccgagcaggaatctattttgaagatactggatgaattggatgggttattgagagaagccgggtataatcctgattgcagctatgcattgcacgatgtagacgaggaagagaaagtcaatagcctgaaatatcatagcgagagactagcggtagcttatgctcttttaaagctatctgaaggaatacccatccgagtcatgaagaaccttagagtttgtagtgattgccacacagcaataaaaataatctctaaggtgaaagagagggagatcattctaagagatgcaaacagattccatcacttcagaaacggagagtgttcctgtaaagattactggtga

SEQ ID NO: 81322 - protein, 705 aa, Arabidopsis thaliana
  peptide (1)..(705): Ceres Seq. ID no. 12659315
MKSQILLRRTYSTTIPPPTANVRITHLSRIGKIHEARKLFDSCDSKSISSWNSMVAGYFANLMPRDARKLFDEMPDRNIISWNGLVSGYMKNGEIDEARKVFDLMPERNVVSWTALVKGYVHNGKVDVAESLFWKMPEKNKVSWTVMLIGFLQDGRIDDACKLYEMIPDKDNIARTSMIHGLCKEGRVDEAREIFDEMSERSVITWTTMVTGYGQNNRVDDARKIFDVMPEKTEVSWTSMLMGYVQNGRIEDAEELFEVMPVKPVIACNAMISGLGQKGEIAKARRVFDSMKERNDASWQTVIKIHERNGFELEALDLFILMQKQGVRPTFPTLISILSVCASLASLHHGKQVHAQLVRCQFDVDVYVASVLMTMYIKCGELVKSKLIFDRFPSKDIIMWNSIISGYASHGLGEEALKVFCEMPLSGSTKPNEVTFVATLSACSYAGMVEEGLKIYESMESVFGVKPITAHYACMVDMLGRAGRFNEAMEMIDSMTVEPDAAVWGSLLGACRTHSQLDVAEFCAKKLIEIEPENSGTYILLSNMYASQGRWADVAELRKLMKTRLVRKSPGCSWTEVENKVHAFTRGGINSHPEQESILKILDELDGLLREAGYNPDCSYALHDVDEEEKVNSLKYHSERLAVAYALLKLSEGIPIRVMKNLRVCSDCHTAIKIISKVKEREIILRDANRFHHFRNGECSCKDYW

SEQ ID NO: 81323 - protein, 652 aa, Arabidopsis thaliana
  peptide (1)..(652): Ceres Seq. ID no. 12659316
MVAGYFANLMPRDARKLFDEMPDRNIISWNGLVSGYMKNGEIDEARKVFDLMPERNVVSWTALVKGYVHNGKVDVAESLFWKMPEKNKVSWTVMLIGFLQDGRIDDACKLYEMIPDKDNIARTSMIHGLCKEGRVDEAREIFDEMSERSVITWTTMVTGYGQNNRVDDARKIFDVMPEKTEVSWTSMLMGYVQNGRIEDAEELFEVMPVKPVIACNAMISGLGQKGEIAKARRVFDSMKERNDASWQTVIKIHERNGFELEALDLFILMQKQGVRPTFPTLISILSVCASLASLHHGKQVHAQLVRCQFDVDVYVASVLMTMYIKCGELVKSKLIFDRFPSKDIIMWNSIISGYASHGLGEEALKVFCEMPLSGSTKPNEVTFVATLSACSYAGMVEEGLKIYESMESVFGVKPITAHYACMVDMLGRAGRFNEAMEMIDSMTVEPDAAVWGSLLGACRTHSQLDVAEFCAKKLIEIEPENSGTYILLSNMYASQGRWADVAELRKLMKTRLVRKSPGCSWTEVENKVHAFTRGGINSHPEQESILKILDELDGLLREAGYNPDCSYALHDVDEEEKVNSLKYHSERLAVAYALLKLSEGIPIRVMKNLRVCSDCHTAIKIISKVKEREIILRDANRFHHFRNGECSCKDYW

SEQ ID NO: 81324 - protein, 643 aa, Arabidopsis thaliana
  peptide (1)..(643): Ceres Seq. ID no. 12659317
MPRDARKLFDEMPDRNIISWNGLVSGYMKNGEIDEARKVFDLMPERNVVSWTALVKGYVHNGKVDVAESLFWKMPEKNKVSWTVMLIGFLQDGRIDDACKLYEMIPDKDNIARTSMIHGLCKEGRVDEAREIFDEMSERSVITWTTMVTGYGQNNRVDDARKIFDVMPEKTEVSWTSMLMGYVQNGRIEDAEELFEVMPVKPVIACNAMISGLGQKGEIAKARRVFDSMKERNDASWQTVIKIHERNGFELEALDLFILMQKQGVRPTFPTLISILSVCASLASLHHGKQVHAQLVRCQFDVDVYVASVLMTMYIKCGELVKSKLIFDRFPSKDIIMWNSIISGYASHGLGEEALKVFCEMPLSGSTKPNEVTFVATLSACSYAGMVEEGLKIYESMESVFGVKPITAHYACMVDMLGRAGRFNEAMEMIDSMTVEPDAAVWGSLLGACRTHSQLDVAEFCAKKLIEIEPENSGTYILLSNMYASQGRWADVAELRKLMKTRLVRKSPGCSWTEVENKVHAFTRGGINSHPEQESILKILDELDGLLREAGYNPDCSYALHDVDEEEKVNSLKYHSERLAVAYALLKLSEGIPIRVMKNLRVCSDCHTAIKIISKVKEREIILRDANRFHHFRNGECSCKDYW

SEQ ID NO: 81325 - DNA, 2143 bp, Arabidopsis thaliana
  misc_feature (1)..(2143): Ceres Seq. ID no. 12659322
  misc_feature (1)..(2143): Ortholog of  Ceres SEQ ID NO 13501807 as cited in SEQ ID NO 67558
aaacttgcactcgtcttccactttgatccacttaaagcagctttaaagctttgaacatgtttagctataatccctgaggaactatcctcatgtctctctccagttgcttgcttcccttttctcaatcagcgacggctccgtcttcctccgtctgctcttgccatctcgccgcctctttttctaattttccggtttcgtcaagagactatagtttctccagaagtggaagccttgttctcaacggaggaggctcgaatctctgccggagattctgtggtttgaaactgtggatacttaagagcttgaatcgtagacaaggcaacaacagaaaacatcagcctgtaaacgagcttacaacacactcaaagcacactttcctcagcgatgatgaacgaggttttgctgaagaaactagagctgaagatttacgaccagaagagaatattctgggaacggatttgaatgatgggtttcacaatgttggagacttaccacctgtgtcaaaacaactctcggatgatctttcagatgttcgaagaagggcctcactttgcattgctgttgtaggagccactggtgagctagcaagagggaagattttcccggcattgtttgcgttgtattatagcggctaccttcctgaggatgttgctatatttggggtttcaagaaagaatctgacagatgaagacctcagatccatcattgcatcaacgctgacttgccgtgttgatcatcaggagaattgtgggggcaagatggatgcatttcagagtagaacatactatatcaatggaggttataataacagggatgggatgtcccgacttgccgagagaatgaaacagattgagggagaatcagaagcaaatagaatcttttacctctcagtacctcaagaagctctggtggatgtggcatgcaccattggagataacgctcaggcaccacgaggctggactcgaataatagttgagaaaccttttggttttaactcacattcgtctcatcagttaacaaagtcacttctctctaagtttgaagagaagcaaatctacaggatagatcacatgttaggaagaaacctcattgaaaatctgacagtgttaaggttttcaaatctagtttttgaaccactatggaacagaacatacatacgcaatatacaggttattatatcagaatcaattgcgcaaacagaaaagttttctgatggatatggaataatacgggacatagtgcacagccatatacttcagacaatcgcattacttgccatggaacctccgataagtctcgatggtgaagatatccgaaatgaaaaggtgaaggttttaagatcaattcgcaagatagacccgcgtgatgtcatccttggccagtataaatccagttcccgagacaagaacggtgtgatcttgaacggtgtagaccctacatattgtgcagcagccttgtatattgataatgcacgttgggatggtgtacctttccttgtaagagttggcactggcctcattaaacacagagtggagattcatgtgcaattccggcatgttcctggaaacctataccgagaaaatattggaataaacatagatttggggacaaatgagcttattctacgtgacgaacctgatgaggccatcctggtgaaaatcaacaacaaggttcctggtttaggtcttcagctagacgcttctgaacttaacttgctctataaagacaggtataaaaccgaagtaccagactcatatgaacacctaattcatgatgtaattgacggagacaatcatctgttcatgagaagcgatgaggttgcagcagcatggaacattcttagtccggttctagaagagatagacaagcatcacacagctccggagttgtatgaatttggtggacgaggaccagttgcggcatactatctttgggccaagcacggtgtcccatgggcagatgactgaagaagaaacatagatgcagcaacaaacaaatgagagtgattctgaatggttattgtgaagtgtgtttgtttagcttgaagctgtgccattccctgtagactgtacatatgtacacatgtatgtcatgttgctatatgaatgtccatcatggtggggtccataatagtgttgaaaag

SEQ ID NO: 81326 - protein, 625 aa, Arabidopsis thaliana
  peptide (1)..(625): Ceres Seq. ID no. 12659323
MSLSSCLLPFSQSATAPSSSVCSCHLAASFSNFPVSSRDYSFSRSGSLVLNGGGSNLCRRFCGLKLWILKSLNRRQGNNRKHQPVNELTTHSKHTFLSDDERGFAEETRAEDLRPEENILGTDLNDGFHNVGDLPPVSKQLSDDLSDVRRRASLCIAVVGATGELARGKIFPALFALYYSGYLPEDVAIFGVSRKNLTDEDLRSIIASTLTCRVDHQENCGGKMDAFQSRTYYINGGYNNRDGMSRLAERMKQIEGESEANRIFYLSVPQEALVDVACTIGDNAQAPRGWTRIIVEKPFGFNSHSSHQLTKSLLSKFEEKQIYRIDHMLGRNLIENLTVLRFSNLVFEPLWNRTYIRNIQVIISESIAQTEKFSDGYGIIRDIVHSHILQTIALLAMEPPISLDGEDIRNEKVKVLRSIRKIDPRDVILGQYKSSSRDKNGVILNGVDPTYCAAALYIDNARWDGVPFLVRVGTGLIKHRVEIHVQFRHVPGNLYRENIGINIDLGTNELILRDEPDEAILVKINNKVPGLGLQLDASELNLLYKDRYKTEVPDSYEHLIHDVIDGDNHLFMRSDEVAAAWNILSPVLEEIDKHHTAPELYEFGGRGPVAAYYLWAKHGVPWADD

SEQ ID NO: 81327 - protein, 402 aa, Arabidopsis thaliana
  peptide (1)..(402): Ceres Seq. ID no. 12659324
MDAFQSRTYYINGGYNNRDGMSRLAERMKQIEGESEANRIFYLSVPQEALVDVACTIGDNAQAPRGWTRIIVEKPFGFNSHSSHQLTKSLLSKFEEKQIYRIDHMLGRNLIENLTVLRFSNLVFEPLWNRTYIRNIQVIISESIAQTEKFSDGYGIIRDIVHSHILQTIALLAMEPPISLDGEDIRNEKVKVLRSIRKIDPRDVILGQYKSSSRDKNGVILNGVDPTYCAAALYIDNARWDGVPFLVRVGTGLIKHRVEIHVQFRHVPGNLYRENIGINIDLGTNELILRDEPDEAILVKINNKVPGLGLQLDASELNLLYKDRYKTEVPDSYEHLIHDVIDGDNHLFMRSDEVAAAWNILSPVLEEIDKHHTAPELYEFGGRGPVAAYYLWAKHGVPWADD

SEQ ID NO: 81328 - protein, 382 aa, Arabidopsis thaliana
  peptide (1)..(382): Ceres Seq. ID no. 12659325
MSRLAERMKQIEGESEANRIFYLSVPQEALVDVACTIGDNAQAPRGWTRIIVEKPFGFNSHSSHQLTKSLLSKFEEKQIYRIDHMLGRNLIENLTVLRFSNLVFEPLWNRTYIRNIQVIISESIAQTEKFSDGYGIIRDIVHSHILQTIALLAMEPPISLDGEDIRNEKVKVLRSIRKIDPRDVILGQYKSSSRDKNGVILNGVDPTYCAAALYIDNARWDGVPFLVRVGTGLIKHRVEIHVQFRHVPGNLYRENIGINIDLGTNELILRDEPDEAILVKINNKVPGLGLQLDASELNLLYKDRYKTEVPDSYEHLIHDVIDGDNHLFMRSDEVAAAWNILSPVLEEIDKHHTAPELYEFGGRGPVAAYYLWAKHGVPWADD

SEQ ID NO: 81329 - DNA, 1097 bp, Arabidopsis thaliana
  misc_feature (1)..(1097): Ceres Seq. ID no. 12659334
  misc_feature (1)..(1097): Ortholog of  Ceres SEQ ID NO 12617197 as cited in SEQ ID NO 63406
  misc_feature (1)..(1097): Ortholog of  Ceres SEQ ID NO 13597804 as cited in SEQ ID NO 64182
  misc_feature (1)..(1097): Ortholog of  Ceres SEQ ID NO 13598565 as cited in SEQ ID NO 65250
  misc_feature (1)..(1097): Ortholog of  Ceres SEQ ID NO 13598597 as cited in SEQ ID NO 65496
  misc_feature (1)..(1097): Ortholog of  Ceres SEQ ID NO 13596284 as cited in SEQ ID NO 68273
accgaagcctaccaaccacatgcacactaattctactcgccaaataaagtgaaaagagatggctgatggaggaaaggtggtctgcgtaaccggagcttccggttacatagcgtcttggatcgtcaagcttttgctcttccgtggctacaccatcaatgccaccgttcgagacccaaaagatcgaaagaaaacagatcaccttctagcacttgacggcgcaaaagaaagactcaaattattcaaagcagatcttctagatgaaggttcttttgagctcgcaattgatggatgcgagactgtcttccacactgcttcaccggttgcaatcactgtcaagactgatcctcaggttgagctgatcaatccagccgtcaatggtactattaacgtcctaagaacttgcactaaagtgtcttctgtcaagagggtcatcttaacatcgtccatggccgcagttcttgcgcctgagaccaagttgggaccaaacgatgtagtagacgaaaccttcttcactaatccaagttttgctgaggagagaaagcaatggtatgtactttctaagactttggccgaagatgcagcatggcgatttgccaaggacaatgagatcgacttgatcgtactgaatccgggacttgtgactggaccaatcttgcagccaactcttaatttctcggtagctgtgattgtggaacttatgaaaggcaagaatccttttaatactacacatcataggttcgtggacgtgagagatgttgctctagctcatgtaaaggcactcgagactccttcagccaatggcagatatatcattgatggtccggttgtgacaataaaagacattgaaaacgttttgcgcgaattctttcctgatttgtgtattgctgataggaatgaagacattactgagctgaattcagtgactttcaatgtgtgtctggataaagtgaaaagtttgggaataattgagttcactcctacagaaacaagccttagagacactgttcttagtctcaaggagaaatgtcttgtgtgatcttctttattgtttttggttacttgttattccttgcaggtctatatacatttcacaaatt

SEQ ID NO: 81330 - protein, 325 aa, Arabidopsis thaliana
  peptide (1)..(325): Ceres Seq. ID no. 12659335
MADGGKVVCVTGASGYIASWIVKLLLFRGYTINATVRDPKDRKKTDHLLALDGAKERLKLFKADLLDEGSFELAIDGCETVFHTASPVAITVKTDPQVELINPAVNGTINVLRTCTKVSSVKRVILTSSMAAVLAPETKLGPNDVVDETFFTNPSFAEERKQWYVLSKTLAEDAAWRFAKDNEIDLIVLNPGLVTGPILQPTLNFSVAVIVELMKGKNPFNTTHHRFVDVRDVALAHVKALETPSANGRYIIDGPVVTIKDIENVLREFFPDLCIADRNEDITELNSVTFNVCLDKVKSLGIIEFTPTETSLRDTVLSLKEKCLV

SEQ ID NO: 81331 - protein, 196 aa, Arabidopsis thaliana
  peptide (1)..(196): Ceres Seq. ID no. 12659336
MAAVLAPETKLGPNDVVDETFFTNPSFAEERKQWYVLSKTLAEDAAWRFAKDNEIDLIVLNPGLVTGPILQPTLNFSVAVIVELMKGKNPFNTTHHRFVDVRDVALAHVKALETPSANGRYIIDGPVVTIKDIENVLREFFPDLCIADRNEDITELNSVTFNVCLDKVKSLGIIEFTPTETSLRDTVLSLKEKCLV

SEQ ID NO: 81332 - DNA, 1092 bp, Arabidopsis thaliana
  misc_feature (1)..(1092): Ceres Seq. ID no. 12659350
  misc_feature (1)..(1092): Ortholog of  Ceres SEQ ID NO 13656404 as cited in SEQ ID NO 65806
  misc_feature (1)..(1092): Ortholog of  Ceres SEQ ID NO 12779935 as cited in SEQ ID NO 66774
  misc_feature (1)..(1092): Ortholog of  Ceres SEQ ID NO 13598695 as cited in SEQ ID NO 67368
  misc_feature (1)..(1092): Ortholog of  Ceres SEQ ID NO 13591174 as cited in SEQ ID NO 68289
atgaaaaccttcaacgagtccaatggaacaaatgcaaatgtcctgatggtaggactcacgctcgtccaagccgctgctgctaaaggagcggtgtgtctggatgggtcagtgcctggatatcatttgtgtcgcgggtatggttcaggagcaaacaactggatcattcagttgcagggaggtgcatggtgtgacagcatacaaaactgtcagagccgtaaagggagtggttatggatcatctaccttaatggagaaagagttggcatttttaggattactaagcaataaagccgctgaaaatccagacttttacaattggaacaaagtaaaagtccggtattgtgatggtgcatcctttgatggtgacagcgaaaacaaggcggcacaacttcagtatagaggaaagcgtatatttttagctgtcatggaagatttgatggaaaagggaatgcgtcaggcaaaacaggctttgctcagcggatgttcttctgggggtctttctgccattttacgatgcgatgatttcaataacttgtttcctcctaccaccacagtaaaatgcatgagcgatgctggcttcttcctcgacgccgttgatgtatctggaggtcattctttaaggcgtatgtattctggtgttgtgaacactcagggtttgcaaaacacacttcctcccacttgtacaagccatatcaaaccatttttgtgttttttccctcaatacataatcaaccaagtcaagaccccgttgtttattctcaactcgggatttgattcgtggcagattggaaatagtttagccccaccatctgctgataagagtggcagttggcataactgcagttttagctttaggtgcactgcctctcagatgcacttcttagaaggtttcaagatgagcatgttagatgcgttgaagaccttttcgaagtttagcaagaatggagttttaattacctcgggatgggctcattgtcaagcggagagacaagatacttggtttcctggatactctggagcgggcaaagctaaggggattgctgtggctgttggagattggtatttcgaaagaacaaaacagaatagctcatag

SEQ ID NO: 81333 - protein, 363 aa, Arabidopsis thaliana
  peptide (1)..(363): Ceres Seq. ID no. 12659351
MKTFNESNGTNANVLMVGLTLVQAAAAKGAVCLDGSVPGYHLCRGYGSGANNWIIQLQGGAWCDSIQNCQSRKGSGYGSSTLMEKELAFLGLLSNKAAENPDFYNWNKVKVRYCDGASFDGDSENKAAQLQYRGKRIFLAVMEDLMEKGMRQAKQALLSGCSSGGLSAILRCDDFNNLFPPTTTVKCMSDAGFFLDAVDVSGGHSLRRMYSGVVNTQGLQNTLPPTCTSHIKPFLCFFPQYIINQVKTPLFILNSGFDSWQIGNSLAPPSADKSGSWHNCSFSFRCTASQMHFLEGFKMSMLDALKTFSKFSKNGVLITSGWAHCQAERQDTWFPGYSGAGKAKGIAVAVGDWYFERTKQNSS

SEQ ID NO: 81334 - protein, 348 aa, Arabidopsis thaliana
  peptide (1)..(348): Ceres Seq. ID no. 12659352
MVGLTLVQAAAAKGAVCLDGSVPGYHLCRGYGSGANNWIIQLQGGAWCDSIQNCQSRKGSGYGSSTLMEKELAFLGLLSNKAAENPDFYNWNKVKVRYCDGASFDGDSENKAAQLQYRGKRIFLAVMEDLMEKGMRQAKQALLSGCSSGGLSAILRCDDFNNLFPPTTTVKCMSDAGFFLDAVDVSGGHSLRRMYSGVVNTQGLQNTLPPTCTSHIKPFLCFFPQYIINQVKTPLFILNSGFDSWQIGNSLAPPSADKSGSWHNCSFSFRCTASQMHFLEGFKMSMLDALKTFSKFSKNGVLITSGWAHCQAERQDTWFPGYSGAGKAKGIAVAVGDWYFERTKQNSS

SEQ ID NO: 81335 - protein, 281 aa, Arabidopsis thaliana
  peptide (1)..(281): Ceres Seq. ID no. 12659353
MEKELAFLGLLSNKAAENPDFYNWNKVKVRYCDGASFDGDSENKAAQLQYRGKRIFLAVMEDLMEKGMRQAKQALLSGCSSGGLSAILRCDDFNNLFPPTTTVKCMSDAGFFLDAVDVSGGHSLRRMYSGVVNTQGLQNTLPPTCTSHIKPFLCFFPQYIINQVKTPLFILNSGFDSWQIGNSLAPPSADKSGSWHNCSFSFRCTASQMHFLEGFKMSMLDALKTFSKFSKNGVLITSGWAHCQAERQDTWFPGYSGAGKAKGIAVAVGDWYFERTKQNSS

SEQ ID NO: 81336 - DNA, 1151 bp, Arabidopsis thaliana
  misc_feature (1)..(1151): Ceres Seq. ID no. 12659354
  misc_feature (1)..(1151): Ortholog of  Ceres SEQ ID NO 12336358 as cited in SEQ ID NO 20733
atcttttaatcgtttgatctgtgaacctaacttttattcaatttcgctttcaccaaatccagagctaagatcttcagattcgtgggtcaaataatgtggtcaatgggtttgataaggcgtacggcaatgtccaatgccattagagcttcttcgcaaaggacatggcttggtcacggtggattaagaagctgcgtcaccgtcaaaacaccgtcggaggatgaagaggagaagaagaaagagataactatagcggaagcgaagaagctaatgaggcttgtgaatgttgaagacatgaagaagaagcttgttggtgtggctgatagagatgttgtctcttactctacacttttagaagcttctcaaggaatgggtatcgctagatctcccgatgaagctcatgtctttgctcgtgttcttgacgatgctggcgttgtcttgatctttcgtgataaagtctatcttcacccagacaaggtggtggatctgattagaagagcgatgcctttggaccagaatccagaggaagatcaaatcaaggaagaattcaacaaattgagaatcatgaaagaagagattgatgttttggctcatagacaagtgaggaagattctttggtgtggtttagctacttcgatggttcaaattggactcttttttagattaactttctgggaattctcatgggatgtgatggaaccaatcactttcttcgctacagcgactggaatcattgtgggttatgcttatttcttgatgacttcgagagatccgacatatcaggatttcatgaagaggctcttcttgtcgagacagaggaagttgttgaagagtcataagtttgactgcgagaggtttaaggaattggagaggttatttaaaatgacgtcgtcttgtcatgcagctgcgtctataaggaatcgtgttggattagaacttgatctcgaggatgctttgcagagtcgcagggactgattattatgaaaaactttcttcatgtcctccggtggttcatcaaactgaagaagaagatgatcagtccttgcaaaagagtgacaaagattgttttccgtcatcttcttctacttcttatacataagtaaccattgacattgtttattacagtgacgataacagattttaaatgttctttt

SEQ ID NO: 81337 - protein, 292 aa, Arabidopsis thaliana
  peptide (1)..(292): Ceres Seq. ID no. 12659355
MWSMGLIRRTAMSNAIRASSQRTWLGHGGLRSCVTVKTPSEDEEEKKKEITIAEAKKLMRLVNVEDMKKKLVGVADRDVVSYSTLLEASQGMGIARSPDEAHVFARVLDDAGVVLIFRDKVYLHPDKVVDLIRRAMPLDQNPEEDQIKEEFNKLRIMKEEIDVLAHRQVRKILWCGLATSMVQIGLFFRLTFWEFSWDVMEPITFFATATGIIVGYAYFLMTSRDPTYQDFMKRLFLSRQRKLLKSHKFDCERFKELERLFKMTSSCHAAASIRNRVGLELDLEDALQSRRD

SEQ ID NO: 81338 - protein, 289 aa, Arabidopsis thaliana
  peptide (1)..(289): Ceres Seq. ID no. 12659356
MGLIRRTAMSNAIRASSQRTWLGHGGLRSCVTVKTPSEDEEEKKKEITIAEAKKLMRLVNVEDMKKKLVGVADRDVVSYSTLLEASQGMGIARSPDEAHVFARVLDDAGVVLIFRDKVYLHPDKVVDLIRRAMPLDQNPEEDQIKEEFNKLRIMKEEIDVLAHRQVRKILWCGLATSMVQIGLFFRLTFWEFSWDVMEPITFFATATGIIVGYAYFLMTSRDPTYQDFMKRLFLSRQRKLLKSHKFDCERFKELERLFKMTSSCHAAASIRNRVGLELDLEDALQSRRD

SEQ ID NO: 81339 - protein, 281 aa, Arabidopsis thaliana
  peptide (1)..(281): Ceres Seq. ID no. 12659357
MSNAIRASSQRTWLGHGGLRSCVTVKTPSEDEEEKKKEITIAEAKKLMRLVNVEDMKKKLVGVADRDVVSYSTLLEASQGMGIARSPDEAHVFARVLDDAGVVLIFRDKVYLHPDKVVDLIRRAMPLDQNPEEDQIKEEFNKLRIMKEEIDVLAHRQVRKILWCGLATSMVQIGLFFRLTFWEFSWDVMEPITFFATATGIIVGYAYFLMTSRDPTYQDFMKRLFLSRQRKLLKSHKFDCERFKELERLFKMTSSCHAAASIRNRVGLELDLEDALQSRRD

SEQ ID NO: 81340 - DNA, 849 bp, Arabidopsis thaliana
  misc_feature (1)..(849): Ceres Seq. ID no. 12659358
  misc_feature (1)..(849): Ortholog of  Ceres SEQ ID NO 13648488 as cited in SEQ ID NO 20419
  misc_feature (1)..(849): Ortholog of  Ceres SEQ ID NO 15171378 as cited in SEQ ID NO 51582
atgaggcctaaagcaaatcaaaaccacaagctgaaggttctccttgtttttcttcttgccaccttaattctcatcttcatcgtgagatcaactctgacatcttcacaggaacaccagactccacaagagacaagatcaacgcgttgctctggtgcctgcaataagctaccacgttccctcgcacaagccctgatccattactcgacctcagttatcacaccacaacaaacgctcaaagagatagcggtaagcagtagagtactcggcaagaagtcaccctgcaatttcttggtgtttggtctaggccatgacagcctcatgtggagctctctcaactatggaggccggactgtgtttcttgaagaagatgaagcatggataaaacagatcaagagacggtttccgatgctggaatcgtaccatgtaacatatgacagtaaagtcaatcaagccgataatctcatagaagtcggaaaaggacctgaatgcacagccattggagatccaaggtactcaatgtgtcaactagcactcaagggtttgcctgcagaaatttatgagaccggttgggatctaatcatggttgatgcaccgactggctactacgatgaggctcctgggagaatgacagcaatttacactgcgggaatgatggcaaggaacaggaaacagggaggagagactgatgtgtttgtgcatgatgttaacagggaaatagaagacaagttttctaaggctttcttgtgtgaagggtacatgaagaaacaggaagggagactaaggcattttattatccctagctatagagatggatcagaatcagaatcaaatagacccttttgtccatag

SEQ ID NO: 81341 - protein, 282 aa, Arabidopsis thaliana
  peptide (1)..(282): Ceres Seq. ID no. 12659359
MRPKANQNHKLKVLLVFLLATLILIFIVRSTLTSSQEHQTPQETRSTRCSGACNKLPRSLAQALIHYSTSVITPQQTLKEIAVSSRVLGKKSPCNFLVFGLGHDSLMWSSLNYGGRTVFLEEDEAWIKQIKRRFPMLESYHVTYDSKVNQADNLIEVGKGPECTAIGDPRYSMCQLALKGLPAEIYETGWDLIMVDAPTGYYDEAPGRMTAIYTAGMMARNRKQGGETDVFVHDVNREIEDKFSKAFLCEGYMKKQEGRLRHFIIPSYRDGSESESNRPFCP

SEQ ID NO: 81342 - protein, 176 aa, Arabidopsis thaliana
  peptide (1)..(176): Ceres Seq. ID no. 12659360
MWSSLNYGGRTVFLEEDEAWIKQIKRRFPMLESYHVTYDSKVNQADNLIEVGKGPECTAIGDPRYSMCQLALKGLPAEIYETGWDLIMVDAPTGYYDEAPGRMTAIYTAGMMARNRKQGGETDVFVHDVNREIEDKFSKAFLCEGYMKKQEGRLRHFIIPSYRDGSESESNRPFCP

SEQ ID NO: 81343 - protein, 147 aa, Arabidopsis thaliana
  peptide (1)..(147): Ceres Seq. ID no. 12659361
MLESYHVTYDSKVNQADNLIEVGKGPECTAIGDPRYSMCQLALKGLPAEIYETGWDLIMVDAPTGYYDEAPGRMTAIYTAGMMARNRKQGGETDVFVHDVNREIEDKFSKAFLCEGYMKKQEGRLRHFIIPSYRDGSESESNRPFCP

SEQ ID NO: 81344 - DNA, 1824 bp, Arabidopsis thaliana
  misc_feature (1)..(1824): Ceres Seq. ID no. 12659372
  misc_feature (1)..(1824): Ortholog of  Ceres SEQ ID NO 13657677 as cited in SEQ ID NO 66119
atgttcagaatcgaaattctaagatgcacactctctcaatctcacccacagagattctctcgtgcatcattcctcttgtcaacatggtactctcaagaatctgtctccgcggcagacaacgacgatgacccagttcttgttaaactctcagttgccatcagagattcttacaaggatccgccgttggagttctcttcgttcactgactgcccctctatcagaaaggtcctgccttcgctcagcgttcatcatgtggttgatctcatcaaccataaccctctctccctcccacaacgttctatcttcgctttcttcaaattcatctcatctcagcctggatttcgttttaccgttgagacttacttcgtcttggctcgttttcttgctgttcacgaaatgttcaccgaagcacagtcacttatcgagctcgtcgtctctcgtaaaggcaaaaactcagcttcttcagttttcatttctttggtagaaatgagagtaacacctatgtgtggtttccttgttgatgctttgatgatcacgtacacggatctaggtttcatacccgatgctattcaatgttttaggctatctcggaagcataggtttgatgttccaattcgtggctgtggcaatttgcttgatcggatgatgaagctgaatccaactgggactatttggggattctatatggagattttggatgctgggtttcccttgaatgtgtacgttttcaatattttgatgaacaaattctgtaaagaaggcaatatatctgatgcacagaaggtgttcgacgaaattactaaaaggagtttgcagcctacagtggttagtttcaacactttgataaatgggtattgtaaagtaggaaacttggatgaagggtttaggctcaaacatcagatggagaaaagcagaacacgcccagatgttttcacctatagtgccttgattaatgcattgtgtaaagagaacaaaatggatggagcacatggcctgtttgatgagatgtgtaagagagggttgatcccaaatgatgttattttcactactttgattcatggtcatagtaggaatggagagattgacttgatgaaagaaagttatcagaagatgttaagtaagggtctgcagcctgatattgttttatataatactttagtaaatggcttttgtaagaacggggatttggtggctgcaaggaatatagttgatggaatgattcgtagaggtctgaggcccgacaaaattacatacacaactcttatagatggattttgtagaggaggagatgtagaaacagctttggagataaggaaggagatggatcagaatgggatagaactcgatagggtgggtttctcagcccttgtttgtggaatgtgcaaagaaggaagagtcattgatgctgaaagagctttaagagagatgctgcgagctggtattaaaccggatgatgtaacctatacaatgatgatggatgcattctgtaagaaaggtgatgctcagaccggtttcaaattgctcaaggaaatgcagagcgatgggcatgttcctagtgttgtgacgtataatgttctgctgaatggtctatgcaaattgggacagatgaagaatgctgatatgttgctagatgccatgcttaatataggggttgttccagatgacatcacatacaacactctattggaaggtcaccatagacatgcaaattcatcgaagcgttatatacagaaaccggagataggtattgtagctgacttggcttcttacaaatcaatagtcaatgagctagatagagcttcaaaagatcaccggaacagataa

SEQ ID NO: 81345 - protein, 607 aa, Arabidopsis thaliana
  peptide (1)..(607): Ceres Seq. ID no. 12659373
MFRIEILRCTLSQSHPQRFSRASFLLSTWYSQESVSAADNDDDPVLVKLSVAIRDSYKDPPLEFSSFTDCPSIRKVLPSLSVHHVVDLINHNPLSLPQRSIFAFFKFISSQPGFRFTVETYFVLARFLAVHEMFTEAQSLIELVVSRKGKNSASSVFISLVEMRVTPMCGFLVDALMITYTDLGFIPDAIQCFRLSRKHRFDVPIRGCGNLLDRMMKLNPTGTIWGFYMEILDAGFPLNVYVFNILMNKFCKEGNISDAQKVFDEITKRSLQPTVVSFNTLINGYCKVGNLDEGFRLKHQMEKSRTRPDVFTYSALINALCKENKMDGAHGLFDEMCKRGLIPNDVIFTTLIHGHSRNGEIDLMKESYQKMLSKGLQPDIVLYNTLVNGFCKNGDLVAARNIVDGMIRRGLRPDKITYTTLIDGFCRGGDVETALEIRKEMDQNGIELDRVGFSALVCGMCKEGRVIDAERALREMLRAGIKPDDVTYTMMMDAFCKKGDAQTGFKLLKEMQSDGHVPSVVTYNVLLNGLCKLGQMKNADMLLDAMLNIGVVPDDITYNTLLEGHHRHANSSKRYIQKPEIGIVADLASYKSIVNELDRASKDHRNR

SEQ ID NO: 81346 - protein, 475 aa, Arabidopsis thaliana
  peptide (1)..(475): Ceres Seq. ID no. 12659374
MFTEAQSLIELVVSRKGKNSASSVFISLVEMRVTPMCGFLVDALMITYTDLGFIPDAIQCFRLSRKHRFDVPIRGCGNLLDRMMKLNPTGTIWGFYMEILDAGFPLNVYVFNILMNKFCKEGNISDAQKVFDEITKRSLQPTVVSFNTLINGYCKVGNLDEGFRLKHQMEKSRTRPDVFTYSALINALCKENKMDGAHGLFDEMCKRGLIPNDVIFTTLIHGHSRNGEIDLMKESYQKMLSKGLQPDIVLYNTLVNGFCKNGDLVAARNIVDGMIRRGLRPDKITYTTLIDGFCRGGDVETALEIRKEMDQNGIELDRVGFSALVCGMCKEGRVIDAERALREMLRAGIKPDDVTYTMMMDAFCKKGDAQTGFKLLKEMQSDGHVPSVVTYNVLLNGLCKLGQMKNADMLLDAMLNIGVVPDDITYNTLLEGHHRHANSSKRYIQKPEIGIVADLASYKSIVNELDRASKDHRNR

SEQ ID NO: 81347 - protein, 445 aa, Arabidopsis thaliana
  peptide (1)..(445): Ceres Seq. ID no. 12659375
MRVTPMCGFLVDALMITYTDLGFIPDAIQCFRLSRKHRFDVPIRGCGNLLDRMMKLNPTGTIWGFYMEILDAGFPLNVYVFNILMNKFCKEGNISDAQKVFDEITKRSLQPTVVSFNTLINGYCKVGNLDEGFRLKHQMEKSRTRPDVFTYSALINALCKENKMDGAHGLFDEMCKRGLIPNDVIFTTLIHGHSRNGEIDLMKESYQKMLSKGLQPDIVLYNTLVNGFCKNGDLVAARNIVDGMIRRGLRPDKITYTTLIDGFCRGGDVETALEIRKEMDQNGIELDRVGFSALVCGMCKEGRVIDAERALREMLRAGIKPDDVTYTMMMDAFCKKGDAQTGFKLLKEMQSDGHVPSVVTYNVLLNGLCKLGQMKNADMLLDAMLNIGVVPDDITYNTLLEGHHRHANSSKRYIQKPEIGIVADLASYKSIVNELDRASKDHRNR

SEQ ID NO: 81348 - DNA, 1568 bp, Arabidopsis thaliana
  misc_feature (1)..(1568): Ceres Seq. ID no. 12659376
  misc_feature (1)..(1568): Ortholog of  Ceres SEQ ID NO 13595871 as cited in SEQ ID NO 65045
agaagaatcatctctctctctctgcttcttcgcagcagcagcacgtttctttcttgctcttcgccgtgccctactaacctattattcgtctcttcagctacattctgctcgtgaaaatgacctccactgatgtttcctctggtgtttccaattgctatgttttcaaaagtcggttgcaggagtatgctcagaagtacaagctcccaacgcctgtttatgagatcgttaaagaaggcccttcacacaaatctttatttcaatcgactgtgatactggatggtgtcagatataattctttgcctggattcttcaatcgtaaggctgcagagcaatcagctgccgaggttgctctccgggaattagcaaaatccagtgagctaagccaatgtgtttcacaacctgttcacgaaacgggattatgcaagaacctacttcaagaatacgctcaaaagatgaattacgcgattccattgtatcagtgccagaaggtcgaaactcttgggagagttacacaattcacatgtactgtagagattggaggcataaagtacacaggagctgcaacaagaactaaaaaagatgctgagattagcgctgggagaactgctcttttagcgatccagtcagacactaaaaacaaccttgccaactacaacactcagcttactgtacttccttgtgagaagaagacaatacaggcagctatcccgcttaaagaaaccgtcaagactcttaaagccaggaaggctcagttcaagaagaaagctcagaaaggaaaacgcacagtagctaaaaatcctgaagatattatcatccctcctcaacctactgatcattgtcaaaacgatcagtcagagaaaattgagacaacgccaaatctggaaccttcttcatgcatgaacgggttaaaggaggcagcatttgggagtgtggagacagagaaaattgagacaacgccaaatctggaacctccttcatgcatgaacgggttaaaggaggcagcatttgggagtgtggagacagagaaaattgagacaacgccaaatctggaacctccttcatgcatgaacgggttaaaggaggcagcatttgggagtgtggagacagagaaaattgagacaacgccaaatctggaaccttcttcatgcatgaacgggttaaaggaggcagcatttgggagtgtggagacagagaaaattgagacaacgccaaatctggaacctccttcatgcatgaacgggttaaaggaggcagcatttgggagtgtggagacagagaaaattgagacaacgccaaatctggaatcttcttcatgcatgagcgggttaaaggaggcagcatttgggagtgtggagacagaagcaagccacgcataacagtgtcaagatggagtcttgtgagtttgtcatagttactatatggttacgtagccattttgtgattcctatctagtctagtagtaattcacagattgaagagaagtaatatttgagcggaaaatcaaaactaatatgattggtacaatttggtggtcgattgagtcattcgaataaagtaatgtggggttg

SEQ ID NO: 81349 - protein, 419 aa, Arabidopsis thaliana
  peptide (1)..(419): Ceres Seq. ID no. 12659377
MTSTDVSSGVSNCYVFKSRLQEYAQKYKLPTPVYEIVKEGPSHKSLFQSTVILDGVRYNSLPGFFNRKAAEQSAAEVALRELAKSSELSQCVSQPVHETGLCKNLLQEYAQKMNYAIPLYQCQKVETLGRVTQFTCTVEIGGIKYTGAATRTKKDAEISAGRTALLAIQSDTKNNLANYNTQLTVLPCEKKTIQAAIPLKETVKTLKARKAQFKKKAQKGKRTVAKNPEDIIIPPQPTDHCQNDQSEKIETTPNLEPSSCMNGLKEAAFGSVETEKIETTPNLEPPSCMNGLKEAAFGSVETEKIETTPNLEPPSCMNGLKEAAFGSVETEKIETTPNLEPSSCMNGLKEAAFGSVETEKIETTPNLEPPSCMNGLKEAAFGSVETEKIETTPNLESSSCMSGLKEAAFGSVETEASHA

SEQ ID NO: 81350 - protein, 307 aa, Arabidopsis thaliana
  peptide (1)..(307): Ceres Seq. ID no. 12659378
MNYAIPLYQCQKVETLGRVTQFTCTVEIGGIKYTGAATRTKKDAEISAGRTALLAIQSDTKNNLANYNTQLTVLPCEKKTIQAAIPLKETVKTLKARKAQFKKKAQKGKRTVAKNPEDIIIPPQPTDHCQNDQSEKIETTPNLEPSSCMNGLKEAAFGSVETEKIETTPNLEPPSCMNGLKEAAFGSVETEKIETTPNLEPPSCMNGLKEAAFGSVETEKIETTPNLEPSSCMNGLKEAAFGSVETEKIETTPNLEPPSCMNGLKEAAFGSVETEKIETTPNLESSSCMSGLKEAAFGSVETEASHA

SEQ ID NO: 81351 - DNA, 1821 bp, Arabidopsis thaliana
  misc_feature (1)..(1821): Ceres Seq. ID no. 12659395
  misc_feature (1)..(1821): Ortholog of  Ceres SEQ ID NO 13657677 as cited in SEQ ID NO 66119
atgttccccaaatccttagccgtaagtagaaaaaactcgaatttaacaaaaggagtctctggtttaagaagactctgttcttcttcatctaccatcaccgggagcccttgcccacctagatatgacgtagctgtcatcgctgatctcatagagaagcagcactggtcaaagctcggagttcatgtgacagacataaaccctaacgagctgtttcgacagttgataagttctgagcttgacccagatttgtgtctcaggtactattcctggttagtgaagaacagtgacatctctgtttcacttgagctcacatttaagctcttgcattctcttgccaatgcgaaaaggtactcaaaaatccgatctttccttgatgggtttgtgagaaatggatctgatcatcaagttcactcgattttccatgcaatctctatgtgtgacaatgtttgtgtcaattcgattatagctgatatgttggtattagcttatgcgaataattcgagattcgagttaggatttgaggcgtttaagcgttcaggttattatgggtataagttgtcggctttgtcttgtaagcctttgatgattgcgttgttgaaggagaatcgttctgctgatgttgaatatgtgtataaggagatgattaggaggaagattcaaccaaatgtgttcactttcaatgttgtgatcaatgcgttgtgcaaaactgggaaaatgaataaagctagggatgttatggaggacatgaaagtttatgggtgttctccaaatgtagttagttacaacactctcattgatgggtattgtaagcttggtggaaatgggaaaatgtacaaagcagacgcggttttgaaggaaatggtggagaatgatgtgtctccgaacttgactacattcaatatattgattgatgggttctggaaagatgacaaccttccggggagtatgaaggtgtttaaagagatgctggatcaagacgtgaaaccgaatgtgatctcgtataattcattgataaatggtttgtgcaatggaggaaagatcagcgaggctattagtatgcgcgataagatggtaagtgcaggtgtgcagcctaacctaattacttacaatgctcttataaatgggttttgcaagaacgatatgctgaaggaagctcttgatatgtttggctcagtgaaaggccaaggagctgttcccactactagaatgtataacatgcttatcgatgcgtattgtaagttaggcaaaatcgatgatggctttgcactgaaagaagagatggagcgggaggggattgtaccagatgttggaacttataattgcttgattgctggtctatgtagaaacggtaacatagaagcagctaagaagctttttgatcagttgactagtaaaggacttcctgaccttgtgacgtttcacatactaatggagggatattgcagaaaaggtgaatcgagaaaagcagcaatgcttttgaaagaaatgtcaaagatggggctgaaaccgagacatctgacttataacattgtgatgaaaggctactgtaaggaaggaaatctgaaggcagcaacgaacatgaggacacagatggagaaagaaagacggttgcgaatgaatgtagcgtcatataatgtgcttctgcaaggatattctcaaaagggaaagttggaggatgcaaacatgcttttgaatgagatgttagagaaaggtctagtcccgaaccgaataacctatgagatagttaaagaagaaatggtagatcaaggtttcgtcccagacattgaagggcatctattcaacgtctctaccaaatcctaa

SEQ ID NO: 81352 - protein, 606 aa, Arabidopsis thaliana
  peptide (1)..(606): Ceres Seq. ID no. 12659396
MFPKSLAVSRKNSNLTKGVSGLRRLCSSSSTITGSPCPPRYDVAVIADLIEKQHWSKLGVHVTDINPNELFRQLISSELDPDLCLRYYSWLVKNSDISVSLELTFKLLHSLANAKRYSKIRSFLDGFVRNGSDHQVHSIFHAISMCDNVCVNSIIADMLVLAYANNSRFELGFEAFKRSGYYGYKLSALSCKPLMIALLKENRSADVEYVYKEMIRRKIQPNVFTFNVVINALCKTGKMNKARDVMEDMKVYGCSPNVVSYNTLIDGYCKLGGNGKMYKADAVLKEMVENDVSPNLTTFNILIDGFWKDDNLPGSMKVFKEMLDQDVKPNVISYNSLINGLCNGGKISEAISMRDKMVSAGVQPNLITYNALINGFCKNDMLKEALDMFGSVKGQGAVPTTRMYNMLIDAYCKLGKIDDGFALKEEMEREGIVPDVGTYNCLIAGLCRNGNIEAAKKLFDQLTSKGLPDLVTFHILMEGYCRKGESRKAAMLLKEMSKMGLKPRHLTYNIVMKGYCKEGNLKAATNMRTQMEKERRLRMNVASYNVLLQGYSQKGKLEDANMLLNEMLEKGLVPNRITYEIVKEEMVDQGFVPDIEGHLFNVSTKS

SEQ ID NO: 81353 - protein, 462 aa, Arabidopsis thaliana
  peptide (1)..(462): Ceres Seq. ID no. 12659397
MCDNVCVNSIIADMLVLAYANNSRFELGFEAFKRSGYYGYKLSALSCKPLMIALLKENRSADVEYVYKEMIRRKIQPNVFTFNVVINALCKTGKMNKARDVMEDMKVYGCSPNVVSYNTLIDGYCKLGGNGKMYKADAVLKEMVENDVSPNLTTFNILIDGFWKDDNLPGSMKVFKEMLDQDVKPNVISYNSLINGLCNGGKISEAISMRDKMVSAGVQPNLITYNALINGFCKNDMLKEALDMFGSVKGQGAVPTTRMYNMLIDAYCKLGKIDDGFALKEEMEREGIVPDVGTYNCLIAGLCRNGNIEAAKKLFDQLTSKGLPDLVTFHILMEGYCRKGESRKAAMLLKEMSKMGLKPRHLTYNIVMKGYCKEGNLKAATNMRTQMEKERRLRMNVASYNVLLQGYSQKGKLEDANMLLNEMLEKGLVPNRITYEIVKEEMVDQGFVPDIEGHLFNVSTKS

SEQ ID NO: 81354 - protein, 449 aa, Arabidopsis thaliana
  peptide (1)..(449): Ceres Seq. ID no. 12659398
MLVLAYANNSRFELGFEAFKRSGYYGYKLSALSCKPLMIALLKENRSADVEYVYKEMIRRKIQPNVFTFNVVINALCKTGKMNKARDVMEDMKVYGCSPNVVSYNTLIDGYCKLGGNGKMYKADAVLKEMVENDVSPNLTTFNILIDGFWKDDNLPGSMKVFKEMLDQDVKPNVISYNSLINGLCNGGKISEAISMRDKMVSAGVQPNLITYNALINGFCKNDMLKEALDMFGSVKGQGAVPTTRMYNMLIDAYCKLGKIDDGFALKEEMEREGIVPDVGTYNCLIAGLCRNGNIEAAKKLFDQLTSKGLPDLVTFHILMEGYCRKGESRKAAMLLKEMSKMGLKPRHLTYNIVMKGYCKEGNLKAATNMRTQMEKERRLRMNVASYNVLLQGYSQKGKLEDANMLLNEMLEKGLVPNRITYEIVKEEMVDQGFVPDIEGHLFNVSTKS

SEQ ID NO: 81355 - DNA, 1428 bp, Arabidopsis thaliana
  misc_feature (1)..(1428): Ceres Seq. ID no. 12659423
  misc_feature (1)..(1428): Ortholog of  Ceres SEQ ID NO 14307257 as cited in SEQ ID NO 54628
atggacgcatacaacaatccctcggcggtggagtcgggtgacgccgccgtgaaaagcgtcgacgacgatggtcgagagaagagaacgggaacattttggacggcgagtgcgcacataatcacggcggtcataggctcaggggtgctgtcgttggcttgggctatagcacagcttggttgggtggcaggaaccacagttttggtcgctttcgccatcattacttactacacgtccaccttgctcgccgactgttaccgttcgccggactccatcaccggaacacgcaactataattacatgggcgtcgtccgatcttaccttggtggtaaaaaggttcagctatgtggagtggcacagtacgtgaatctcgtaggggtcactattggttacaccatcactgcctccataagcttagtagcgattgggaaatcaaattgttatcatgacaagggacataaagcgaaatgttctgtatcgaattatccatacatggcggcatttgggatcgtccagatcattctgagccagcttcctaacttccacaagctctctttcctatccatcatcgccgcggttatgtccttctcttatgcgtctatcggaataggcctagccatcgctactgtagcaagtgggaagattggtaagacagaattgacagggacagtgataggtgtggacgtaactgcgtctgaaaaagtttggaaattgtttcaagcgattggagacattgccttttcatacgcttttaccactattctcatcgagattcaggacacattgagatcaagcccaccagagaacaaagtgatgaaacgagcaagtcttgtcggagtctcaaccacaactgttttctacatcttgtgtggttgcatcggatatgctgcgttcggcaaccaagcccctggtgacttccttaccgattttggtttttacgaaccttattggctcatcgactttgccaatgcttgcattgctctccatctaataggtgcctatcaggtgtatgcgcagccgtttttccagtttgttgaggaaaactgcaacaaaaaatggcctcaaagcaatttcatcaacaaagaatactcgtcaaaggttcctttgcttggaaaatgtcgtgtcaacctcttcagactggtttggaggacatgctatgttgttttgacaacatttgtagcaatgatattccccttcttcaatgcgatcttgggtttgctaggggcattcgcgttctggccactcacagtttattttccggtggcaatgcacattgcgcaggctaaagtcaagaagtattctcgtagatggttggccttgaacctcctcgtattggtttgcttgatcgtctcggcccttgccgccgtaggatccatcattggcttaattaatagtgtcaagtcatacaagcccttcaagaatttagactag

SEQ ID NO: 81356 - protein, 475 aa, Arabidopsis thaliana
  peptide (1)..(475): Ceres Seq. ID no. 12659424
MDAYNNPSAVESGDAAVKSVDDDGREKRTGTFWTASAHIITAVIGSGVLSLAWAIAQLGWVAGTTVLVAFAIITYYTSTLLADCYRSPDSITGTRNYNYMGVVRSYLGGKKVQLCGVAQYVNLVGVTIGYTITASISLVAIGKSNCYHDKGHKAKCSVSNYPYMAAFGIVQIILSQLPNFHKLSFLSIIAAVMSFSYASIGIGLAIATVASGKIGKTELTGTVIGVDVTASEKVWKLFQAIGDIAFSYAFTTILIEIQDTLRSSPPENKVMKRASLVGVSTTTVFYILCGCIGYAAFGNQAPGDFLTDFGFYEPYWLIDFANACIALHLIGAYQVYAQPFFQFVEENCNKKWPQSNFINKEYSSKVPLLGKCRVNLFRLVWRTCYVVLTTFVAMIFPFFNAILGLLGAFAFWPLTVYFPVAMHIAQAKVKKYSRRWLALNLLVLVCLIVSALAAVGSIIGLINSVKSYKPFKNLD

SEQ ID NO: 81357 - protein, 376 aa, Arabidopsis thaliana
  peptide (1)..(376): Ceres Seq. ID no. 12659425
MGVVRSYLGGKKVQLCGVAQYVNLVGVTIGYTITASISLVAIGKSNCYHDKGHKAKCSVSNYPYMAAFGIVQIILSQLPNFHKLSFLSIIAAVMSFSYASIGIGLAIATVASGKIGKTELTGTVIGVDVTASEKVWKLFQAIGDIAFSYAFTTILIEIQDTLRSSPPENKVMKRASLVGVSTTTVFYILCGCIGYAAFGNQAPGDFLTDFGFYEPYWLIDFANACIALHLIGAYQVYAQPFFQFVEENCNKKWPQSNFINKEYSSKVPLLGKCRVNLFRLVWRTCYVVLTTFVAMIFPFFNAILGLLGAFAFWPLTVYFPVAMHIAQAKVKKYSRRWLALNLLVLVCLIVSALAAVGSIIGLINSVKSYKPFKNLD

SEQ ID NO: 81358 - protein, 312 aa, Arabidopsis thaliana
  peptide (1)..(312): Ceres Seq. ID no. 12659426
MAAFGIVQIILSQLPNFHKLSFLSIIAAVMSFSYASIGIGLAIATVASGKIGKTELTGTVIGVDVTASEKVWKLFQAIGDIAFSYAFTTILIEIQDTLRSSPPENKVMKRASLVGVSTTTVFYILCGCIGYAAFGNQAPGDFLTDFGFYEPYWLIDFANACIALHLIGAYQVYAQPFFQFVEENCNKKWPQSNFINKEYSSKVPLLGKCRVNLFRLVWRTCYVVLTTFVAMIFPFFNAILGLLGAFAFWPLTVYFPVAMHIAQAKVKKYSRRWLALNLLVLVCLIVSALAAVGSIIGLINSVKSYKPFKNLD

SEQ ID NO: 81359 - DNA, 1588 bp, Arabidopsis thaliana
  misc_feature (1)..(1588): Ceres Seq. ID no. 12659431
  misc_feature (1)..(1588): Ortholog of  Ceres SEQ ID NO 14311731 as cited in SEQ ID NO 51632
aaaaagaaaatgcctctaacttcccttcctctctctatatatttcaaccactctctgtctctcttcctctttgtagtttctcaaatattttcttcagagttggcacgacctcattaataataatcttctctacacctatcaataagagatatattttagagtttcactttggtgcacaaacaaagctcgtacaacattcttcgtatatggctcttcgtcgctgcttacctcaatattcaacaacttcatcttatctctccaagatctggggatttcgtatgcatgggaccaaggcagcagcttctgttgtagaagaacatgtctcgggggcagaacgtgaggatgaagaatatgctgatgtagattgggacaaccttggattcagtcttgtacggacagatttcatgttcgccaccaaaagttgcagagacggaaacttcgaacagggttaccttagccgttacggcaacatcgagctcaaccctgctgctggaattctcaactatggccagggactaatagaggggatgaaagcgtacagaggagaagacggtagggttcttctcttccgtccagagctaaacgcgatgcgtatgaagataggagctgagagaatgtgtatgcattctccttctgttcatcagtttattgaaggtgttaagcagaccgttcttgcaaacaggcgttgggttcctcctccgggcaaaggctcgttgtatctcagaccgttgttgttcggaagtggagcaagcttgggtgtggctgcagcatcagagtacacgtttcttgtgtttggctctcctgttcaaaactacttcaaggaaggcacagcggcgttgaacctgtatgtggaggaggtgattccacgcgcttatcttggaggaactggtggtgtaaaggcaatatccaattacggtccagtgcttgaagtgatgagaagagcaaaatcaagagggttttcggatgttttgtatcttgatgcagatactgggaagaacatagaagaagtctctgctgctaatatattccttgtgaagggcaatacaatagtgacaccagctacgagcggaacgattctcggagggatcacacgtggaagaacgaagtgttccggtagaagaactgaaggaagctgaagaagttttctgcactggaactgccgctggagttgcttctgttggaagcatcacttttaagaacacaaggactgagtacaaagttggagatgggattgttacacagcaacttcgatctattcttgtcggaatacaaactggttctatccaagacactaaagattgggttttgcagattgcctaagttactttcatatcctataaataatgttgcactctcttgatcacccatcaaaagcttttgaaatagtttttggtaaatttgtgacataaatttgtgatatatcaccacatcgtattagtattaaacatttgtttcactcttccaaagagacaaaagcaaaactaaagaccttcaacttcaaggtcaggatatgtaatctaatggtttgtctttgtggcattttgccaccattggttcaaaataccattgctgtatgatcagcctcctc

SEQ ID NO: 81360 - protein, 377 aa, Arabidopsis thaliana
  peptide (1)..(377): Ceres Seq. ID no. 12659432
KENASNFPSSLYIFQPLSVSLPLCSFSNIFFRVGTTSLIIIFSTPINKRYILEFHFGAQTKLVQHSSYMALRRCLPQYSTTSSYLSKIWGFRMHGTKAAASVVEEHVSGAEREDEEYADVDWDNLGFSLVRTDFMFATKSCRDGNFEQGYLSRYGNIELNPAAGILNYGQGLIEGMKAYRGEDGRVLLFRPELNAMRMKIGAERMCMHSPSVHQFIEGVKQTVLANRRWVPPPGKGSLYLRPLLFGSGASLGVAAASEYTFLVFGSPVQNYFKEGTAALNLYVEEVIPRAYLGGTGGVKAISNYGPVLEVMRRAKSRGFSDVLYLDADTGKNIEEVSAANIFLVKGNTIVTPATSGTILGGITRGRTKCSGRRTEGS

SEQ ID NO: 81361 - protein, 309 aa, Arabidopsis thaliana
  peptide (1)..(309): Ceres Seq. ID no. 12659433
MALRRCLPQYSTTSSYLSKIWGFRMHGTKAAASVVEEHVSGAEREDEEYADVDWDNLGFSLVRTDFMFATKSCRDGNFEQGYLSRYGNIELNPAAGILNYGQGLIEGMKAYRGEDGRVLLFRPELNAMRMKIGAERMCMHSPSVHQFIEGVKQTVLANRRWVPPPGKGSLYLRPLLFGSGASLGVAAASEYTFLVFGSPVQNYFKEGTAALNLYVEEVIPRAYLGGTGGVKAISNYGPVLEVMRRAKSRGFSDVLYLDADTGKNIEEVSAANIFLVKGNTIVTPATSGTILGGITRGRTKCSGRRTEGS

SEQ ID NO: 81362 - protein, 285 aa, Arabidopsis thaliana
  peptide (1)..(285): Ceres Seq. ID no. 12659434
MHGTKAAASVVEEHVSGAEREDEEYADVDWDNLGFSLVRTDFMFATKSCRDGNFEQGYLSRYGNIELNPAAGILNYGQGLIEGMKAYRGEDGRVLLFRPELNAMRMKIGAERMCMHSPSVHQFIEGVKQTVLANRRWVPPPGKGSLYLRPLLFGSGASLGVAAASEYTFLVFGSPVQNYFKEGTAALNLYVEEVIPRAYLGGTGGVKAISNYGPVLEVMRRAKSRGFSDVLYLDADTGKNIEEVSAANIFLVKGNTIVTPATSGTILGGITRGRTKCSGRRTEGS

SEQ ID NO: 81363 - DNA, 1623 bp, Arabidopsis thaliana
  misc_feature (1)..(1623): Ceres Seq. ID no. 12659450
  misc_feature (1)..(1623): Ortholog of  Ceres SEQ ID NO 13592852 as cited in SEQ ID NO 20709
  misc_feature (1)..(1623): Ortholog of  Ceres SEQ ID NO 13532807 as cited in SEQ ID NO 53012
  misc_feature (1)..(1623): Ortholog of  Ceres SEQ ID NO 14313425 as cited in SEQ ID NO 54973
  misc_feature (1)..(1623): Ortholog of  Ceres SEQ ID NO 13663060 as cited in SEQ ID NO 60964
  misc_feature (1)..(1623): Ortholog of  Ceres SEQ ID NO 13656849 as cited in SEQ ID NO 65764
  misc_feature (1)..(1623): Ortholog of  Ceres SEQ ID NO 13500573 as cited in SEQ ID NO 67431
  misc_feature (1)..(1623): Ortholog of  Ceres SEQ ID NO 13656501 as cited in SEQ ID NO 69206
gtccgagcgttggccaaatctctctcacttccacaggtttctctctccggccaaatctaacctccggggaacgtcgttggtcacttatcaccgagggaaaacaaaaaatggcgactttggttgatcctcctaatgggataaggaatgaagggaagcattacttctcaatgtggcaaactctgttcgagatcgacactaagtacatgcctatcaagcctattggtcgtggagcttacggtgttgtctgctcctctgttaacagtgacaccaacgagaaagttgctatcaagaagattcacaatgtttatgagaataggatcgatgcgttgaggactcttcgggagctcaagcttctacgccatcttcgacatgagaatgtcattgctttgaaagatgtcatgatgccaattcataagatgagcttcaaggatgtttatcttgtttatgagctcatggacactgatctccaccagattatcaagtcttctcaagttcttagtaacgatcattgccaatacttcttgttccagttgcttcgagggctcaagtatattcattcagccaatatcctgcaccgagatttgaaacctggtaaccttcttgtcaacgcaaactgcgatttaaagatatgcgattttggactagcgcgtgcgagcaacaccaagggtcagttcatgactgaatatgttgtgactcgttggtaccgagccccagagcttctcctctgttgtgacaactatggaacatccattgatgtttggtctgttggttgcattttcgccgagcttcttggtaggaaaccgatattccaaggaacggaatgtcttaaccagctgaagctcattgtcaacattctcggaagccaaagagaagaagatcttgagttcatagataacccgaaagctaaaagatacattagatcacttccgtactcacctgggatgtctttatccagactttacccgggcgctcatgttttggccatcgaccttctgcagaaaatgcttgtttttgatccgtcaaagaggattagtgtctctgaagcactccagcatccatacatggcgcctctatatgacccgaatgcaaaccctcctgctcaagttcctatcgatctcgatgtagatgaggatttgagagaggagatgataagagaaatgatgtggaatgagatgcttcactaccatccacaagcttcaaccttaaacactgagctctgagctcaagtcttgtttgtacgggtaatttacagaaaacttcttcttcttatgtctgattgtcatcatagactcatagtgtatatagtcttgaaaaataagatgaagactaacttatagtttaagcgaatagtgatgccatggaagctctgttttatttaattacaagcttgatgtgtgtctgtaacatatgtacatagagagagctgttttttttttttaattacaagtttgatgtgtgtctgtaacatatgtacatagaaagagctgtgttttttttttaattacaagcttgatgtgtgtctgtaacatatgttcatagagagagctgtgtttctgtttctctgtttgtttgttgcgttcttgcagaacttttaaccctctcatgcaatccaagccttttgat

SEQ ID NO: 81364 - protein, 405 aa, Arabidopsis thaliana
  peptide (1)..(405): Ceres Seq. ID no. 12659451
PSVGQISLTSTGFSLRPNLTSGERRWSLITEGKQKMATLVDPPNGIRNEGKHYFSMWQTLFEIDTKYMPIKPIGRGAYGVVCSSVNSDTNEKVAIKKIHNVYENRIDALRTLRELKLLRHLRHENVIALKDVMMPIHKMSFKDVYLVYELMDTDLHQIIKSSQVLSNDHCQYFLFQLLRGLKYIHSANILHRDLKPGNLLVNANCDLKICDFGLARASNTKGQFMTEYVVTRWYRAPELLLCCDNYGTSIDVWSVGCIFAELLGRKPIFQGTECLNQLKLIVNILGSQREEDLEFIDNPKAKRYIRSLPYSPGMSLSRLYPGAHVLAIDLLQKMLVFDPSKRISVSEALQHPYMAPLYDPNANPPAQVPIDLDVDEDLREEMIREMMWNEMLHYHPQASTLNTEL

SEQ ID NO: 81365 - protein, 370 aa, Arabidopsis thaliana
  peptide (1)..(370): Ceres Seq. ID no. 12659452
MATLVDPPNGIRNEGKHYFSMWQTLFEIDTKYMPIKPIGRGAYGVVCSSVNSDTNEKVAIKKIHNVYENRIDALRTLRELKLLRHLRHENVIALKDVMMPIHKMSFKDVYLVYELMDTDLHQIIKSSQVLSNDHCQYFLFQLLRGLKYIHSANILHRDLKPGNLLVNANCDLKICDFGLARASNTKGQFMTEYVVTRWYRAPELLLCCDNYGTSIDVWSVGCIFAELLGRKPIFQGTECLNQLKLIVNILGSQREEDLEFIDNPKAKRYIRSLPYSPGMSLSRLYPGAHVLAIDLLQKMLVFDPSKRISVSEALQHPYMAPLYDPNANPPAQVPIDLDVDEDLREEMIREMMWNEMLHYHPQASTLNTEL

SEQ ID NO: 81366 - protein, 350 aa, Arabidopsis thaliana
  peptide (1)..(350): Ceres Seq. ID no. 12659453
MWQTLFEIDTKYMPIKPIGRGAYGVVCSSVNSDTNEKVAIKKIHNVYENRIDALRTLRELKLLRHLRHENVIALKDVMMPIHKMSFKDVYLVYELMDTDLHQIIKSSQVLSNDHCQYFLFQLLRGLKYIHSANILHRDLKPGNLLVNANCDLKICDFGLARASNTKGQFMTEYVVTRWYRAPELLLCCDNYGTSIDVWSVGCIFAELLGRKPIFQGTECLNQLKLIVNILGSQREEDLEFIDNPKAKRYIRSLPYSPGMSLSRLYPGAHVLAIDLLQKMLVFDPSKRISVSEALQHPYMAPLYDPNANPPAQVPIDLDVDEDLREEMIREMMWNEMLHYHPQASTLNTEL

SEQ ID NO: 81367 - DNA, 3181 bp, Arabidopsis thaliana
  misc_feature (1)..(3181): Ceres Seq. ID no. 12659457
  misc_feature (1)..(3181): Ortholog of  Ceres SEQ ID NO 14308128 as cited in SEQ ID NO 51081
  misc_feature (1)..(3181): Ortholog of  Ceres SEQ ID NO 15171088 as cited in SEQ ID NO 54178
  misc_feature (1)..(3181): Ortholog of  Ceres SEQ ID NO 13590691 as cited in SEQ ID NO 66290
cccaacgaaaaatcttagcttaacaccatcgcgaccggattccaaattccggcccatcgtctcaccgggaaagaccccgcctattgccgccgatttcggttccggtctgctcagatctaatcgagtggcttccttcttcctccagatctcttcactttgaatcggttactcgatctcgattcgcggagggcttttgctagtcgcgatggaggcgatcgatgagttgtctcagctctcagattcgatgaagcaggcggcgtctctcctcgccgacgaagatcccgacgaaacctcttcttccaagcgccctgccactttcctcaacgtcgttgccttgggaaatgtgggagctggaaagtctgcagttctaaacagtctaattgggcatccagtgctgccgacgggtgagaatggtgctacacgagctcctataataattgaattgagcagggagagttctttgagcagcaaggcaattatcttgcaaatcgacaataaatctcaacaagtttctgcaagtgctttgagacattctctgcaagatagacttagcaaaggagcctcagggaagaatcgtgatgaaataaacttaaaacttcgtaccagcacagctccaccattgaaattagttgatctgcctggactggaccagagaattgtggacgagtcaatgattgctgaatacgcgcaacacaatgatgccatactgctggttatagtgcctgctagccaggcatctgaaatttcatcatcccgagccctgaagattgcaaaggagtatgatccagagagtactaggacaataggcattattggaaaaattgaccaggcagcagagaactcgaaagcccttgcagctgttcaggctcttctttcaaatcaaggacctccaaaaacaactgacattccatgggttgctgttattggccaatccgtttcaattgcgtcagcacagtctggaagtggtgagaactccttagaaactgcttggcgtgctgagagtgaaagtcttaagtccattttgactggggctccacaaagcaagcttggcagaattgcgttggtggatacccttgctagccagattcgtagcagaatgaagctcaggcttccaagtgtcctgtctgggctccagggtaagtctcaaatagtgcaggatgagctagcgaggcttggtgaacaactagttaacagtgctgaaggtacaagggctatagctttggagctttgccgtgagtttgaagacaagtttcttctgcacttggctggtggtgaaggaagtggttggaaagttgttgcaagttttgaaggaaatttccccaaccgtatcaagcagcttccattggatagacattttgacctgaacaatgttaaaagggttgttttggaggcagatggttatcaaccttatcttatatctccagagaaagggttgagatcgttgataaagattgtccttgagttggctaaagacccggcacgcctttgtgttgatgaggttcaccgagttcttgttgacatagtttcagcttctgcaaatgctacacctggacttgggagatatcctcctttcaagcgagaggttgtagctatagcaagtgcagcacttgatggtttcaagaatgaagccaagaaaatggtggttgcactagttgatatggaacgcgcttttgtaccacctcaacattttatccgtcttgtgcaaaggagaatggaaagacaacgtcgcgaggaagagctgaaagggcgatcttctaagaagggacaagatgcagagcagtcccttttaagcagggctactagtcctcagccagatgggccaacagctggtggtagcttaaaatcaatgaaagacaaacctagtccgcaagataaagagacgccggaggtctctggtctgaaaactgctggacctgagggggagataacagcagggtacttaatgaagaaaagtgcaaaaacaaatgggtggagtaggcgatggtttgttctgaatgagaaaactggaaagcttggctataccaaaaagcaagaagaaagaaactttcggggcacgataactttggaggaatgcactattgaagaaatccccgaggacgaagtagaaaagtcaaagagctcgaaggacaagaaggcaaatggacctgattcaaaaggaccaggccttgtgtttaaaataacctgcaaggttccctataagactgtactcaaagctcacaatgcccttgtgcttaaggctgagagtgtagtcgacaagaacgagtggattaataagttgcaaaaggttatccaggctcgtggaggccaagtgggcagtgtttccatgaggcagagtctttcagaaggttcacttgataagatggttaggaaacccatcgatccagaagaggagctccggtggatgtcccaagaagtacggggttacgttgaagctgttcttaacagccttgcagccaatgttccaaaggctgttgttctttgtcaagtagagaaagcaaaggaagacatgctgaatcaactctacagttctataagtgcaataggcaatgaaaggattgagtcattgatacaagaggatcagaatgtcaaaagacgaagagagcgttaccagaaacaatcctctcttctttctaaactcacgaggcagcttagcattcacgacaaccgagcagcagctgcttcaagttattcggacaacagtggcactgagagtagcccaagagcaagtggaggttcttcaggggacgactggatgaatgccttcaactccgctgctaatggaccctcagactcattgtcaaagtacggttccggtggtcacagccgccgttacagtgaccctgcgcagaacggagatgcagcatcaccagggtctggtagcaaccgccgcaccacccccaatcggttgccaccagcaccaccgcctacaggttcagcttataggtattagaacctgaagaaaaaaccctggaagcgcattgtgtcccgttttctgggactacgttactcttattttttctagtttaagacagtgattggatgattgtactactgttttttggtctttgtagatagatattatcacacacatgtgttggcagctaaaaaagagtttggtctcatgagtcaaatgtctgtttgaatttttgttttatttcttattcaacttttcttggcatcc

SEQ ID NO: 81368 - protein, 914 aa, Arabidopsis thaliana
  peptide (1)..(914): Ceres Seq. ID no. 12659458
MEAIDELSQLSDSMKQAASLLADEDPDETSSSKRPATFLNVVALGNVGAGKSAVLNSLIGHPVLPTGENGATRAPIIIELSRESSLSSKAIILQIDNKSQQVSASALRHSLQDRLSKGASGKNRDEINLKLRTSTAPPLKLVDLPGLDQRIVDESMIAEYAQHNDAILLVIVPASQASEISSSRALKIAKEYDPESTRTIGIIGKIDQAAENSKALAAVQALLSNQGPPKTTDIPWVAVIGQSVSIASAQSGSGENSLETAWRAESESLKSILTGAPQSKLGRIALVDTLASQIRSRMKLRLPSVLSGLQGKSQIVQDELARLGEQLVNSAEGTRAIALELCREFEDKFLLHLAGGEGSGWKVVASFEGNFPNRIKQLPLDRHFDLNNVKRVVLEADGYQPYLISPEKGLRSLIKIVLELAKDPARLCVDEVHRVLVDIVSASANATPGLGRYPPFKREVVAIASAALDGFKNEAKKMVVALVDMERAFVPPQHFIRLVQRRMERQRREEELKGRSSKKGQDAEQSLLSRATSPQPDGPTAGGSLKSMKDKPSPQDKETPEVSGLKTAGPEGEITAGYLMKKSAKTNGWSRRWFVLNEKTGKLGYTKKQEERNFRGTITLEECTIEEIPEDEVEKSKSSKDKKANGPDSKGPGLVFKITCKVPYKTVLKAHNALVLKAESVVDKNEWINKLQKVIQARGGQVGSVSMRQSLSEGSLDKMVRKPIDPEEELRWMSQEVRGYVEAVLNSLAANVPKAVVLCQVEKAKEDMLNQLYSSISAIGNERIESLIQEDQNVKRRRERYQKQSSLLSKLTRQLSIHDNRAAAASSYSDNSGTESSPRASGGSSGDDWMNAFNSAANGPSDSLSKYGSGGHSRRYSDPAQNGDAASPGSGSNRRTTPNRLPPAPPPTGSAYRY

SEQ ID NO: 81369 - protein, 901 aa, Arabidopsis thaliana
  peptide (1)..(901): Ceres Seq. ID no. 12659459
MKQAASLLADEDPDETSSSKRPATFLNVVALGNVGAGKSAVLNSLIGHPVLPTGENGATRAPIIIELSRESSLSSKAIILQIDNKSQQVSASALRHSLQDRLSKGASGKNRDEINLKLRTSTAPPLKLVDLPGLDQRIVDESMIAEYAQHNDAILLVIVPASQASEISSSRALKIAKEYDPESTRTIGIIGKIDQAAENSKALAAVQALLSNQGPPKTTDIPWVAVIGQSVSIASAQSGSGENSLETAWRAESESLKSILTGAPQSKLGRIALVDTLASQIRSRMKLRLPSVLSGLQGKSQIVQDELARLGEQLVNSAEGTRAIALELCREFEDKFLLHLAGGEGSGWKVVASFEGNFPNRIKQLPLDRHFDLNNVKRVVLEADGYQPYLISPEKGLRSLIKIVLELAKDPARLCVDEVHRVLVDIVSASANATPGLGRYPPFKREVVAIASAALDGFKNEAKKMVVALVDMERAFVPPQHFIRLVQRRMERQRREEELKGRSSKKGQDAEQSLLSRATSPQPDGPTAGGSLKSMKDKPSPQDKETPEVSGLKTAGPEGEITAGYLMKKSAKTNGWSRRWFVLNEKTGKLGYTKKQEERNFRGTITLEECTIEEIPEDEVEKSKSSKDKKANGPDSKGPGLVFKITCKVPYKTVLKAHNALVLKAESVVDKNEWINKLQKVIQARGGQVGSVSMRQSLSEGSLDKMVRKPIDPEEELRWMSQEVRGYVEAVLNSLAANVPKAVVLCQVEKAKEDMLNQLYSSISAIGNERIESLIQEDQNVKRRRERYQKQSSLLSKLTRQLSIHDNRAAAASSYSDNSGTESSPRASGGSSGDDWMNAFNSAANGPSDSLSKYGSGGHSRRYSDPAQNGDAASPGSGSNRRTTPNRLPPAPPPTGSAYRY

SEQ ID NO: 81370 - protein, 759 aa, Arabidopsis thaliana
  peptide (1)..(759): Ceres Seq. ID no. 12659460
MIAEYAQHNDAILLVIVPASQASEISSSRALKIAKEYDPESTRTIGIIGKIDQAAENSKALAAVQALLSNQGPPKTTDIPWVAVIGQSVSIASAQSGSGENSLETAWRAESESLKSILTGAPQSKLGRIALVDTLASQIRSRMKLRLPSVLSGLQGKSQIVQDELARLGEQLVNSAEGTRAIALELCREFEDKFLLHLAGGEGSGWKVVASFEGNFPNRIKQLPLDRHFDLNNVKRVVLEADGYQPYLISPEKGLRSLIKIVLELAKDPARLCVDEVHRVLVDIVSASANATPGLGRYPPFKREVVAIASAALDGFKNEAKKMVVALVDMERAFVPPQHFIRLVQRRMERQRREEELKGRSSKKGQDAEQSLLSRATSPQPDGPTAGGSLKSMKDKPSPQDKETPEVSGLKTAGPEGEITAGYLMKKSAKTNGWSRRWFVLNEKTGKLGYTKKQEERNFRGTITLEECTIEEIPEDEVEKSKSSKDKKANGPDSKGPGLVFKITCKVPYKTVLKAHNALVLKAESVVDKNEWINKLQKVIQARGGQVGSVSMRQSLSEGSLDKMVRKPIDPEEELRWMSQEVRGYVEAVLNSLAANVPKAVVLCQVEKAKEDMLNQLYSSISAIGNERIESLIQEDQNVKRRRERYQKQSSLLSKLTRQLSIHDNRAAAASSYSDNSGTESSPRASGGSSGDDWMNAFNSAANGPSDSLSKYGSGGHSRRYSDPAQNGDAASPGSGSNRRTTPNRLPPAPPPTGSAYRY

SEQ ID NO: 81371 - DNA, 1404 bp, Arabidopsis thaliana
  misc_feature (1)..(1404): Ceres Seq. ID no. 12659465
  misc_feature (1)..(1404): Ortholog of  Ceres SEQ ID NO 12586556 as cited in SEQ ID NO 64667
atgcgttgtacttccttctcaagtttcagtttgtctcttgaagacgcacttcatcttctccaacgtttcttatactcctcaaaccagattaagcagattcacacagttcttttgaccagcaacgcattggttgcttcgagatggaagacgaaatgcgtctacaacactctcattcgatcctatctcactacaggagaatacaagacttctcttgctctcttcactcatatgcttgcaagccatgtccaaccaaataacctcactttcccttctctgattaaagcagcttgctcatctttctctgtttcttatggcgttgccttacatggccaagctcttaaacggggttttctatgggatccatttgttcagacttcttttgtccggttctatggtgaagttggtgatttggagagctcgaggaagatgtttgatgatattttaaacccttgtgttgtagcttgtaacagtttgcttgacgcttgtggaagaaacggagagatggattatgctttcgagtattttcagagaatgcctgtaactgatgtggtctcttggaccactgttatcaacgggtttagtaagaaagggttacacgccaaagctttaatggtttttggtgagatgatacagaatgagcgtgcggtaataacacctaacgaggctactttcgtaagtgtactttcttcatgtgctaattttgatcaaggaggtattcgactggggaagcagattcatggatatgttatgagtaaagagatcattcttactacaactttgggtactgctttgcttgatatgtatggaaaagccggtgacttggagatggcattgaccatttttgatcaaattcgtgataagaaagtttgcgcttggaatgcgataatatcagctcttgcctccaatggtagacctaagcaagcgctggagatgtttgagatgatgaaatcaagctatgtgcatccgaatgggatcactttacttgcaatactcacggcttgtgctcgatctaaacttgtggatttaggtattcagttgttctcttctatatgtagcgagtacaagatcattccaacatcagaacattacggttgcgttgttgatctcattggcagagctggactattggttgacgcagccaatttcattcaaagtttgcccttcgagcctgatgcttctgttctcggagctcttttgggcgcttgcaagattcatgagaatactgaattaggaaatacagtaggtaaacagcttattggactgcaacctcaacactgtggccagtatgtggcattgtcgacgttcaatgctttggatagcaattggtcagaagcagaaaaaatgaggaaagccatgatagaagctggaattcggaaaatccctgcttacagtgtgctgacttaa

SEQ ID NO: 81372 - protein, 467 aa, Arabidopsis thaliana
  peptide (1)..(467): Ceres Seq. ID no. 12659466
MRCTSFSSFSLSLEDALHLLQRFLYSSNQIKQIHTVLLTSNALVASRWKTKCVYNTLIRSYLTTGEYKTSLALFTHMLASHVQPNNLTFPSLIKAACSSFSVSYGVALHGQALKRGFLWDPFVQTSFVRFYGEVGDLESSRKMFDDILNPCVVACNSLLDACGRNGEMDYAFEYFQRMPVTDVVSWTTVINGFSKKGLHAKALMVFGEMIQNERAVITPNEATFVSVLSSCANFDQGGIRLGKQIHGYVMSKEIILTTTLGTALLDMYGKAGDLEMALTIFDQIRDKKVCAWNAIISALASNGRPKQALEMFEMMKSSYVHPNGITLLAILTACARSKLVDLGIQLFSSICSEYKIIPTSEHYGCVVDLIGRAGLLVDAANFIQSLPFEPDASVLGALLGACKIHENTELGNTVGKQLIGLQPQHCGQYVALSTFNALDSNWSEAEKMRKAMIEAGIRKIPAYSVLT

SEQ ID NO: 81373 - protein, 391 aa, Arabidopsis thaliana
  peptide (1)..(391): Ceres Seq. ID no. 12659467
MLASHVQPNNLTFPSLIKAACSSFSVSYGVALHGQALKRGFLWDPFVQTSFVRFYGEVGDLESSRKMFDDILNPCVVACNSLLDACGRNGEMDYAFEYFQRMPVTDVVSWTTVINGFSKKGLHAKALMVFGEMIQNERAVITPNEATFVSVLSSCANFDQGGIRLGKQIHGYVMSKEIILTTTLGTALLDMYGKAGDLEMALTIFDQIRDKKVCAWNAIISALASNGRPKQALEMFEMMKSSYVHPNGITLLAILTACARSKLVDLGIQLFSSICSEYKIIPTSEHYGCVVDLIGRAGLLVDAANFIQSLPFEPDASVLGALLGACKIHENTELGNTVGKQLIGLQPQHCGQYVALSTFNALDSNWSEAEKMRKAMIEAGIRKIPAYSVLT

SEQ ID NO: 81374 - protein, 325 aa, Arabidopsis thaliana
  peptide (1)..(325): Ceres Seq. ID no. 12659468
MFDDILNPCVVACNSLLDACGRNGEMDYAFEYFQRMPVTDVVSWTTVINGFSKKGLHAKALMVFGEMIQNERAVITPNEATFVSVLSSCANFDQGGIRLGKQIHGYVMSKEIILTTTLGTALLDMYGKAGDLEMALTIFDQIRDKKVCAWNAIISALASNGRPKQALEMFEMMKSSYVHPNGITLLAILTACARSKLVDLGIQLFSSICSEYKIIPTSEHYGCVVDLIGRAGLLVDAANFIQSLPFEPDASVLGALLGACKIHENTELGNTVGKQLIGLQPQHCGQYVALSTFNALDSNWSEAEKMRKAMIEAGIRKIPAYSVLT

SEQ ID NO: 81375 - DNA, 957 bp, Arabidopsis thaliana
  misc_feature (1)..(957): Ceres Seq. ID no. 12659473
  misc_feature (1)..(957): Ortholog of  Ceres SEQ ID NO 15177083 as cited in SEQ ID NO 51917
  misc_feature (1)..(957): Ortholog of  Ceres SEQ ID NO 12609093 as cited in SEQ ID NO 52008
  misc_feature (1)..(957): Ortholog of  Ceres SEQ ID NO 12609839 as cited in SEQ ID NO 52022
  misc_feature (1)..(957): Ortholog of  Ceres SEQ ID NO 13638931 as cited in SEQ ID NO 52200
  misc_feature (1)..(957): Ortholog of  Ceres SEQ ID NO 13638885 as cited in SEQ ID NO 55803
  misc_feature (1)..(957): Ortholog of  Ceres SEQ ID NO 14301452 as cited in SEQ ID NO 60984
  misc_feature (1)..(957): Ortholog of  Ceres SEQ ID NO 12587429 as cited in SEQ ID NO 63113
  misc_feature (1)..(957): Ortholog of  Ceres SEQ ID NO 12615635 as cited in SEQ ID NO 63133
  misc_feature (1)..(957): Ortholog of  Ceres SEQ ID NO 12586351 as cited in SEQ ID NO 64028
  misc_feature (1)..(957): Ortholog of  Ceres SEQ ID NO 15173174 as cited in SEQ ID NO 64046
  misc_feature (1)..(957): Ortholog of  Ceres SEQ ID NO 13584899 as cited in SEQ ID NO 64830
  misc_feature (1)..(957): Ortholog of  Ceres SEQ ID NO 14301603 as cited in SEQ ID NO 67721
  misc_feature (1)..(957): Ortholog of  Ceres SEQ ID NO 13654441 as cited in SEQ ID NO 67814
  misc_feature (1)..(957): Ortholog of  Ceres SEQ ID NO 13596128 as cited in SEQ ID NO 67831
  misc_feature (1)..(957): Ortholog of  Ceres SEQ ID NO 12589186 as cited in SEQ ID NO 0
  misc_feature (1)..(957): Ortholog of  Ceres SEQ ID NO 12635608 as cited in SEQ ID NO 0
  misc_feature (1)..(957): Ortholog of  Ceres SEQ ID NO 14309027 as cited in SEQ ID NO 0
aaaaacgcttcaacgtgtcaaaacattacatttccactctcacattcagacgcaccaatcctctgttttggattttgaagagaaaatggcaagcagcgacgtgaagctgatcggtgcatgggcgagtccctttgtgatgaggccgaggattgctctaaacctcaagtctgtcccctacgagttcctccaagagacgtttgggtctaagagcgagttgcttcttaaatcaaacccggttcacaagaagatcccggttctgcttcatgctgataaaccggtgagtgagtccaacatcatcgttgagtatatcgatgacacttggagctcatctggaccgtccattctcccttccgatccttacgatcgggccatggctcggttctgggctgcttacatcgacgaaaagtggtttgtcgctctaagaggtttcctaaaagccggaggagaagaagagaagaaagctgtgatagctcaactagaagaagggaatgcgtttctggagaaggcgttcattgattgcagcaaaggaaaaccgttcttcaacggtgacaacatcggttactcgacattgctctcgggtgcttcttggcttggttgagagtcaccgagttagcagtcagctataaaattcttgatgaggccaagacaccttctttgtccaaatgggctgagaatttctgtaatgatcccgctgtaaaacctgtcatgcccgagactgcaaagcttgctgaattcgcaaagaagatctttcctaagccgcaggcctaagttgttggtggactaggttttgtatttgtgggttgggttcttgcaagaataaattaagagtgttattgtttttagatggctttatctttgtgtgtgagttttaatcaggcgtacgttaaacgttacgtatgtatcaggtttggtgaatgattttatttaggttatgttgattgagaagtattttttttt

SEQ ID NO: 81376 - protein, 198 aa, Arabidopsis thaliana
  peptide (1)..(198): Ceres Seq. ID no. 12659474
KTLQRVKTLHFHSHIQTHQSSVLDFEEKMASSDVKLIGAWASPFVMRPRIALNLKSVPYEFLQETFGSKSELLLKSNPVHKKIPVLLHADKPVSESNIIVEYIDDTWSSSGPSILPSDPYDRAMARFWAAYIDEKWFVALRGFLKAGGEEEKKAVIAQLEEGNAFLEKAFIDCSKGKPFFNGDNIGYSTLLSGASWLG

SEQ ID NO: 81377 - protein, 170 aa, Arabidopsis thaliana
  peptide (1)..(170): Ceres Seq. ID no. 12659475
MASSDVKLIGAWASPFVMRPRIALNLKSVPYEFLQETFGSKSELLLKSNPVHKKIPVLLHADKPVSESNIIVEYIDDTWSSSGPSILPSDPYDRAMARFWAAYIDEKWFVALRGFLKAGGEEEKKAVIAQLEEGNAFLEKAFIDCSKGKPFFNGDNIGYSTLLSGASWLG

SEQ ID NO: 81378 - protein, 153 aa, Arabidopsis thaliana
  peptide (1)..(153): Ceres Seq. ID no. 12659476
MRPRIALNLKSVPYEFLQETFGSKSELLLKSNPVHKKIPVLLHADKPVSESNIIVEYIDDTWSSSGPSILPSDPYDRAMARFWAAYIDEKWFVALRGFLKAGGEEEKKAVIAQLEEGNAFLEKAFIDCSKGKPFFNGDNIGYSTLLSGASWLG

SEQ ID NO: 81379 - DNA, 905 bp, Arabidopsis thaliana
  misc_feature (1)..(905): Ceres Seq. ID no. 12659485
  misc_feature (1)..(905): Ortholog of  Ceres SEQ ID NO 13599568 as cited in SEQ ID NO 509
  misc_feature (1)..(905): Ortholog of  Ceres SEQ ID NO 13638595 as cited in SEQ ID NO 52050
  misc_feature (1)..(905): Ortholog of  Ceres SEQ ID NO 13594748 as cited in SEQ ID NO 52114
  misc_feature (1)..(905): Ortholog of  Ceres SEQ ID NO 12583993 as cited in SEQ ID NO 68098
atgattctaaacatactactaacgctcacacttcttatgggtcgggttaaatccgacccggacccgctccaagactactgcgtttctcctcctccttcatctcaccaacaaatcttcctcaacggcaaactttgcaaagatccgacacaagccagcgtctctgacttttcaacatccgcattatccagacccggaaacactaagaccaaaccgtttatgatcaacgtcactgtgaccacaaccgccaacctcccaggtctaaacacagtgggccttacaatggccaggctagacttcggaggctctggtgttgtcccaccgcacgtgcacccacgcgcctccgaagtgacagtctgcctcgacggtgtccttctcgtcgggttcgtggatacgtcgggtcgggtctttacgcaggagcttcatccgggtgagacattcgtgtttcccaaaggtttgatccattttctatataacattgatacggtgagctcagctttggcagtctctgggctgagtagtcagaatcctgggactcagattgtatctttgtcgtctttcatttcaaagcctccgtttctggtagaggttttgaagagtgcttatgatatcaacggccaggatgttgctaggatccgcaaaagtcttgaaggctaaaaatgctaaaagcctaaaactatatataactacatggccaaccaataactatatacaaatgtatatgactaactcaaaactatattatgacaacaacaaaaaaaaacgtataaacaataaaatgtcactaaaaaaggctatacactcaattccgaattgagtttttctgcaattctttagctatcttgttaactatgaatgtttttggaatgtgaacgatttatgatccatagaactatgtaaagagcatt

SEQ ID NO: 81380 - protein, 217 aa, Arabidopsis thaliana
  peptide (1)..(217): Ceres Seq. ID no. 12659486
MILNILLTLTLLMGRVKSDPDPLQDYCVSPPPSSHQQIFLNGKLCKDPTQASVSDFSTSALSRPGNTKTKPFMINVTVTTTANLPGLNTVGLTMARLDFGGSGVVPPHVHPRASEVTVCLDGVLLVGFVDTSGRVFTQELHPGETFVFPKGLIHFLYNIDTVSSALAVSGLSSQNPGTQIVSLSSFISKPPFLVEVLKSAYDINGQDVARIRKSLEG

SEQ ID NO: 81381 - protein, 205 aa, Arabidopsis thaliana
  peptide (1)..(205): Ceres Seq. ID no. 12659487
MGRVKSDPDPLQDYCVSPPPSSHQQIFLNGKLCKDPTQASVSDFSTSALSRPGNTKTKPFMINVTVTTTANLPGLNTVGLTMARLDFGGSGVVPPHVHPRASEVTVCLDGVLLVGFVDTSGRVFTQELHPGETFVFPKGLIHFLYNIDTVSSALAVSGLSSQNPGTQIVSLSSFISKPPFLVEVLKSAYDINGQDVARIRKSLEG

SEQ ID NO: 81382 - protein, 145 aa, Arabidopsis thaliana
  peptide (1)..(145): Ceres Seq. ID no. 12659488
MINVTVTTTANLPGLNTVGLTMARLDFGGSGVVPPHVHPRASEVTVCLDGVLLVGFVDTSGRVFTQELHPGETFVFPKGLIHFLYNIDTVSSALAVSGLSSQNPGTQIVSLSSFISKPPFLVEVLKSAYDINGQDVARIRKSLEG

SEQ ID NO: 81383 - DNA, 1047 bp, Arabidopsis thaliana
  misc_feature (1)..(1047): Ceres Seq. ID no. 12659557
  misc_feature (1)..(1047): Ortholog of  Ceres SEQ ID NO 13594298 as cited in SEQ ID NO 57803
  misc_feature (1)..(1047): Ortholog of  Ceres SEQ ID NO 14301894 as cited in SEQ ID NO 61677
  misc_feature (1)..(1047): Ortholog of  Ceres SEQ ID NO 13503476 as cited in SEQ ID NO 61978
  misc_feature (1)..(1047): Ortholog of  Ceres SEQ ID NO 12578438 as cited in SEQ ID NO 62201
  misc_feature (1)..(1047): Ortholog of  Ceres SEQ ID NO 12617675 as cited in SEQ ID NO 64656
aacaatacatttgagatatcaatactcctgtgagaacaaaatgaagctttcttgtggtacaagctttgcgttcttacttctgtttcttcttgcggcacaatctgtgcatgtctatgcgggtagcttccacaaagacgttcagatacattggggtgatggccgcggaaagattcacgacagagatggaaaacttctttctctctcgctcgacaaatcctctggatccggttttcagtctaaccaggagtttctctatggcaaagccgaggttcaaatgaaacttgttcctggtaattcagctggaacagtgacaacattctatctaaaatctccgggaactacgtgggatgagatcgatttcgagttcttgggaaacataagtggtcatccatatactctccatactaatgtttacacaaaaggcacaggagacaaagaacaacaatttcatctatggttcgacccaaccgttaactttcacacttattgcatcacatggaatcctcaaaggattatttttacggttgatggaattcctattagagagttcaagaaccccgaggcgattggagtcccgttcccaactagacaaccaatgagactctacgcgagtctttgggaagccgagcattgggcaacaagaggaggattagagaaaacagattggtcaaaagctccttttactgctttttatagaaactacaatgtcgatggatgtgtatgggctaatggaaaatcatcttgttccgcgaattccccatggttcactcaaaaactcgattcgaacggccagacaagaatgaaaggtgtgcaaagtaaatacatgatctacaactattgcaccgataaaagaaggtttcctcgaggagttcctgccgagtgcacttaaattcttgattctttgatacatgaatatgttacttggcattgcctttgtaactcaatcaagtttttatttatttttatcatttatttgttgctcatatatacagtatgtggtgtttgtgtaagatgttttaagattgaagtaataaaaataaattatgg

SEQ ID NO: 81384 - protein, 295 aa, Arabidopsis thaliana
  peptide (1)..(295): Ceres Seq. ID no. 12659558
TIHLRYQYSCENKMKLSCGTSFAFLLLFLLAAQSVHVYAGSFHKDVQIHWGDGRGKIHDRDGKLLSLSLDKSSGSGFQSNQEFLYGKAEVQMKLVPGNSAGTVTTFYLKSPGTTWDEIDFEFLGNISGHPYTLHTNVYTKGTGDKEQQFHLWFDPTVNFHTYCITWNPQRIIFTVDGIPIREFKNPEAIGVPFPTRQPMRLYASLWEAEHWATRGGLEKTDWSKAPFTAFYRNYNVDGCVWANGKSSCSANSPWFTQKLDSNGQTRMKGVQSKYMIYNYCTDKRRFPRGVPAECT

SEQ ID NO: 81385 - protein, 282 aa, Arabidopsis thaliana [sequence omitted]

SEQ ID NO: 81386 - protein, 204 aa, Arabidopsis thaliana
  peptide (1)..(204): Ceres Seq. ID no. 12659560
MKLVPGNSAGTVTTFYLKSPGTTWDEIDFEFLGNISGHPYTLHTNVYTKGTGDKEQQFHLWFDPTVNFHTYCITWNPQRIIFTVDGIPIREFKNPEAIGVPFPTRQPMRLYASLWEAEHWATRGGLEKTDWSKAPFTAFYRNYNVDGCVWANGKSSCSANSPWFTQKLDSNGQTRMKGVQSKYMIYNYCTDKRRFPRGVPAECT

SEQ ID NO: 81387 - DNA, 736 bp, Arabidopsis thaliana
  misc_feature (1)..(736): Ceres Seq. ID no. 12659581
  misc_feature (1)..(736): Ortholog of  Ceres SEQ ID NO 12610954 as cited in SEQ ID NO 55930
  misc_feature (1)..(736): Ortholog of  Ceres SEQ ID NO 12625335 as cited in SEQ ID NO 63326
  misc_feature (1)..(736): Ortholog of  Ceres SEQ ID NO 12566590 as cited in SEQ ID NO 0
  misc_feature (1)..(736): Ortholog of  Ceres SEQ ID NO 14305152 as cited in SEQ ID NO 0
  misc_feature (1)..(736): Ortholog of  Ceres SEQ ID NO 15179949 as cited in SEQ ID NO 0
ctcgcattaagtccaaacactttcatttgtctcctttcgtcaactccacagagatctcctcatggctccaattgctgtcggcgatgtcgtaccagacggaactatctccttcttcgatgagaatgatcaacttcagaccgcctccgttcactctctcgccgccggtaaaaaagtcattctctttggtgttcctggtgctttcactcccacttgcagcatgaagcatgttcctgggttcattgagaaagcagaggagctgaagtcaaagggtgttgatgagatcatttgctttagcgtgaacgatccgtttgtgatgaaagcatggggaaaaacatacccagagaacaaacatgtgaagtttgtagctgatgggtctggagaatacacacaccttctcggacttgagcttgaccttaaagacaagggtcttggtgttaggtcaaggagatttgctctgttacttgatgatctcaaagtgactgtagccaatgtcgaatctggtggcgaattcacagtttccagcgccgatgatatcctcaaggctctctaagaaatgtaccacttgtgttgtctatgtaaaccgctgtatgtgtagtagaggattctatagcttgttctcagacattaaccaaggttgtaataaagcggtttcattgtgacttgtttggcataacaaagtatttggttttgttgtttttctgtgcgttgattaatgaaagatgtgactcattgacgt

SEQ ID NO: 81388 - protein, 162 aa, Arabidopsis thaliana
  peptide (1)..(162): Ceres Seq. ID no. 12659582
MAPIAVGDVVPDGTISFFDENDQLQTASVHSLAAGKKVILFGVPGAFTPTCSMKHVPGFIEKAEELKSKGVDEIICFSVNDPFVMKAWGKTYPENKHVKFVADGSGEYTHLLGLELDLKDKGLGVRSRRFALLLDDLKVTVANVESGGEFTVSSADDILKAL

SEQ ID NO: 81389 - protein, 110 aa, Arabidopsis thaliana
  peptide (1)..(110): Ceres Seq. ID no. 12659583
MKHVPGFIEKAEELKSKGVDEIICFSVNDPFVMKAWGKTYPENKHVKFVADGSGEYTHLLGLELDLKDKGLGVRSRRFALLLDDLKVTVANVESGGEFTVSSADDILKAL

SEQ ID NO: 81390 - DNA, 798 bp, Arabidopsis thaliana
  misc_feature (1)..(798): Ceres Seq. ID no. 12659584
  misc_feature (1)..(798): Ortholog of  Ceres SEQ ID NO 12610954 as cited in SEQ ID NO 55930
  misc_feature (1)..(798): Ortholog of  Ceres SEQ ID NO 12625335 as cited in SEQ ID NO 63326
  misc_feature (1)..(798): Ortholog of  Ceres SEQ ID NO 12566590 as cited in SEQ ID NO 0
  misc_feature (1)..(798): Ortholog of  Ceres SEQ ID NO 14305152 as cited in SEQ ID NO 0
  misc_feature (1)..(798): Ortholog of  Ceres SEQ ID NO 15179949 as cited in SEQ ID NO 0
atccttttatctcattctggaaacttcttaccataacagaaaataaacaaatctcattccggaaaacgctcataaattgtccgaaagccctaaaaatctgagtctcgcattaagtccaaacactttcatttgtctcctttcgtcaactccacagagatctcctcatggctccaattgctgtcggcgatgtcgtaccagacggaactatctccttcttcgatgagaatgatcaacttcagaccgcctccgttcactctctcgccgccggtaaaaaagtcattctctttggtgttcctggtgctttcactcccacttgcagcatgaagcatgttcctgggttcattgagaaagcagaggagctgaagtcaaagggtgttgatgagatcatttgctttagcgtgaacgatccgtttgtgatgaaagcatggggaaaaacatacccagagaacaaacatgtgaagtttgtagctgatgggtctggagaatacacacaccttctcggacttgagcttgaccttaaagacaagggtcttggtgttaggtcaaggagatttgctctgttacttgatgatctcaaagtgactgtagccaatgtcgaatctggtggcgaattcacagtttccagcgccgatgatatcctcaaggctctctaagaaatgtaccacttgtgttgtctatgtaaaccgctgtatgtgtagtagaggattctatagcttgttctcagacattaaccaaggttgtaataaagcggtttcattgtgacttgtttggcataacaaagtatttggttttgttgtt

SEQ ID NO: 81391 - protein, 162 aa, Arabidopsis thaliana; identical to SEQ ID NO: 81388
  peptide (1)..(162): Ceres Seq. ID no. 12659585

SEQ ID NO: 81392 - protein, 110 aa, Arabidopsis thaliana; identical to SEQ ID NO: 81389
  peptide (1)..(110): Ceres Seq. ID no. 12659586

SEQ ID NO: 81393 - DNA, 650 bp, Arabidopsis thaliana
  misc_feature (1)..(650): Ceres Seq. ID no. 12659587
  misc_feature (1)..(650): Ortholog of  Ceres SEQ ID NO 12610954 as cited in SEQ ID NO 55930
  misc_feature (1)..(650): Ortholog of  Ceres SEQ ID NO 12625335 as cited in SEQ ID NO 63326
  misc_feature (1)..(650): Ortholog of  Ceres SEQ ID NO 12566590 as cited in SEQ ID NO 0
  misc_feature (1)..(650): Ortholog of  Ceres SEQ ID NO 14305152 as cited in SEQ ID NO 0
  misc_feature (1)..(650): Ortholog of  Ceres SEQ ID NO 15179949 as cited in SEQ ID NO 0
ctttcatttgtctcctttcgtcaactccacagagatctcctcatggctccaattgctgtcggcgatgtcgtaccagacggaactatctccttcttcgatgagaatgatcaacttcagaccgcctccgttcactctctcgccgccggtaaaaaagtcattctctttggtgttcctggtgctttcactcccacttgcagcatgaagcatgttcctgggttcattgagaaagcagaggagctgaagtcaaagggtgttgatgagatcatttgctttagcgtgaacgatccgtttgtgatgaaagcatggggaaaaacatacccagagaacaaacatgtgaagtttgtagctgatgggtctggagaatacacacaccttctcggacttgagcttgaccttaaagacaagggtcttggtgttaggtcaaggagatttgctctgttacttgatgatctcaaagtgactgtagccaatgtcgaatctggtggcgaattcacagtttccagcgccgatgatatcctcaaggctctctaagaaatgtaccacttgtgttgtctatgtaaaccgctgtatgtgtagtagaggattctatagcttgttctcagacattaaccaaggttgtaataaagcggtttcattgtgacttgtttggc

SEQ ID NO: 81394 - protein, 176 aa, Arabidopsis thaliana
  peptide (1)..(176): Ceres Seq. ID no. 12659588
LSFVSFRQLHRDLLMAPIAVGDVVPDGTISFFDENDQLQTASVHSLAAGKKVILFGVPGAFTPTCSMKHVPGFIEKAEELKSKGVDEIICFSVNDPFVMKAWGKTYPENKHVKFVADGSGEYTHLLGLELDLKDKGLGVRSRRFALLLDDLKVTVANVESGGEFTVSSADDILKAL

SEQ ID NO: 81395 - protein, 162 aa, Arabidopsis thaliana; identical to SEQ ID NO: 81388
  peptide (1)..(162): Ceres Seq. ID no. 12659589

SEQ ID NO: 81396 - protein, 110 aa, Arabidopsis thaliana; identical to SEQ ID NO: 81389
  peptide (1)..(110): Ceres Seq. ID no. 12659590

SEQ ID NO: 81397 - DNA, 729 bp, Arabidopsis thaliana
  misc_feature (1)..(729): Ceres Seq. ID no. 12659594
  misc_feature (1)..(729): Ortholog of  Ceres SEQ ID NO 12610954 as cited in SEQ ID NO 55930
  misc_feature (1)..(729): Ortholog of  Ceres SEQ ID NO 12625335 as cited in SEQ ID NO 63326
  misc_feature (1)..(729): Ortholog of  Ceres SEQ ID NO 12566590 as cited in SEQ ID NO 0
  misc_feature (1)..(729): Ortholog of  Ceres SEQ ID NO 14305152 as cited in SEQ ID NO 0
  misc_feature (1)..(729): Ortholog of  Ceres SEQ ID NO 15179949 as cited in SEQ ID NO 0
aagtccaaacactttcatttgtctcctttcgtcaactccacagagatctcctcatggctccaattgctgtcggcgatgtcgtaccagacggaactatctccttcttcgatgagaatgatcaacttcagaccgcctccgttcactctctcgccgccggtaaaaaagtcattctctttggtgttcctggtgctttcactcccacttgcagcatgaagcatgttcctgggttcattgagaaagcagaggagctgaagtcaaagggtgttgatgagatcatttgctttagcgtgaacgatccgtttgtgatgaaagcatggggaaaaacatacccagagaacaaacatgtgaagtttgtagctgatgggtctggagaatacacacaccttctcggacttgagcttgaccttaaagacaagggtcttggtgttaggtcaaggagatttgctctgttacttgatgatctcaaagtgactgtagccaatgtcgaatctggtggcgaattcacagtttccagcgccgatgatatcctcaaggctctctaagaaatgtaccacttgtgttgtctatgtaaaccgctgtatgtgtagtagaggattctatagcttgttctcagacattaaccaaggttgtaataaagcggtttcattgtgacttgtttggcataacaaagtatttggttttgttgtttttctgtgcgttgattaatgaaagatgtgactcattgacgtg

SEQ ID NO: 81398 - protein, 179 aa, Arabidopsis thaliana
  peptide (1)..(179): Ceres Seq. ID no. 12659595
VQTLSFVSFRQLHRDLLMAPIAVGDVVPDGTISFFDENDQLQTASVHSLAAGKKVILFGVPGAFTPTCSMKHVPGFIEKAEELKSKGVDEIICFSVNDPFVMKAWGKTYPENKHVKFVADGSGEYTHLLGLELDLKDKGLGVRSRRFALLLDDLKVTVANVESGGEFTVSSADDILKAL

SEQ ID NO: 81399 - protein, 162 aa, Arabidopsis thaliana; identical to SEQ ID NO: 81388
  peptide (1)..(162): Ceres Seq. ID no. 12659596

SEQ ID NO: 81400 - protein, 110 aa, Arabidopsis thaliana; identical to SEQ ID NO: 81389
  peptide (1)..(110): Ceres Seq. ID no. 12659597

SEQ ID NO: 81401 - DNA, 513 bp, Arabidopsis thaliana
  misc_feature (1)..(513): Ceres Seq. ID no. 12659627
  misc_feature (1)..(513): Ortholog of  Ceres SEQ ID NO 13638318 as cited in SEQ ID NO 60178
atgacgaggttgctctctaggacgttcccgtccgtgaagcttcgcgattccaatcctaaagctcccgaattcaaaaatttgaaaaattcacaaacccaagttccgattccatcgtcttcttctccgcaagagaactcaaagattcccaaatccaaatcctggtctgtttatctcattctctccacgaccgaacccatcaaaacatatgtcggaatcaccaccgatttttctcgccgattaaagcagcacaatggtgaaatcagaggtggtgcaaaagcttcaagtgcaggaagaccatggctttgtgcttgcattatcactggattcacttgtttaagtcaagcttcttcgtttgaatcaaaatggaagatctttacaagaaagttaccgcggagaaagaaagacgaagacatgagtcagagtgatgctttgctacaacaccgtaggagagctttaaacaaagtcgaggaatcattagactgtagttatcttgaaactgactggaaaatctaa

SEQ ID NO: 81402 - protein, 170 aa, Arabidopsis thaliana
  peptide (1)..(170): Ceres Seq. ID no. 12659628
MTRLLSRTFPSVKLRDSNPKAPEFKNLKNSQTQVPIPSSSSPQENSKIPKSKSWSVYLILSTTEPIKTYVGITTDFSRRLKQHNGEIRGGAKASSAGRPWLCACIITGFTCLSQASSFESKWKIFTRKLPRRKKDEDMSQSDALLQHRRRALNKVEESLDCSYLETDWKI

SEQ ID NO: 81403 - DNA, 1771 bp, Arabidopsis thaliana
  misc_feature (1)..(1771): Ceres Seq. ID no. 12659651
  misc_feature (1)..(1771): Ortholog of  Ceres SEQ ID NO 15173087 as cited in SEQ ID NO 67193
accacatatagtctctcctcaactctccagagaagttcttaatttctcctgccaagctgattaagagctctaggaaatggccgaacaacaactaggagtgctaaaggcactcgatgttgcgaagacgcaactttatcatttcacggcgattgtcatcgccggtatgggtttctttaccgatgcctacgatcttttttgcgtgtccttggtgacgaaactccttggccgcatctactatttcaatccggagtcagcgaagcctggctcacttccccctcatgttgcggccgcggtcaacggtgtggccctttgtggaaccctttctggtcaactcttcttcggttggctcggtgacaaactcggacggaaaaaagtgtacggtctcactttggtaatgatgatcttgtgctctgtcgcttctggtctctcttttggccacgaagccaagggtgtcatgaccaccctttgcttcttcaggttttggttgggatttggtattggaggtgactacccactttctgccaccatcatgtctgaatacgcaaacaagaagacccgtggggctttcatcgcagctgtcttcgccatgcaaggtgtcggtatcttggctggaggtttcgtggcactcgcagtatcttctatattcgacaaaaagttcccagctccaacatatgcagtaaacagggccctctcaacgcctcctcaagttgactacatttggcgaatcatcgtcatgtttggtgctttacccgcagctttgacttactactggcgtatgaagatgcctgaaactgcccgttacaccgctttggttgccaagaacatcaaacaagccacagccgacatgtccaaggtcttacaaacagatatcgagcttgaggaaagggtggaggatgacgtcaaagaccccaaacaaaactatggcttgttctccaaggaattccttagacgccatgggcttcatctccttggaactacctccacatggtttttgcttgacattgccttctacagccaaaacttgttccagaaggatattttctcggccatcggatggatcccaaaggcagccaccatgaacgccacccatgaggttttcaggattgctagggctcagactcttatcgccctttgcagtacagtcccaggctactggttcacagttgcgtttattgataccattggaaggtttaagatccaactaaatggatttttcatgatgaccgtgtttatgtttgccattgccttcccttacaaccactggatcaaaccagaaaaccgtatcggatttgtggttatgtactctcttactttcttcttcgccaattttggtccaaatgcaaccacttttattgtccctgctgagatattcccggccaggctaaggtctacatgtcatggaatatcagccgcggctggtaaggctggagccattgttggagcctttgggttcctatatgcggctcaatcacaagacaaggccaaggtagacgcaggatacccaccaggcatcggagttaagaactcattgatcatgcttggtgttcttaactttatcggtatgctcttcaccttccttgtcccagagcccaaaggcaagtcccttgaagaactctctggtgaggctgaggttagccatgacgagaaataattatgtatgtttattttgttatttggagtgcgatgtttggttttgttttcattttattggctcgttgaccttaagttatgatgttataagaatatttatgatatcatttaaatcttgtct

SEQ ID NO: 81404 - protein, 524 aa, Arabidopsis thaliana
  peptide (1)..(524): Ceres Seq. ID no. 12659652
MAEQQLGVLKALDVAKTQLYHFTAIVIAGMGFFTDAYDLFCVSLVTKLLGRIYYFNPESAKPGSLPPHVAAAVNGVALCGTLSGQLFFGWLGDKLGRKKVYGLTLVMMILCSVASGLSFGHEAKGVMTTLCFFRFWLGFGIGGDYPLSATIMSEYANKKTRGAFIAAVFAMQGVGILAGGFVALAVSSIFDKKFPAPTYAVNRALSTPPQVDYIWRIIVMFGALPAALTYYWRMKMPETARYTALVAKNIKQATADMSKVLQTDIELEERVEDDVKDPKQNYGLFSKEFLRRHGLHLLGTTSTWFLLDIAFYSQNLFQKDIFSAIGWIPKAATMNATHEVFRIARAQTLIALCSTVPGYWFTVAFIDTIGRFKIQLNGFFMMTVFMFAIAFPYNHWIKPENRIGFVVMYSLTFFFANFGPNATTFIVPAEIFPARLRSTCHGISAAAGKAGAIVGAFGFLYAAQSQDKAKVDAGYPPGIGVKNSLIMLGVLNFIGMLFTFLVPEPKGKSLEELSGEAEVSHDEK

SEQ ID NO: 81405 - protein, 495 aa, Arabidopsis thaliana
  peptide (1)..(495): Ceres Seq. ID no. 12659653
MGFFTDAYDLFCVSLVTKLLGRIYYFNPESAKPGSLPPHVAAAVNGVALCGTLSGQLFFGWLGDKLGRKKVYGLTLVMMILCSVASGLSFGHEAKGVMTTLCFFRFWLGFGIGGDYPLSATIMSEYANKKTRGAFIAAVFAMQGVGILAGGFVALAVSSIFDKKFPAPTYAVNRALSTPPQVDYIWRIIVMFGALPAALTYYWRMKMPETARYTALVAKNIKQATADMSKVLQTDIELEERVEDDVKDPKQNYGLFSKEFLRRHGLHLLGTTSTWFLLDIAFYSQNLFQKDIFSAIGWIPKAATMNATHEVFRIARAQTLIALCSTVPGYWFTVAFIDTIGRFKIQLNGFFMMTVFMFAIAFPYNHWIKPENRIGFVVMYSLTFFFANFGPNATTFIVPAEIFPARLRSTCHGISAAAGKAGAIVGAFGFLYAAQSQDKAKVDAGYPPGIGVKNSLIMLGVLNFIGMLFTFLVPEPKGKSLEELSGEAEVSHDEK

SEQ ID NO: 81406 - protein, 418 aa, Arabidopsis thaliana
  peptide (1)..(418): Ceres Seq. ID no. 12659654
MMILCSVASGLSFGHEAKGVMTTLCFFRFWLGFGIGGDYPLSATIMSEYANKKTRGAFIAAVFAMQGVGILAGGFVALAVSSIFDKKFPAPTYAVNRALSTPPQVDYIWRIIVMFGALPAALTYYWRMKMPETARYTALVAKNIKQATADMSKVLQTDIELEERVEDDVKDPKQNYGLFSKEFLRRHGLHLLGTTSTWFLLDIAFYSQNLFQKDIFSAIGWIPKAATMNATHEVFRIARAQTLIALCSTVPGYWFTVAFIDTIGRFKIQLNGFFMMTVFMFAIAFPYNHWIKPENRIGFVVMYSLTFFFANFGPNATTFIVPAEIFPARLRSTCHGISAAAGKAGAIVGAFGFLYAAQSQDKAKVDAGYPPGIGVKNSLIMLGVLNFIGMLFTFLVPEPKGKSLEELSGEAEVSHDEK

SEQ ID NO: 81407 - DNA, 1566 bp, Arabidopsis thaliana
  misc_feature (1)..(1566): Ceres Seq. ID no. 12659655
  misc_feature (1)..(1566): Ortholog of  Ceres SEQ ID NO 15173087 as cited in SEQ ID NO 67193
atggccgatcaacagctaggagtgctaaaggcacttgatgttgcgaagacgcaactttaccatttcacggctattgtcattgccggtatgggcttctttacggacgcgtacgatctcttttgtgtgtccttggtgaccaagcttcttggccgcctctactacttcaatccaacgtcagcaaagcctggctcacttccccctcatgttgcggctgcagtcaacggtgtggccctttgtggaacccttgccggtcaactcttcttcggatggcttggtgacaaactcggacggaaaaaggtgtacggtatcactttgatcatgatgattctctgctcagttgcttccggtctttccttgggcaattcggccaagggtgtcatgacgactctttgcttcttcaggttttggctcgggtttggcattggaggtgactaccctctatctgccaccatcatgtctgaatacgctaacaagaagactcgtggggctttcatcgcggcagtgttcgccatgcaaggtgtaggtatcttggcgggaggttttgtggcacttgcagtttcttccatatttgacaaaaagttcccatcgccgacgtatgagcaagacaggtttctatcaacgcctcctcaagctgattacatttggcgaatcatcgtcatgtttggtgctttacccgcagctttgacttactattggcgtatgaagatgcctgaaacagcccgttacaccgctttagttgccaagaacatcaaacaagccacagcagacatgtccaaggtcttacaaacagatctcgagcttgaggaaagggtggaggatgacgtcaaggaccccaaaaaaaactatggcttgttctccaaggaattccttagacgccatgggcttcatctccttgggactacctccacttggtttttgcttgacatcgccttctacagccaaaacttgttccaaaaggatattttctcggccattggatggatcccaaaggcagccactatgaacgccatccatgaggttttcaagattgctagggctcagactctcattgccctctgcagtacagtcccaggttactggttcacagtagcctttattgatatcattggaaggtttgcgatccaactaatgggatttttcatgatgaccgtttttatgtttgctattgccttcccatacaaccactggattttaccagataatcgtatcggattcgtggttatgtactcactcacatttttcttcgccaactttggacccaatgcaactactttcattgtcccagctgaaatctttccagcaaggctaaggtctacgtgccatggaatatcagccgcaactggtaaggctggagccatcgttggagccttcgggttcctatatgctgctcaaccacaggataagaccaagacagacgcaggatacccaccgggcatcggagtcaagaactcattgatcatgcttggtgtcattaactttgttggtatgctcttcaccttcctcgtccctgagcccaagggcaagtcccttgaagaactctccggcgaggctgaggttgataaatga

SEQ ID NO: 81408 - protein, 521 aa, Arabidopsis thaliana
  peptide (1)..(521): Ceres Seq. ID no. 12659656
MADQQLGVLKALDVAKTQLYHFTAIVIAGMGFFTDAYDLFCVSLVTKLLGRLYYFNPTSAKPGSLPPHVAAAVNGVALCGTLAGQLFFGWLGDKLGRKKVYGITLIMMILCSVASGLSLGNSAKGVMTTLCFFRFWLGFGIGGDYPLSATIMSEYANKKTRGAFIAAVFAMQGVGILAGGFVALAVSSIFDKKFPSPTYEQDRFLSTPPQADYIWRIIVMFGALPAALTYYWRMKMPETARYTALVAKNIKQATADMSKVLQTDLELEERVEDDVKDPKKNYGLFSKEFLRRHGLHLLGTTSTWFLLDIAFYSQNLFQKDIFSAIGWIPKAATMNAIHEVFKIARAQTLIALCSTVPGYWFTVAFIDIIGRFAIQLMGFFMMTVFMFAIAFPYNHWILPDNRIGFVVMYSLTFFFANFGPNATTFIVPAEIFPARLRSTCHGISAATGKAGAIVGAFGFLYAAQPQDKTKTDAGYPPGIGVKNSLIMLGVINFVGMLFTFLVPEPKGKSLEELSGEAEVDK

SEQ ID NO: 81409 - protein, 492 aa, Arabidopsis thaliana
  peptide (1)..(492): Ceres Seq. ID no. 12659657
MGFFTDAYDLFCVSLVTKLLGRLYYFNPTSAKPGSLPPHVAAAVNGVALCGTLAGQLFFGWLGDKLGRKKVYGITLIMMILCSVASGLSLGNSAKGVMTTLCFFRFWLGFGIGGDYPLSATIMSEYANKKTRGAFIAAVFAMQGVGILAGGFVALAVSSIFDKKFPSPTYEQDRFLSTPPQADYIWRIIVMFGALPAALTYYWRMKMPETARYTALVAKNIKQATADMSKVLQTDLELEERVEDDVKDPKKNYGLFSKEFLRRHGLHLLGTTSTWFLLDIAFYSQNLFQKDIFSAIGWIPKAATMNAIHEVFKIARAQTLIALCSTVPGYWFTVAFIDIIGRFAIQLMGFFMMTVFMFAIAFPYNHWILPDNRIGFVVMYSLTFFFANFGPNATTFIVPAEIFPARLRSTCHGISAATGKAGAIVGAFGFLYAAQPQDKTKTDAGYPPGIGVKNSLIMLGVINFVGMLFTFLVPEPKGKSLEELSGEAEVDK

SEQ ID NO: 81410 - protein, 415 aa, Arabidopsis thaliana
  peptide (1)..(415): Ceres Seq. ID no. 12659658
MMILCSVASGLSLGNSAKGVMTTLCFFRFWLGFGIGGDYPLSATIMSEYANKKTRGAFIAAVFAMQGVGILAGGFVALAVSSIFDKKFPSPTYEQDRFLSTPPQADYIWRIIVMFGALPAALTYYWRMKMPETARYTALVAKNIKQATADMSKVLQTDLELEERVEDDVKDPKKNYGLFSKEFLRRHGLHLLGTTSTWFLLDIAFYSQNLFQKDIFSAIGWIPKAATMNAIHEVFKIARAQTLIALCSTVPGYWFTVAFIDIIGRFAIQLMGFFMMTVFMFAIAFPYNHWILPDNRIGFVVMYSLTFFFANFGPNATTFIVPAEIFPARLRSTCHGISAATGKAGAIVGAFGFLYAAQPQDKTKTDAGYPPGIGVKNSLIMLGVINFVGMLFTFLVPEPKGKSLEELSGEAEVDK

SEQ ID NO: 81411 - DNA, 1255 bp, Arabidopsis thaliana
  misc_feature (1)..(1255): Ceres Seq. ID no. 12659679
  misc_feature (1)..(1255): Ortholog of  Ceres SEQ ID NO 12578315 as cited in SEQ ID NO 62451
  misc_feature (1)..(1255): Ortholog of  Ceres SEQ ID NO 12615466 as cited in SEQ ID NO 62761
  misc_feature (1)..(1255): Ortholog of  Ceres SEQ ID NO 13597295 as cited in SEQ ID NO 63743
  misc_feature (1)..(1255): Ortholog of  Ceres SEQ ID NO 12617090 as cited in SEQ ID NO 64005
  misc_feature (1)..(1255): Ortholog of  Ceres SEQ ID NO 13597439 as cited in SEQ ID NO 64081
  misc_feature (1)..(1255): Ortholog of  Ceres SEQ ID NO 13597233 as cited in SEQ ID NO 64370
  misc_feature (1)..(1255): Ortholog of  Ceres SEQ ID NO 13584577 as cited in SEQ ID NO 65298
  misc_feature (1)..(1255): Ortholog of  Ceres SEQ ID NO 13598327 as cited in SEQ ID NO 68040
gtctttacttcctctctcaacgtacgtagacagaaaaaaacaaaacatcatgacagaaaaatctgcagaactcgttcgtttgaacgaactcaaggcttttgtatcgacaaaagcaggtgtgaaaggacttgtcgataccaaaataaccgaagttcctcgaatcttccatatcccttcttcttcaactttatctaacaacaaaccttctgatatctttggcttaaacctcactgtcccaatcattgacctcggagatggtaacacatctgctgcaagaaacgtcctcgtttccaagattaaagaagcagctgagaattggggatttttccaagtaatcaatcatggtattcctttaactgttcttaaagatatcaaacaaggtgttcgaagatttcatgaggaagatccagaggtcaagaaacagtattttgctacagatttcaatacaagatttgcttacaacaccaacttcgatattcattattcttctcctatgaattggaaagactctttcacttgctacacttgtcctcaagatcctctaaagccagaggaaatcccactagcttgcagggatgttgtgattgaatactcgaagcatgtaatggaattaggaggtttactcttccaacttctctcagaagctttaggtttagactctgagattcttaagaacatggattgtctcaagggtttgcttatgctctgccattattatccaccttgtccacaacctgacctaactttgggcataagtaaacacaccgacaattccttcataacaattcttcttcaagatcaaatcggtggtcttcaagttcttcatcaagattcttgggttgatgtaactcctgttcctggagctcttgtcatcagtatcggtgatttcatgcagctgatcacaaacgataagttcttaagtatggagcatagggtacgggcaaacagagatggaccgcggatttcagttgcttgcttcgttagctcgggagtgtttccaaattccactgtttatggaccgataaaagagcttctttctgatgaaaaccctgcaaagtacagagacatcactataccagaatacactgtaggatacctagcaagcatcttcgatggaaaatcgcatttgtctaagttccggatatgaagaaattacttgtatggcttagttaaaaacagatatgtgtgttttgctgctctcttctcgctcgagaggacatcaactattttgttaataagaaagaattttttacag

SEQ ID NO: 81412 - protein, 381 aa, Arabidopsis thaliana
  peptide (1)..(381): Ceres Seq. ID no. 12659680
SLLPLSTYVDRKKQNIMTEKSAELVRLNELKAFVSTKAGVKGLVDTKITEVPRIFHIPSSSTLSNNKPSDIFGLNLTVPIIDLGDGNTSAARNVLVSKIKEAAENWGFFQVINHGIPLTVLKDIKQGVRRFHEEDPEVKKQYFATDFNTRFAYNTNFDIHYSSPMNWKDSFTCYTCPQDPLKPEEIPLACRDVVIEYSKHVMELGGLLFQLLSEALGLDSEILKNMDCLKGLLMLCHYYPPCPQPDLTLGISKHTDNSFITILLQDQIGGLQVLHQDSWVDVTPVPGALVISIGDFMQLITNDKFLSMEHRVRANRDGPRISVACFVSSGVFPNSTVYGPIKELLSDENPAKYRDITIPEYTVGYLASIFDGKSHLSKFRI

SEQ ID NO: 81413 - protein, 365 aa, Arabidopsis thaliana
  peptide (1)..(365): Ceres Seq. ID no. 12659681
MTEKSAELVRLNELKAFVSTKAGVKGLVDTKITEVPRIFHIPSSSTLSNNKPSDIFGLNLTVPIIDLGDGNTSAARNVLVSKIKEAAENWGFFQVINHGIPLTVLKDIKQGVRRFHEEDPEVKKQYFATDFNTRFAYNTNFDIHYSSPMNWKDSFTCYTCPQDPLKPEEIPLACRDVVIEYSKHVMELGGLLFQLLSEALGLDSEILKNMDCLKGLLMLCHYYPPCPQPDLTLGISKHTDNSFITILLQDQIGGLQVLHQDSWVDVTPVPGALVISIGDFMQLITNDKFLSMEHRVRANRDGPRISVACFVSSGVFPNSTVYGPIKELLSDENPAKYRDITIPEYTVGYLASIFDGKSHLSKFRI

SEQ ID NO: 81414 - protein, 217 aa, Arabidopsis thaliana
  peptide (1)..(217): Ceres Seq. ID no. 12659682
MNWKDSFTCYTCPQDPLKPEEIPLACRDVVIEYSKHVMELGGLLFQLLSEALGLDSEILKNMDCLKGLLMLCHYYPPCPQPDLTLGISKHTDNSFITILLQDQIGGLQVLHQDSWVDVTPVPGALVISIGDFMQLITNDKFLSMEHRVRANRDGPRISVACFVSSGVFPNSTVYGPIKELLSDENPAKYRDITIPEYTVGYLASIFDGKSHLSKFRI

SEQ ID NO: 81415 - DNA, 3788 bp, Arabidopsis thaliana
  misc_feature (1)..(3788): Ceres Seq. ID no. 12659704
  misc_feature (1)..(3788): Ortholog of  Ceres SEQ ID NO 14316223 as cited in SEQ ID NO 53166
aatcatctccaggtttgcttcgatctacacggcgtcgtttacacgtctccttcaaatctttcttccttacttctccgatttcaatttcgtgccgttttttttttgagttttccgatcgctgatttcttcaaatatttatcgaattttttttcaatgttttctgtttgtaaattctctgtaattcaattaattgaatcgaataattttgtctctcttgcatttcctcagctccagcttttgttttattagtttctaagattgctttttgtttttagggtttattctcaattcttatatagtttttgaggtttttggtgtattgatttgattcatgtgagtgagtgattgatttagaatctttgttgagctgtgactgtgatttagatttgattcacttcagctataattctttgttttgatgatgattatgataaattcgtaattttgagcttatttgaattcattaactaatttagtatgatgaaatcttaatcaggggaatgtcagagagtactaatgaagatagtggagcaggaagatcatcactggaagagaattcaaatggacaaagaagtcaatcagaagaagcaatcgctgagtggcgttcttctgaacaagttgagaatggaactccttctacatctccaccgtattgggacatcgatgatgatgacgattttggatcaaaaccatctcaactatttgggaaaaatacttggacgattgagaaattttcagatatcaacaaacgagagctccgcggcgatgtttttgaagtcgggggttacaaatggtatatattaatttatccacaagggtgtgatgtttgcaaccatctctctttgtttctatgtgttgcacaccatgaaaagcttcttccaggctggagtcattttgctcagtttactatagctgtgtcgaataaagatccgaagaagtcaaagcattcagatacgttacaccggttttggaagaaagagcatgattggggttggaagaaatttattgagttacctaaattgaaggaagggtttatagatgattctggttgtcttacaattaaagctcaagtgcaggtgatcagagagagagtggaccgaccttttcgctgccttcattataaatatagggaggaacttgttagggtgtatttgggaaatgtagagcaaatttgctggcggtttgtggaagagaaaagaagcaagcttggtaggttgatagaggacaaggcaaaatggaaaagcttctgtgctttctggatggggttggaccaaaattcaaggcgtcgaatgtcccgagagaaaatggatgtgattctaaaaatagttgtaaaacacttctttgtcgagaaggaagttacatctactttggtgatggattccttgtatagtggattgaaggctcttgaaggccaaaataagaacaaggagagtaggccgagactaatggatactgaagaatccacagctccaattgttagcgtggacaaagattcgtttgcattagttgatgatgtgttattactcttagagaaggctgctctggagccattgcctaaaaaagaggaaaagagttctcaaaaccgtacgaaggatgggaatgctggagaggaattcagtagagaagccgttgagcgtgatgataggcgtttaactgaattgggtagacggactgtggagatatttgttcttgcacatatcttcagcaacaaaattgaagttgcataccaagaagctattgcatggaaaaggcaagaagaacttattcgtgaagaagaggaagcgtggctggcagaaagcgaacagaagggcaaaagaggagcatctgaaaaagagaagaaatctaagaagaaacaggcgaaacagaaaaagaacaaaaacaaaggaaaggaaatgaggaaagaagacaaggtgagaacccaaacagaagaaagggaaattgagaaagaggaatgtgtgagagcgatagcagaatcgtcagctgaaaaacctgacacacttggagatgtctctgacgtgtctgattcagtagatagttcagctgaaatacttcagcttgattcagaagatagagagagtagtcctgttcattgggaaatggatgcctcagaggttcatcctccttctgcaggagacactagcagaggaagaggcaattctttttctatacctaatggagttgcagaaagaaagggtctgtccacaatggatgatagttcttcaacctgttctaatgactcgattcaatcaggggtagccaatgggtcatacaaagggaatgtattaaattgccaaagccaaaagtggtttagcaatggaaaaatacaaccaggaaaagtatctgattccaacagtttagccagtgaaaaagagcatcaaccttcaagacttgcatctgaccctaaaaatcagagccattcttctgatatacgcagagttggtgaagctgacatagttatctcccacattcaaaaaccagagagccctaaggaacgtagtcctgttagcaaggatcccaacatgattcagatgaaagagaaaagtgctgcggtactttccccatccagagctgctccttggaatcctccgtctccagtgcaagcaaaaccggagaaaaagggtgtttcaaatgtagaggcggttccaaacaggaaagtcatatctgttaaatcaccttcatcacatcatgcatcaccatctcgtgaagctcagttgcaaacagtgggtcctagagctgatatacagaaaatcgcttctccgaaacctgtggaacaaccagcacctcctatgtcaaggcctttgagtgctcctataatccctccaacgcaagctgcacctgtaatatctgctgttcaaacctcgactgcgtcccttgctcgttcaatgagctcaacagggcgtttaggttcaccgacacatagccaagcttacaatcctcaatcctacaaacatgccatagtgggttcatctggtttcacccacccaagctctcaatcgagtggaacaagcacattgccgccttattcacatccgtctcctatctcagtatcaaatcagtctggtttccctatcaatgttggctcttgggatgtttcttctggtgggctattgtggaccggtggttcgagttcaaccagagatacaacaacaaccatcagcgggaatcacaaaacaaacacttacaacgcacccgtagtaactaccagcatcaggcctactaatgttcagatagggagaacggcacagagtctgatgaccgatgagttccctcaccttgatatcatcaatgatctgcttgcagacgaacacggtacaatggataatagcgtataccgtgtaccacaacagttcaacaaccagtactcatatcatggcggtgcggatctcgggatctctagcaggtctaggagttacagtgatgatggatttcaccagtcttacggtgaatacatgccacattctgcttcttcctcgccatatggtaatgggcaaacacaatcgcaatggcagatggcaaatatggatttctctttaccggctatgaggaaccaagacgatgtatcagcatcagcaacagctacttactcttactttgatttagattcatcaaacccgaatttgtctggaatcaacggctatagggacttcaggccatcgaacggacactgaggtttgggtttaaagagtggcattgcattgtaatgtttattatataaagatggaaagcaaaaaacatttgtgtaaagagagttttcgtcctcttcgtttcaaatgaatccttttttctct

SEQ ID NO: 81416 - protein, 1055 aa, Arabidopsis thaliana
  peptide (1)..(1055): Ceres Seq. ID no. 12659705
MSESTNEDSGAGRSSLEENSNGQRSQSEEAIAEWRSSEQVENGTPSTSPPYWDIDDDDDFGSKPSQLFGKNTWTIEKFSDINKRELRGDVFEVGGYKWYILIYPQGCDVCNHLSLFLCVAHHEKLLPGWSHFAQFTIAVSNKDPKKSKHSDTLHRFWKKEHDWGWKKFIELPKLKEGFIDDSGCLTIKAQVQVIRERVDRPFRCLHYKYREELVRVYLGNVEQICWRFVEEKRSKLGRLIEDKAKWKSFCAFWMGLDQNSRRRMSREKMDVILKIVVKHFFVEKEVTSTLVMDSLYSGLKALEGQNKNKESRPRLMDTEESTAPIVSVDKDSFALVDDVLLLLEKAALEPLPKKEEKSSQNRTKDGNAGEEFSREAVERDDRRLTELGRRTVEIFVLAHIFSNKIEVAYQEAIAWKRQEELIREEEEAWLAESEQKGKRGASEKEKKSKKKQAKQKKNKNKGKEMRKEDKVRTQTEEREIEKEECVRAIAESSAEKPDTLGDVSDVSDSVDSSAEILQLDSEDRESSPVHWEMDASEVHPPSAGDTSRGRGNSFSIPNGVAERKGLSTMDDSSSTCSNDSIQSGVANGSYKGNVLNCQSQKWFSNGKIQPGKVSDSNSLASEKEHQPSRLASDPKNQSHSSDIRRVGEADIVISHIQKPESPKERSPVSKDPNMIQMKEKSAAVLSPSRAAPWNPPSPVQAKPEKKGVSNVEAVPNRKVISVKSPSSHHASPSREAQLQTVGPRADIQKIASPKPVEQPAPPMSRPLSAPIIPPTQAAPVISAVQTSTASLARSMSSTGRLGSPTHSQAYNPQSYKHAIVGSSGFTHPSSQSSGTSTLPPYSHPSPISVSNQSGFPINVGSWDVSSGGLLWTGGSSSTRDTTTTISGNHKTNTYNAPVVTTSIRPTNVQIGRTAQSLMTDEFPHLDIINDLLADEHGTMDNSVYRVPQQFNNQYSYHGGADLGISSRSRSYSDDGFHQSYGEYMPHSASSSPYGNGQTQSQWQMANMDFSLPAMRNQDDVSASATATYSYFDLDSSNPNLSGINGYRDFRPSNGH

SEQ ID NO: 81417 - protein, 802 aa, Arabidopsis thaliana
  peptide (1)..(802): Ceres Seq. ID no. 12659706
MGLDQNSRRRMSREKMDVILKIVVKHFFVEKEVTSTLVMDSLYSGLKALEGQNKNKESRPRLMDTEESTAPIVSVDKDSFALVDDVLLLLEKAALEPLPKKEEKSSQNRTKDGNAGEEFSREAVERDDRRLTELGRRTVEIFVLAHIFSNKIEVAYQEAIAWKRQEELIREEEEAWLAESEQKGKRGASEKEKKSKKKQAKQKKNKNKGKEMRKEDKVRTQTEEREIEKEECVRAIAESSAEKPDTLGDVSDVSDSVDSSAEILQLDSEDRESSPVHWEMDASEVHPPSAGDTSRGRGNSFSIPNGVAERKGLSTMDDSSSTCSNDSIQSGVANGSYKGNVLNCQSQKWFSNGKIQPGKVSDSNSLASEKEHQPSRLASDPKNQSHSSDIRRVGEADIVISHIQKPESPKERSPVSKDPNMIQMKEKSAAVLSPSRAAPWNPPSPVQAKPEKKGVSNVEAVPNRKVISVKSPSSHHASPSREAQLQTVGPRADIQKIASPKPVEQPAPPMSRPLSAPIIPPTQAAPVISAVQTSTASLARSMSSTGRLGSPTHSQAYNPQSYKHAIVGSSGFTHPSSQSSGTSTLPPYSHPSPISVSNQSGFPINVGSWDVSSGGLLWTGGSSSTRDTTTTISGNHKTNTYNAPVVTTSIRPTNVQIGRTAQSLMTDEFPHLDIINDLLADEHGTMDNSVYRVPQQFNNQYSYHGGADLGISSRSRSYSDDGFHQSYGEYMPHSASSSPYGNGQTQSQWQMANMDFSLPAMRNQDDVSASATATYSYFDLDSSNPNLSGINGYRDFRPSNGH

SEQ ID NO: 81418 - protein, 792 aa, Arabidopsis thaliana
  peptide (1)..(792): Ceres Seq. ID no. 12659707
MSREKMDVILKIVVKHFFVEKEVTSTLVMDSLYSGLKALEGQNKNKESRPRLMDTEESTAPIVSVDKDSFALVDDVLLLLEKAALEPLPKKEEKSSQNRTKDGNAGEEFSREAVERDDRRLTELGRRTVEIFVLAHIFSNKIEVAYQEAIAWKRQEELIREEEEAWLAESEQKGKRGASEKEKKSKKKQAKQKKNKNKGKEMRKEDKVRTQTEEREIEKEECVRAIAESSAEKPDTLGDVSDVSDSVDSSAEILQLDSEDRESSPVHWEMDASEVHPPSAGDTSRGRGNSFSIPNGVAERKGLSTMDDSSSTCSNDSIQSGVANGSYKGNVLNCQSQKWFSNGKIQPGKVSDSNSLASEKEHQPSRLASDPKNQSHSSDIRRVGEADIVISHIQKPESPKERSPVSKDPNMIQMKEKSAAVLSPSRAAPWNPPSPVQAKPEKKGVSNVEAVPNRKVISVKSPSSHHASPSREAQLQTVGPRADIQKIASPKPVEQPAPPMSRPLSAPIIPPTQAAPVISAVQTSTASLARSMSSTGRLGSPTHSQAYNPQSYKHAIVGSSGFTHPSSQSSGTSTLPPYSHPSPISVSNQSGFPINVGSWDVSSGGLLWTGGSSSTRDTTTTISGNHKTNTYNAPVVTTSIRPTNVQIGRTAQSLMTDEFPHLDIINDLLADEHGTMDNSVYRVPQQFNNQYSYHGGADLGISSRSRSYSDDGFHQSYGEYMPHSASSSPYGNGQTQSQWQMANMDFSLPAMRNQDDVSASATATYSYFDLDSSNPNLSGINGYRDFRPSNGH

SEQ ID NO: 81419 - DNA, 1479 bp, Arabidopsis thaliana
  misc_feature (1)..(1479): Ceres Seq. ID no. 12659710
  misc_feature (1)..(1479): Ortholog of  Ceres SEQ ID NO 15177258 as cited in SEQ ID NO 51386
atgagtgacctccaagcaaacaaagatgcagcggctgtgaatagacagtcttcctcgtcgtcggcggatcttaatgggccatctccgatgagaaagatgatatcggtggcttctattgccgccggtattcagttcggttgggctcttcagctgtctctgctaactccatacgtgcagcttcttggagtcccacacaaatggtcatctttcatatggctctgtggtcctgtctccggcctgcttgtccagccatccgtcggttacttcagcgaccgatgcaagtcaagattcggtcgtcgtcgtcctttcatcgctatgggcgccttacttgtcgccgttgctgtcgtactaatcggatacgcggctgatttcggtcacagcatgggagacaaagtcgacgaacctgtcaagatgcgagccgtagttatcttcgctctcggtttctggatccttgacgtggctaacaacactctccaaggaccttgccgcgcattccttggtgatttagcagctggagacgctaagaaaacacgaacagcaaacgcatttttctccttcttcatggctgttggaaatgttttgggatatgcggccggatcgtacactaacctctacaagatcttccctttcacaatgactaaagcatgcgacatctattgcgcaaatctcaagagctgtttcttcctttccatcactctcctcctagtcgtcaccatcatagctctttggtacgtggaagacaagcaatggtcgcctaaggcagattccgacaacgagaaaactccattctttggtgaaatctttggagctttcaaggtgatgaaacgtccaatgtggatgctattaatcgtcacggccttgaactggatcgcatggttcccttttcttttgtacgatactgattggatgggtcgtgaggtgtacggtggagactcaaaaggagatgacaaaatgaagaaactatacaaccaaggaattcacgttggtgggttgggattgatgcttaactctatcgttcttggattcatgtcacttggtattgaaggtattagtaggaaaatgggaggagctaaaaggctttggggagctgtgaatatcatcctcgccgtgtgtttggcaatgacggttttggttactaaaaaggcagaggagcaccggagaatcgccggtccgatggcccttcctactgatggcatcagagctggagcattgactctctttgcccttcttggaattcctcttgctattacatttagtattccgttcgcgctagcttccataatctctagcagctccggtgccggtcaaggactctctctaggcgttttaaacatgacaatagtgataccacaaatggttgtatcatttggagttggtcctattgatgcgttatttggaggtgggaatttaccaggatttgtggttggagctattgcagcggcaatcagcagtgttgtggcattttccgttttaccataa

SEQ ID NO: 81420 - protein, 492 aa, Arabidopsis thaliana
  peptide (1)..(492): Ceres Seq. ID no. 12659711
MSDLQANKDAAAVNRQSSSSSADLNGPSPMRKMISVASIAAGIQFGWALQLSLLTPYVQLLGVPHKWSSFIWLCGPVSGLLVQPSVGYFSDRCKSRFGRRRPFIAMGALLVAVAVVLIGYAADFGHSMGDKVDEPVKMRAVVIFALGFWILDVANNTLQGPCRAFLGDLAAGDAKKTRTANAFFSFFMAVGNVLGYAAGSYTNLYKIFPFTMTKACDIYCANLKSCFFLSITLLLVVTIIALWYVEDKQWSPKADSDNEKTPFFGEIFGAFKVMKRPMWMLLIVTALNWIAWFPFLLYDTDWMGREVYGGDSKGDDKMKKLYNQGIHVGGLGLMLNSIVLGFMSLGIEGISRKMGGAKRLWGAVNIILAVCLAMTVLVTKKAEEHRRIAGPMALPTDGIRAGALTLFALLGIPLAITFSIPFALASIISSSSGAGQGLSLGVLNMTIVIPQMVVSFGVGPIDALFGGGNLPGFVVGAIAAAISSVVAFSVLP

SEQ ID NO: 81421 - protein, 463 aa, Arabidopsis thaliana
  peptide (1)..(463): Ceres Seq. ID no. 12659712
MRKMISVASIAAGIQFGWALQLSLLTPYVQLLGVPHKWSSFIWLCGPVSGLLVQPSVGYFSDRCKSRFGRRRPFIAMGALLVAVAVVLIGYAADFGHSMGDKVDEPVKMRAVVIFALGFWILDVANNTLQGPCRAFLGDLAAGDAKKTRTANAFFSFFMAVGNVLGYAAGSYTNLYKIFPFTMTKACDIYCANLKSCFFLSITLLLVVTIIALWYVEDKQWSPKADSDNEKTPFFGEIFGAFKVMKRPMWMLLIVTALNWIAWFPFLLYDTDWMGREVYGGDSKGDDKMKKLYNQGIHVGGLGLMLNSIVLGFMSLGIEGISRKMGGAKRLWGAVNIILAVCLAMTVLVTKKAEEHRRIAGPMALPTDGIRAGALTLFALLGIPLAITFSIPFALASIISSSSGAGQGLSLGVLNMTIVIPQMVVSFGVGPIDALFGGGNLPGFVVGAIAAAISSVVAFSVLP

SEQ ID NO: 81422 - protein, 460 aa, Arabidopsis thaliana
  peptide (1)..(460): Ceres Seq. ID no. 12659713
MISVASIAAGIQFGWALQLSLLTPYVQLLGVPHKWSSFIWLCGPVSGLLVQPSVGYFSDRCKSRFGRRRPFIAMGALLVAVAVVLIGYAADFGHSMGDKVDEPVKMRAVVIFALGFWILDVANNTLQGPCRAFLGDLAAGDAKKTRTANAFFSFFMAVGNVLGYAAGSYTNLYKIFPFTMTKACDIYCANLKSCFFLSITLLLVVTIIALWYVEDKQWSPKADSDNEKTPFFGEIFGAFKVMKRPMWMLLIVTALNWIAWFPFLLYDTDWMGREVYGGDSKGDDKMKKLYNQGIHVGGLGLMLNSIVLGFMSLGIEGISRKMGGAKRLWGAVNIILAVCLAMTVLVTKKAEEHRRIAGPMALPTDGIRAGALTLFALLGIPLAITFSIPFALASIISSSSGAGQGLSLGVLNMTIVIPQMVVSFGVGPIDALFGGGNLPGFVVGAIAAAISSVVAFSVLP

SEQ ID NO: 81423 - DNA, 996 bp, Arabidopsis thaliana
  misc_feature (1)..(996): Ceres Seq. ID no. 12659726
  misc_feature (1)..(996): Ortholog of  Ceres SEQ ID NO 15174863 as cited in SEQ ID NO 51281
  misc_feature (1)..(996): Ortholog of  Ceres SEQ ID NO 12614972 as cited in SEQ ID NO 61986
  misc_feature (1)..(996): Ortholog of  Ceres SEQ ID NO 12625706 as cited in SEQ ID NO 64144
  misc_feature (1)..(996): Ortholog of  Ceres SEQ ID NO 13584933 as cited in SEQ ID NO 65009
  misc_feature (1)..(996): Ortholog of  Ceres SEQ ID NO 12634984 as cited in SEQ ID NO 0
  misc_feature (1)..(996): Ortholog of  Ceres SEQ ID NO 13599377 as cited in SEQ ID NO 0
atggctggaaaaagtgatcttcctgtgatcgcgagagacgacaacctaagtgaagaaacaaaaactctgatctcttcacttcctacataccaagattctcatgtgaagctctgcaagtaccaaggatgttggtattaccacaacactctccaagcagtcatcaactaccaaagaaacttccagccgcaagacaccgacattattctcgcgtctttccccaaatccggtacaacttggctcaaggcactctcagtcgcaatcgtggagagatctaaacagccttttgatgatgatcccctcacacatcctttgctatccgataatcctcatggcatagtaccgttctttgagttcgatatgtatctcaaaacctcaacaccggacttaaccaagttctcaacatcatccccgaggctgttttcgactcacatgcctttacacaccttcaaagagggcctcaagggttctccatgcaaggttgtgtatatgtgcaggaacataaaggatgttttgatatcggattggcatttcaggtccaagtatagcaacaatgaagtatctagaagcactcttgagtcaatgttcgagtcattctgtggcggagttagcttctatggtccgttttgggaccatgctctaagctattggagaggcagcttggaaaaccccaagcatgtccttttcatgaggtacgaggaaatgaaaacagagccgtgtgtccaggtcaagaggcttgccgagtttttggggtttcctttcactaaggaagaagaagatagtggttcgattagcaaactcttggaactatgctctcttggtaatctgagcggtttggaggttaacaaaaccggaaaaacatggatgaactatgactacaaaagctatttccgcaaaggagaagttggtgactggaagaatcatctaactcccgaaatggagaacaaaatcgacatgatcatcgaggagaaattaaaaggttcggacttgaagttctag

SEQ ID NO: 81424 - protein, 331 aa, Arabidopsis thaliana
  peptide (1)..(331): Ceres Seq. ID no. 12659727
MAGKSDLPVIARDDNLSEETKTLISSLPTYQDSHVKLCKYQGCWYYHNTLQAVINYQRNFQPQDTDIILASFPKSGTTWLKALSVAIVERSKQPFDDDPLTHPLLSDNPHGIVPFFEFDMYLKTSTPDLTKFSTSSPRLFSTHMPLHTFKEGLKGSPCKVVYMCRNIKDVLISDWHFRSKYSNNEVSRSTLESMFESFCGGVSFYGPFWDHALSYWRGSLENPKHVLFMRYEEMKTEPCVQVKRLAEFLGFPFTKEEEDSGSISKLLELCSLGNLSGLEVNKTGKTWMNYDYKSYFRKGEVGDWKNHLTPEMENKIDMIIEEKLKGSDLKF

SEQ ID NO: 81425 - protein, 212 aa, Arabidopsis thaliana
  peptide (1)..(212): Ceres Seq. ID no. 12659728
MYLKTSTPDLTKFSTSSPRLFSTHMPLHTFKEGLKGSPCKVVYMCRNIKDVLISDWHFRSKYSNNEVSRSTLESMFESFCGGVSFYGPFWDHALSYWRGSLENPKHVLFMRYEEMKTEPCVQVKRLAEFLGFPFTKEEEDSGSISKLLELCSLGNLSGLEVNKTGKTWMNYDYKSYFRKGEVGDWKNHLTPEMENKIDMIIEEKLKGSDLKF

SEQ ID NO: 81426 - protein, 188 aa, Arabidopsis thaliana
  peptide (1)..(188): Ceres Seq. ID no. 12659729
MPLHTFKEGLKGSPCKVVYMCRNIKDVLISDWHFRSKYSNNEVSRSTLESMFESFCGGVSFYGPFWDHALSYWRGSLENPKHVLFMRYEEMKTEPCVQVKRLAEFLGFPFTKEEEDSGSISKLLELCSLGNLSGLEVNKTGKTWMNYDYKSYFRKGEVGDWKNHLTPEMENKIDMIIEEKLKGSDLKF

SEQ ID NO: 81427 - DNA, 1474 bp, Arabidopsis thaliana
  misc_feature (1)..(1474): Ceres Seq. ID no. 12659752
  misc_feature (1)..(1474): Ortholog of  Ceres SEQ ID NO 12586556 as cited in SEQ ID NO 64667
  misc_feature (1)..(1474): Ortholog of  Ceres SEQ ID NO 13660894 as cited in SEQ ID NO 67475
atgacatctccaagcacaagcaagaatcatcgatgcttaaacctaatctcaaaatgcaaatccttacaaaacctcaaacaaatccatgcccaaatcatcacaatcggtctctctcaccacacatatcctctaagtaagctccttcacttatcctccaccgtctgcttatcctacgcactctctatcttacgccaaatccctaatccttccgtcttcctctacaacactctcatctcttccatcgtctccaatcacaattccactcaaacccatctcgcgttttctctctacgatcagattttgagctcaagatccaattttgtcagacccaatgaatttacgtatccttctctcttcaaagcctcaggctttgacgctcaatggcatcgccatgggagggctcttcatgcccacgtcttgaaatttctcgaaccggtgaatcatgatcggtttgtgcaagctgctttagttgggttttacgctaattgtggtaaattgagagaagctaggtctttgtttgagagaattagggaacctgatttggctacttggaacactcttcttgctgcttacgctaattccgaagaaattgatagcgatgaagaggttttgttgttgtttatgagaatgcaagtaagacctaacgagctttctcttgtagctttgattaaatcttgtgcgaatttaggtgaatttgtgagaggtgtttgggctcatgtgtatgtcttgaagaataatctgaccctgaaccagtttgtgggaacttctctgatcgatctttactcgaaatgcggatgtttgagtttcgcacgcaaagtgttcgatgaaatgtctcagagagacgtatcgtgttacaatgcaatgattcgtggtttagcagttcacgggtttggtcaagaaggtattgaattgtacaagagcttgatctctcaaggattagtcccggacagtgcaactttcgtggtgacgatatcagcatgttcgcactcgggtctagtcgacgaaggtctccaaatatttaactcaatgaaagcggtttacgggatcgagcctaaagttgagcattacggatgtttagttgatctactaggccgatccgggaggttagaagaagcggaagaatgcatcaagaagatgccggtgaagccgaatgcgacactatggagatcgtttctagggtcatctcaaacacatggtgactttgagaggggtgagattgcgctaaagcatttgttggggttagaattcgaaaacagcggaaattatgtgctcttgtcgaatatttatgccggagttaaccgttggactgacgtagagaagacccgggaacttatgaaagaccaccgtgtcaataaatctccggggattagtactcttaattaatttacaaatgtaattgaaatttaatctccaaaagtaggaccaaagaagctacaacaacttgttttgtttttctaataaaaaaattgtaaac

SEQ ID NO: 81428 - protein, 460 aa, Arabidopsis thaliana
  peptide (1)..(460): Ceres Seq. ID no. 12659753
MTSPSTSKNHRCLNLISKCKSLQNLKQIHAQIITIGLSHHTYPLSKLLHLSSTVCLSYALSILRQIPNPSVFLYNTLISSIVSNHNSTQTHLAFSLYDQILSSRSNFVRPNEFTYPSLFKASGFDAQWHRHGRALHAHVLKFLEPVNHDRFVQAALVGFYANCGKLREARSLFERIREPDLATWNTLLAAYANSEEIDSDEEVLLLFMRMQVRPNELSLVALIKSCANLGEFVRGVWAHVYVLKNNLTLNQFVGTSLIDLYSKCGCLSFARKVFDEMSQRDVSCYNAMIRGLAVHGFGQEGIELYKSLISQGLVPDSATFVVTISACSHSGLVDEGLQIFNSMKAVYGIEPKVEHYGCLVDLLGRSGRLEEAEECIKKMPVKPNATLWRSFLGSSQTHGDFERGEIALKHLLGLEFENSGNYVLLSNIYAGVNRWTDVEKTRELMKDHRVNKSPGISTLN

SEQ ID NO: 81429 - protein, 253 aa, Arabidopsis thaliana
  peptide (1)..(253): Ceres Seq. ID no. 12659754
MRMQVRPNELSLVALIKSCANLGEFVRGVWAHVYVLKNNLTLNQFVGTSLIDLYSKCGCLSFARKVFDEMSQRDVSCYNAMIRGLAVHGFGQEGIELYKSLISQGLVPDSATFVVTISACSHSGLVDEGLQIFNSMKAVYGIEPKVEHYGCLVDLLGRSGRLEEAEECIKKMPVKPNATLWRSFLGSSQTHGDFERGEIALKHLLGLEFENSGNYVLLSNIYAGVNRWTDVEKTRELMKDHRVNKSPGISTLN

SEQ ID NO: 81430 - protein, 251 aa, Arabidopsis thaliana
  peptide (1)..(251): Ceres Seq. ID no. 12659755
MQVRPNELSLVALIKSCANLGEFVRGVWAHVYVLKNNLTLNQFVGTSLIDLYSKCGCLSFARKVFDEMSQRDVSCYNAMIRGLAVHGFGQEGIELYKSLISQGLVPDSATFVVTISACSHSGLVDEGLQIFNSMKAVYGIEPKVEHYGCLVDLLGRSGRLEEAEECIKKMPVKPNATLWRSFLGSSQTHGDFERGEIALKHLLGLEFENSGNYVLLSNIYAGVNRWTDVEKTRELMKDHRVNKSPGISTLN

SEQ ID NO: 81431 - DNA, 849 bp, Arabidopsis thaliana
  misc_feature (1)..(849): Ceres Seq. ID no. 12659764
  misc_feature (1)..(849): Ortholog of  Ceres SEQ ID NO 13596921 as cited in SEQ ID NO 62368
  misc_feature (1)..(849): Ortholog of  Ceres SEQ ID NO 13600673 as cited in SEQ ID NO 0
atggattataaccttccaattccattagagggtctcaaagaaacgccaccaacggctttcttgacgaaaacatacaacatagtggaggattcaagcacaaacaacatagtttcatggagcagagacaacaacagcttcattgtttgggaaccagagacttttgccctaatttgcctccctagatgctttaagcacaataatttctccagctttgttagacagctcaatacttatgggtttaagaagattgatacagagagatgggaatttgcaaatgagcattttctgaagggagagaggcatcttcttaagaacatcaagagaagaaagacatcatctcaaacgcaaacgcagtcgctagaaggagagatccatgagctgcgaagagacagaatggctttagaagtagaactggttagactgcgacgaaaacaagaaagcgtgaagacatatctgcatttgatggaagagaaactgaaagtcacagaagtaaagcaagaaatgatgatgaatttcttgctaaagaagattaagaaaccgagttttttacagagcttaaggaaacgtaatctgcaaggaatcaagaatcgagagcaaaagcaagaggtgatctcaagccatggtgttgaggataatggaaagtttgttaaagctgagccagaagagtatggtgatgacatcgatgatcaatgtggaggtgtgtttgattatggtgatgagcttcacatagcttcaatggagcatcaaggacaaggggaggatgaaattgaaatggatagtgaaggaatttggaagggtttcgtgttgagtgaggaggagatgtgtgatttagtggaacattttatataa

SEQ ID NO: 81432 - protein, 282 aa, Arabidopsis thaliana
  peptide (1)..(282): Ceres Seq. ID no. 12659765
MDYNLPIPLEGLKETPPTAFLTKTYNIVEDSSTNNIVSWSRDNNSFIVWEPETFALICLPRCFKHNNFSSFVRQLNTYGFKKIDTERWEFANEHFLKGERHLLKNIKRRKTSSQTQTQSLEGEIHELRRDRMALEVELVRLRRKQESVKTYLHLMEEKLKVTEVKQEMMMNFLLKKIKKPSFLQSLRKRNLQGIKNREQKQEVISSHGVEDNGKFVKAEPEEYGDDIDDQCGGVFDYGDELHIASMEHQGQGEDEIEMDSEGIWKGFVLSEEEMCDLVEHFI

SEQ ID NO: 81433 - protein, 151 aa, Arabidopsis thaliana
  peptide (1)..(151): Ceres Seq. ID no. 12659766
MALEVELVRLRRKQESVKTYLHLMEEKLKVTEVKQEMMMNFLLKKIKKPSFLQSLRKRNLQGIKNREQKQEVISSHGVEDNGKFVKAEPEEYGDDIDDQCGGVFDYGDELHIASMEHQGQGEDEIEMDSEGIWKGFVLSEEEMCDLVEHFI

SEQ ID NO: 81434 - DNA, 1275 bp, Arabidopsis thaliana
  misc_feature (1)..(1275): Ceres Seq. ID no. 12659771
  misc_feature (1)..(1275): Ortholog of  Ceres SEQ ID NO 15170956 as cited in SEQ ID NO 55034
atggagaacatgtttaggctcatgggaagtgaagattcctccgacagaagacggtgcatttgggttaacggtcctgtaatcgtcggagccgggccatcggggctagccacggcagcctgcctccgcgaggaaggtgttccctttgtggtattggagagagcagattgcatagcttcactatggcaaaaacgaacttacgatagaatcaaacttcatttaccaaagaaagtttgtcaattacccaaaatgcccttcccggaagactacccggaatatccaacaaaacgacagttcatcgagtaccttgagtcctacgcaaacaaattcgaaattactcctcagttcaacgagtgtgtccagtctgctcgatacgacgagacaagtggtctctggcgcatcaagacaacatcttcctcttcctcggggtcggagatggaatatatctgccggtggttagtggtggcgacgggagaaaacgcggagaaagttgttccagagatcgatgggctcacaacggagtttgaaggcgaggtgatccactcgtgtgagtacaaatccggcgagaaatacagaggaaagagtgttcttgtcgtcggatgtggaaactccggcatggaagtctctcttgatctcgcaaatcacaatgctaatgcatccatggttgttcgtagctcggttcatgtgttaccaagagagattttaggcaaatctagttttgaaatctccatgatgttgatgaagtggtttcctctgtggctagtagacaagattctactgattcttgcatggctgattttaggaaatttgacaaagtatggcctaaagaggcccacgatgggcccaatggagctcaagattgtttcaggtaagactccagttctagacatcggagctatggagaaaatcaaatccggtgaagtagaaatcgtcccgggaattaaacggttctctcgtagtcacgtggagctagtagacggtcagagattagatctcgatgcggtggttctggccacgggttaccgtagcaacgtcccatcatggctccaagaaaatgatctgttttcgaaaaacgggttcccgaaatcgccgtttccaaacgcgtggaaagggaaatcgggactttacgcggctggattcacaaggaaaggattggctggagcatcagcagacgccgttaacatcgctcaagatattggaaacgtgtggagagaagaaaccaaacgacagaaaatgagaacacgagtgggtcaccgcagatgcatttcagttgcttag

SEQ ID NO: 81435 - protein, 424 aa, Arabidopsis thaliana
  peptide (1)..(424): Ceres Seq. ID no. 12659772
MENMFRLMGSEDSSDRRRCIWVNGPVIVGAGPSGLATAACLREEGVPFVVLERADCIASLWQKRTYDRIKLHLPKKVCQLPKMPFPEDYPEYPTKRQFIEYLESYANKFEITPQFNECVQSARYDETSGLWRIKTTSSSSSGSEMEYICRWLVVATGENAEKVVPEIDGLTTEFEGEVIHSCEYKSGEKYRGKSVLVVGCGNSGMEVSLDLANHNANASMVVRSSVHVLPREILGKSSFEISMMLMKWFPLWLVDKILLILAWLILGNLTKYGLKRPTMGPMELKIVSGKTPVLDIGAMEKIKSGEVEIVPGIKRFSRSHVELVDGQRLDLDAVVLATGYRSNVPSWLQENDLFSKNGFPKSPFPNAWKGKSGLYAAGFTRKGLAGASADAVNIAQDIGNVWREETKRQKMRTRVGHRRCISVA

SEQ ID NO: 81436 - protein, 421 aa, Arabidopsis thaliana
  peptide (1)..(421): Ceres Seq. ID no. 12659773
MFRLMGSEDSSDRRRCIWVNGPVIVGAGPSGLATAACLREEGVPFVVLERADCIASLWQKRTYDRIKLHLPKKVCQLPKMPFPEDYPEYPTKRQFIEYLESYANKFEITPQFNECVQSARYDETSGLWRIKTTSSSSSGSEMEYICRWLVVATGENAEKVVPEIDGLTTEFEGEVIHSCEYKSGEKYRGKSVLVVGCGNSGMEVSLDLANHNANASMVVRSSVHVLPREILGKSSFEISMMLMKWFPLWLVDKILLILAWLILGNLTKYGLKRPTMGPMELKIVSGKTPVLDIGAMEKIKSGEVEIVPGIKRFSRSHVELVDGQRLDLDAVVLATGYRSNVPSWLQENDLFSKNGFPKSPFPNAWKGKSGLYAAGFTRKGLAGASADAVNIAQDIGNVWREETKRQKMRTRVGHRRCISVA

SEQ ID NO: 81437 - protein, 417 aa, Arabidopsis thaliana
  peptide (1)..(417): Ceres Seq. ID no. 12659774
MGSEDSSDRRRCIWVNGPVIVGAGPSGLATAACLREEGVPFVVLERADCIASLWQKRTYDRIKLHLPKKVCQLPKMPFPEDYPEYPTKRQFIEYLESYANKFEITPQFNECVQSARYDETSGLWRIKTTSSSSSGSEMEYICRWLVVATGENAEKVVPEIDGLTTEFEGEVIHSCEYKSGEKYRGKSVLVVGCGNSGMEVSLDLANHNANASMVVRSSVHVLPREILGKSSFEISMMLMKWFPLWLVDKILLILAWLILGNLTKYGLKRPTMGPMELKIVSGKTPVLDIGAMEKIKSGEVEIVPGIKRFSRSHVELVDGQRLDLDAVVLATGYRSNVPSWLQENDLFSKNGFPKSPFPNAWKGKSGLYAAGFTRKGLAGASADAVNIAQDIGNVWREETKRQKMRTRVGHRRCISVA

SEQ ID NO: 81438 - DNA, 1476 bp, Arabidopsis thaliana
  misc_feature (1)..(1476): Ceres Seq. ID no. 12659790
  misc_feature (1)..(1476): Ortholog of  Ceres SEQ ID NO 13660287 as cited in SEQ ID NO 67316
atgggagagagagacgacgaagcagaaggtattttagagaaggcgaagattcctttgttaaaggatcaaaatgtggcagaggaggaaaacggagaaataaagaaagagatatggctagagacgaagaagctgtggcgtattgtcggaccagctatattcactagagtcacgaccaacttgatctttgtcatcactcaggctttcgctggccacctcggcgagctagaactcgctgccatctccatcgtcaacaacgtcattatcggcttcaactatagcctcttcattggaatggcgactgcgttggaaacgctgtgcggtcaagcgtttggagcaaagaagtatgacatgtttggagtgtatttgcagcgatcttggattgttcttttcttattctccatcttgctcctcccaatgtacatctttgcgactccgattcttaagttcatgggccagcctgacgacatcgcagagctctccggtatcatctctgtttgggccattcctacacatttctcatttgccttctttttccctatcaaccggttcctccaatgccagcttaaaaattcggtgattgcaatttcttctggagtgtcacttgtagttcacatatttgtgtgctggctttttgtgtacgttcttgaacttggagtcatagggaccatcgctactgctaacgtgtcatggtggctcaatgtctttatcttatttacttacaccacttgcggcggttgtccgctcacttggaccggtttctccatggaatctttcacgagactatgggaattcactaagctctctgcctcttccggcataatggtttgcttggagaattggtattataggatgttaattgtgatgactggaaatttagaggatgcaagaattgacgtagactctatgtctatatgcatgtcgataaatggtttggagatgatggttccacttgctttcttcgcggggaccagcgtacgagtggcaaatgaattaggagcaggcaatggaaaaagagcaagattcgcaatgatcatatcagtgacacaatcgttaatcattggaataatcatttcggtgctcatatattttctgcttgaccaaatcggttggatgttctcttcaagtgaaactgtcctaaaagcagtcaataatctctctattcttttatcctttgcgattcttctcaacagtgtccaaccggttctctccggtgttgcggttggttcgggttggcaatcactagtcgcatttataaatttgggatgctactatttcattggacttccacttggaattgtcatgggctggatgttcaagtttggtgtcaaaggcatttgggcgggtatgatcttcggaggaaccatggttcaaacattgatattgatttttattactatgagatgcgattgggagaaagaggcacaaaacgctaaggttcgtgttaacaaatggtctgtatcagacgcaagaaagtga

SEQ ID NO: 81439 - protein, 491 aa, Arabidopsis thaliana
  peptide (1)..(491): Ceres Seq. ID no. 12659791
MGERDDEAEGILEKAKIPLLKDQNVAEEENGEIKKEIWLETKKLWRIVGPAIFTRVTTNLIFVITQAFAGHLGELELAAISIVNNVIIGFNYSLFIGMATALETLCGQAFGAKKYDMFGVYLQRSWIVLFLFSILLLPMYIFATPILKFMGQPDDIAELSGIISVWAIPTHFSFAFFFPINRFLQCQLKNSVIAISSGVSLVVHIFVCWLFVYVLELGVIGTIATANVSWWLNVFILFTYTTCGGCPLTWTGFSMESFTRLWEFTKLSASSGIMVCLENWYYRMLIVMTGNLEDARIDVDSMSICMSINGLEMMVPLAFFAGTSVRVANELGAGNGKRARFAMIISVTQSLIIGIIISVLIYFLLDQIGWMFSSSETVLKAVNNLSILLSFAILLNSVQPVLSGVAVGSGWQSLVAFINLGCYYFIGLPLGIVMGWMFKFGVKGIWAGMIFGGTMVQTLILIFITMRCDWEKEAQNAKVRVNKWSVSDARK

SEQ ID NO: 81440 - protein, 394 aa, Arabidopsis thaliana
  peptide (1)..(394): Ceres Seq. ID no. 12659792
MATALETLCGQAFGAKKYDMFGVYLQRSWIVLFLFSILLLPMYIFATPILKFMGQPDDIAELSGIISVWAIPTHFSFAFFFPINRFLQCQLKNSVIAISSGVSLVVHIFVCWLFVYVLELGVIGTIATANVSWWLNVFILFTYTTCGGCPLTWTGFSMESFTRLWEFTKLSASSGIMVCLENWYYRMLIVMTGNLEDARIDVDSMSICMSINGLEMMVPLAFFAGTSVRVANELGAGNGKRARFAMIISVTQSLIIGIIISVLIYFLLDQIGWMFSSSETVLKAVNNLSILLSFAILLNSVQPVLSGVAVGSGWQSLVAFINLGCYYFIGLPLGIVMGWMFKFGVKGIWAGMIFGGTMVQTLILIFITMRCDWEKEAQNAKVRVNKWSVSDARK

SEQ ID NO: 81441 - protein, 375 aa, Arabidopsis thaliana
  peptide (1)..(375): Ceres Seq. ID no. 12659793
MFGVYLQRSWIVLFLFSILLLPMYIFATPILKFMGQPDDIAELSGIISVWAIPTHFSFAFFFPINRFLQCQLKNSVIAISSGVSLVVHIFVCWLFVYVLELGVIGTIATANVSWWLNVFILFTYTTCGGCPLTWTGFSMESFTRLWEFTKLSASSGIMVCLENWYYRMLIVMTGNLEDARIDVDSMSICMSINGLEMMVPLAFFAGTSVRVANELGAGNGKRARFAMIISVTQSLIIGIIISVLIYFLLDQIGWMFSSSETVLKAVNNLSILLSFAILLNSVQPVLSGVAVGSGWQSLVAFINLGCYYFIGLPLGIVMGWMFKFGVKGIWAGMIFGGTMVQTLILIFITMRCDWEKEAQNAKVRVNKWSVSDARK

SEQ ID NO: 81442 - DNA, 837 bp, Arabidopsis thaliana
  misc_feature (1)..(837): Ceres Seq. ID no. 12659798
  misc_feature (1)..(837): Ortholog of  Ceres SEQ ID NO 13599444 as cited in SEQ ID NO 517
  misc_feature (1)..(837): Ortholog of  Ceres SEQ ID NO 15169431 as cited in SEQ ID NO 60449
  misc_feature (1)..(837): Ortholog of  Ceres SEQ ID NO 12615444 as cited in SEQ ID NO 62593
  misc_feature (1)..(837): Ortholog of  Ceres SEQ ID NO 14302204 as cited in SEQ ID NO 63150
atgaatgtgaaaaaagttccaaacgttcctggatcacctgcactctctgccttgcttaagctcggtgttattggtggacttggactctattgcattggtagtagcatgtacaatgtcgatggaggacaccgtgccatcgtgtttaaccggtttaccggtatcaaagatagggtttatccagagggtactcattttaagataccattgtttgaaagagcaattatctatgatgttcgttctcgaccttacgttgagaatagccaaactggaagtaatgatcttcaaacggtgactattgggcttagggtacttacacgtcctatgggagaccgcttacccgagatttacagaacactcggtcagaattatggagagcgagttcttccttccattatcaatgaaacactgaaagcagtagtggctcagtacaatgcaagccacctcattacacagagagaagctgtgagtagggagatacgcaagattgtgacagagcgagcagctaaatttaacattgctttagatgatgtatctatcacaaacctcaaatttggcaaagagtttactgaagcaatcgagaagaaacaagttgcggctcaggaagcagaacgggctaagttcattgtcgaaaaggccgagcaagacaagaaaagtgctattatccgcgctcagggagaagctaagagtgctcaactcatagggcaagctattgcgaacaatgaagctttcattactctgaggaagattgaagctgcaagagagattgctcagaccatagctaaatcggcgaacaaggtttacctaaactccagtgatctcttaatctccaagcaatga

SEQ ID NO: 81443 - protein, 278 aa, Arabidopsis thaliana
  peptide (1)..(278): Ceres Seq. ID no. 12659799
MNVKKVPNVPGSPALSALLKLGVIGGLGLYCIGSSMYNVDGGHRAIVFNRFTGIKDRVYPEGTHFKIPLFERAIIYDVRSRPYVENSQTGSNDLQTVTIGLRVLTRPMGDRLPEIYRTLGQNYGERVLPSIINETLKAVVAQYNASHLITQREAVSREIRKIVTERAAKFNIALDDVSITNLKFGKEFTEAIEKKQVAAQEAERAKFIVEKAEQDKKSAIIRAQGEAKSAQLIGQAIANNEAFITLRKIEAAREIAQTIAKSANKVYLNSSDLLISKQ

SEQ ID NO: 81444 - protein, 243 aa, Arabidopsis thaliana
  peptide (1)..(243): Ceres Seq. ID no. 12659800
MYNVDGGHRAIVFNRFTGIKDRVYPEGTHFKIPLFERAIIYDVRSRPYVENSQTGSNDLQTVTIGLRVLTRPMGDRLPEIYRTLGQNYGERVLPSIINETLKAVVAQYNASHLITQREAVSREIRKIVTERAAKFNIALDDVSITNLKFGKEFTEAIEKKQVAAQEAERAKFIVEKAEQDKKSAIIRAQGEAKSAQLIGQAIANNEAFITLRKIEAAREIAQTIAKSANKVYLNSSDLLISKQ

SEQ ID NO: 81445 - protein, 171 aa, Arabidopsis thaliana
  peptide (1)..(171): Ceres Seq. ID no. 12659801
MGDRLPEIYRTLGQNYGERVLPSIINETLKAVVAQYNASHLITQREAVSREIRKIVTERAAKFNIALDDVSITNLKFGKEFTEAIEKKQVAAQEAERAKFIVEKAEQDKKSAIIRAQGEAKSAQLIGQAIANNEAFITLRKIEAAREIAQTIAKSANKVYLNSSDLLISKQ

SEQ ID NO: 81446 - DNA, 902 bp, Arabidopsis thaliana
  misc_feature (1)..(902): Ceres Seq. ID no. 12659810
  misc_feature (1)..(902): Ortholog of  Ceres SEQ ID NO 14308294 as cited in SEQ ID NO 55112
gaagaagaagagaaatgaaattcacagattctccggtgatcgatctgacggtgaacggcacaaaactctcaatccaacaagacaatggctctatgcacgtcggaacttccgtctggccttgctcactaatcctatccaaattcgctgaacgctggtcaacactagactcatcatcatcaacaacatctccaaatccatacgccgaactcttcgatttccgtcgccgtcgaggaatcgagctaggaacaggatgcggagtcgccggtatggctttttacttactaggtctaacggagatcgtactcacagacatagcaccagtcatgcctgcgctaaaacacaatctgaaacggaacaaaacggcgttaggtaaatctctaaaaacctcgattgtttattggaacaatcgagatcagatctcggcgttgaaaccgccgtttgatttggttattgcggcggatgttgtgtatattgaggaatctgtagggcaattagtgacggcgatggagttgcttgtggcggatgatggtgcggtgttgttaggttatcagattaggtcaccggaagctgataagttgttttgggagttatgcgacatcgtttttaagattgagaaagttcctcatgagcatctgcattctgattatgcttatgaagaaactgatgtttatatctttaggaagaaggtgaagaagaatgaagctgaatcagtgtcatgaagctagttttggttctgtaatgttgttgttacattgatatgtaatttgtttcttgttatagaattcgaattatctcaactatttatattttcttagatattggctactaaaagatgacaaaggctgaaatcaaatttttgtaacgatttttttaagaagtatacaagttttgttgtgtgtttt

SEQ ID NO: 81447 - protein, 238 aa, Arabidopsis thaliana
  peptide (1)..(238): Ceres Seq. ID no. 12659811
RRREMKFTDSPVIDLTVNGTKLSIQQDNGSMHVGTSVWPCSLILSKFAERWSTLDSSSSTTSPNPYAELFDFRRRRGIELGTGCGVAGMAFYLLGLTEIVLTDIAPVMPALKHNLKRNKTALGKSLKTSIVYWNNRDQISALKPPFDLVIAADVVYIEESVGQLVTAMELLVADDGAVLLGYQIRSPEADKLFWELCDIVFKIEKVPHEHLHSDYAYEETDVYIFRKKVKKNEAESVS

SEQ ID NO: 81448 - protein, 234 aa, Arabidopsis thaliana
  peptide (1)..(234): Ceres Seq. ID no. 12659812
MKFTDSPVIDLTVNGTKLSIQQDNGSMHVGTSVWPCSLILSKFAERWSTLDSSSSTTSPNPYAELFDFRRRRGIELGTGCGVAGMAFYLLGLTEIVLTDIAPVMPALKHNLKRNKTALGKSLKTSIVYWNNRDQISALKPPFDLVIAADVVYIEESVGQLVTAMELLVADDGAVLLGYQIRSPEADKLFWELCDIVFKIEKVPHEHLHSDYAYEETDVYIFRKKVKKNEAESVS

SEQ ID NO: 81449 - protein, 208 aa, Arabidopsis thaliana
  peptide (1)..(208): Ceres Seq. ID no. 12659813
MHVGTSVWPCSLILSKFAERWSTLDSSSSTTSPNPYAELFDFRRRRGIELGTGCGVAGMAFYLLGLTEIVLTDIAPVMPALKHNLKRNKTALGKSLKTSIVYWNNRDQISALKPPFDLVIAADVVYIEESVGQLVTAMELLVADDGAVLLGYQIRSPEADKLFWELCDIVFKIEKVPHEHLHSDYAYEETDVYIFRKKVKKNEAESVS

SEQ ID NO: 81450 - DNA, 603 bp, Arabidopsis thaliana
  misc_feature (1)..(603): Ceres Seq. ID no. 12659818
  misc_feature (1)..(603): Ortholog of  Ceres SEQ ID NO 12608863 as cited in SEQ ID NO 51470
  misc_feature (1)..(603): Ortholog of  Ceres SEQ ID NO 13639221 as cited in SEQ ID NO 56429
atggctccaagacaggcgaacggtagaagcattgccgtgagtgaaggcggcggagggaagacgatgacgatgacgacgatgcggaaggaagtgcactttagaggtgtgaggaagcgtccatggggtagatacgcggcggagatccgtgacccgggaaagaaaacccgggtttggctcgggacattcgacacggcggaggaagctgcaagagcttacgacaccgccgctagagagtttcgtggctccaaagcaaagactaatttccctcttcccggagagtctactacggttaacgacggtggcgagaacgattcttacgtcaaccgtacgacggtgacgacggcgcgtgagatgacgcgtcagagatttccgtttgcatgtcaccgggagcgtaaagtcgtcggtggttatgcttctgctggttttttcttcgatccgtcaagagctgcttcgttaagagcagagctttctcgggtttgtccggttcggtttgatccggttaatatcgagttgagtattggtattcgagaaaccgtaaaagttgaaccgagaagagaactaaacctggatcttaacctagctccaccggtggtggacgtttag

SEQ ID NO: 81451 - protein, 200 aa, Arabidopsis thaliana
  peptide (1)..(200): Ceres Seq. ID no. 12659819
MAPRQANGRSIAVSEGGGGKTMTMTTMRKEVHFRGVRKRPWGRYAAEIRDPGKKTRVWLGTFDTAEEAARAYDTAAREFRGSKAKTNFPLPGESTTVNDGGENDSYVNRTTVTTAREMTRQRFPFACHRERKVVGGYASAGFFFDPSRAASLRAELSRVCPVRFDPVNIELSIGIRETVKVEPRRELNLDLNLAPPVVDV

SEQ ID NO: 81452 - protein, 179 aa, Arabidopsis thaliana
  peptide (1)..(179): Ceres Seq. ID no. 12659820
MTMTTMRKEVHFRGVRKRPWGRYAAEIRDPGKKTRVWLGTFDTAEEAARAYDTAAREFRGSKAKTNFPLPGESTTVNDGGENDSYVNRTTVTTAREMTRQRFPFACHRERKVVGGYASAGFFFDPSRAASLRAELSRVCPVRFDPVNIELSIGIRETVKVEPRRELNLDLNLAPPVVDV

SEQ ID NO: 81453 - protein, 177 aa, Arabidopsis thaliana
  peptide (1)..(177): Ceres Seq. ID no. 12659821
MTTMRKEVHFRGVRKRPWGRYAAEIRDPGKKTRVWLGTFDTAEEAARAYDTAAREFRGSKAKTNFPLPGESTTVNDGGENDSYVNRTTVTTAREMTRQRFPFACHRERKVVGGYASAGFFFDPSRAASLRAELSRVCPVRFDPVNIELSIGIRETVKVEPRRELNLDLNLAPPVVDV

SEQ ID NO: 81454 - DNA, 1599 bp, Arabidopsis thaliana
  misc_feature (1)..(1599): Ceres Seq. ID no. 12659847
  misc_feature (1)..(1599): Ortholog of  Ceres SEQ ID NO 14313216 as cited in SEQ ID NO 66103
atgagaacacttgaagcttttgctctgtccctgtttcttgtcttcttagtaaaatgggtcaattctgactctagttcttctcctagtaaagatcaatttctgagttgcatgtcgacacattctgattccagcttcataaaccctaaaagcttcatccacaaaccagattcaagagtctacaccgatttctcgcagtctttaatatcacaaaactacagatttctgaccttgaatttcacaagccagaagccgattctgatcgttacaccaagaactgatactgaaatccagagatcattactctgtagcaggaaacttggggtgaaagtaagaaccaaaagcggtggtcatgactatgaaggcctttcttatctctcattacactcgcctttcatcatactcgatctcgttaatgttcgatcgatcgagatcaacctggcagatgaaacagcttgggttggagccggtgccactatcggtgagctttactataaaattgccaaatcaagtaagatccatggcttccctgcaggaacatgccctagtgttggagttggaggtcattttagcggaggagggtttggtgcaatgatgaggaaacatggtttagctgcagataacgttgtggacgcgcgttttgtagacgcaaatgggaggatctacaacagtaggagagaaatgggagaagatttgttctgggccattagaggaggtggagcagctagctttggtgttgtactttcatggaaagtgaagctagttagggttccagaaaaggttacgtgcttcagaaggaacctaccgttgacacagaacatgacgaaaattgttcatagatggcagcaaattgcagcagagcttgacgataatctcttcatccgagtcatcgtttccatttccggaggatcagttcaaactacattccaagcaaattatcttggaggaatcgataaactaattcctctgatgaatcagaagtttccggaattagggttaacgtttcaagactgttcggaaatgacctggatcgattcaataatgtacttcaactggaagaaaggacaaccactagagactcttctggatcgaggacaaagatacaatgatctgtatttcaaagccaaatctgattttgtcaagaaccctattcctgaaatcggtctagaaggtatatggacgaggtttcacgaggtcgaatctccgataatgataatggagccattaggtggtaaaatgtatgagattggtgaaacagagactccattcccacatagaagagggaatctatataatatccagtatatggttaaatggagattgaaggacattggagtgatggagaaacatgtgacatggatgagattgctttataggtatatgagagtttatgtctctgcatcgccaagaggagcttatttgaattaccgagatcttgatttaggtatgaacagaggagttaatacgagctttgaagatgcgaaattatgggggtttaggtattttggaagtaatttcaagagattggctattgttaaagggaagattgatccaaccaatttcttcaggaatgaacaaagtgttcctcctttgattgtctaa

SEQ ID NO: 81455 - protein, 532 aa, Arabidopsis thaliana
  peptide (1)..(532): Ceres Seq. ID no. 12659848
MRTLEAFALSLFLVFLVKWVNSDSSSSPSKDQFLSCMSTHSDSSFINPKSFIHKPDSRVYTDFSQSLISQNYRFLTLNFTSQKPILIVTPRTDTEIQRSLLCSRKLGVKVRTKSGGHDYEGLSYLSLHSPFIILDLVNVRSIEINLADETAWVGAGATIGELYYKIAKSSKIHGFPAGTCPSVGVGGHFSGGGFGAMMRKHGLAADNVVDARFVDANGRIYNSRREMGEDLFWAIRGGGAASFGVVLSWKVKLVRVPEKVTCFRRNLPLTQNMTKIVHRWQQIAAELDDNLFIRVIVSISGGSVQTTFQANYLGGIDKLIPLMNQKFPELGLTFQDCSEMTWIDSIMYFNWKKGQPLETLLDRGQRYNDLYFKAKSDFVKNPIPEIGLEGIWTRFHEVESPIMIMEPLGGKMYEIGETETPFPHRRGNLYNIQYMVKWRLKDIGVMEKHVTWMRLLYRYMRVYVSASPRGAYLNYRDLDLGMNRGVNTSFEDAKLWGFRYFGSNFKRLAIVKGKIDPTNFFRNEQSVPPLIV

SEQ ID NO: 81456 - protein, 496 aa, Arabidopsis thaliana
  peptide (1)..(496): Ceres Seq. ID no. 12659849
MSTHSDSSFINPKSFIHKPDSRVYTDFSQSLISQNYRFLTLNFTSQKPILIVTPRTDTEIQRSLLCSRKLGVKVRTKSGGHDYEGLSYLSLHSPFIILDLVNVRSIEINLADETAWVGAGATIGELYYKIAKSSKIHGFPAGTCPSVGVGGHFSGGGFGAMMRKHGLAADNVVDARFVDANGRIYNSRREMGEDLFWAIRGGGAASFGVVLSWKVKLVRVPEKVTCFRRNLPLTQNMTKIVHRWQQIAAELDDNLFIRVIVSISGGSVQTTFQANYLGGIDKLIPLMNQKFPELGLTFQDCSEMTWIDSIMYFNWKKGQPLETLLDRGQRYNDLYFKAKSDFVKNPIPEIGLEGIWTRFHEVESPIMIMEPLGGKMYEIGETETPFPHRRGNLYNIQYMVKWRLKDIGVMEKHVTWMRLLYRYMRVYVSASPRGAYLNYRDLDLGMNRGVNTSFEDAKLWGFRYFGSNFKRLAIVKGKIDPTNFFRNEQSVPPLIV

SEQ ID NO: 81457 - protein, 336 aa, Arabidopsis thaliana
  peptide (1)..(336): Ceres Seq. ID no. 12659850
MMRKHGLAADNVVDARFVDANGRIYNSRREMGEDLFWAIRGGGAASFGVVLSWKVKLVRVPEKVTCFRRNLPLTQNMTKIVHRWQQIAAELDDNLFIRVIVSISGGSVQTTFQANYLGGIDKLIPLMNQKFPELGLTFQDCSEMTWIDSIMYFNWKKGQPLETLLDRGQRYNDLYFKAKSDFVKNPIPEIGLEGIWTRFHEVESPIMIMEPLGGKMYEIGETETPFPHRRGNLYNIQYMVKWRLKDIGVMEKHVTWMRLLYRYMRVYVSASPRGAYLNYRDLDLGMNRGVNTSFEDAKLWGFRYFGSNFKRLAIVKGKIDPTNFFRNEQSVPPLIV

SEQ ID NO: 81458 - DNA, 1859 bp, Arabidopsis thaliana
  misc_feature (1)..(1859): Ceres Seq. ID no. 12659855
  misc_feature (1)..(1859): Ortholog of  Ceres SEQ ID NO 14313216 as cited in SEQ ID NO 66103
atttcttcttttacaagaaagaacaatatacaacatttccatcttgaagccttattgtgtgtttagcttctctcttgcatataatattcgctgctaggatgggaaattcaaaaccactccctacaatttcttgtatttcagtttttgctctatatttttcattctacacaataacactaacttcttcaacctccctacaagatgatttcatcaaatgtctttaccgaaacacaaatgtccgttttacactcgacaaaacgttcttcactcctgaaagaaacgcttccatcttcacagaagttcttgaatcgacggctcagaatcaaagatacttgaccaagacaatgcctaaaccgggtttcatatttaaaccggttcacgaatctcacgtccaagcttccgtcatctgttccaagaaacttgagatacattttcgtgtcagaagcggcggtcatgattacgagggcgtgtcttatgtttcacagatcgaaaaaccttttgtattgatcgatttgtcgaaattgagacagatcaatgttgatattaaggacaccagtgcttgggttgaagctggtgctaccgttggtgagctttactacagaattgcagagaagagcaagtttcatggattccctgcaggtgtttacccgagcttaggcatcggtgggcatataacaggcggtgcatacggttccttgatgaggaagtatggtcttgctgcagataatgttctagacgcaaagatcgttgatgctaacggtaaattactcgatagagcctcgatgggcgaggatctgttttgggcaattagaggaggcagtggagggagttttgggataattttgtcatggaaaatcaagcttgttcctgttcctgaaaccctaaccgtcttcacggtcaccaaaacattcgagcaagatagaagtttcaagattctttcaaagtggcaagaaattgcggacaatcttgttgatgagctcttcttacgagtgttcttcactgtatctggaaacaaagcaaacaagacagtgacgatggcctacataggtcagtttcttggcgagaaaggcaccttgatggaggtaatgaagaaggattttccagaacttgggctaactcagaaggattgtatagaaatgagttggatcgattccattatttacaactctggattcccaacaaaccctcctcctcctattgagattctgcttcaagcaaagtctccaatcggaaaagtttacttcaaagggaaatcggatttcgctaaaaaacctattcctgttttagggctcgaagggatgttcaagaagttgcttgaagaagacgcagcgttagtaatttggactccttacggtggaaagatggataaaatccctgaatctgagatcccatttccgcatagaaacggaaccaacttcatgattcaatattacaggagctggtcagatagtgagaaaagaccaaacagacgcaccaaatggatcagagagttgtacggatacatgacgccttacgtctcaagcaatccaagacaagcatatgtgaactacagagatctagacctgggacagaacaaggacaactcaaagtctaacttcatagaagctaaaatatggggagctaattatttcaaagacaatttcaacagattggtgaggattaaatcaaaggttgatccagataacttcttcagacacgagcagagtatcccaactctgcccgtatgaagctaagctcatgacaaccacacacaaccatatgatttgagtaaccaactaggtgttgttatccgattgaaccgtgttttgcaaatttaattacatgtcaaaaaaatatgaatccgtatgaaatcttttaac

SEQ ID NO: 81459 - protein, 542 aa, Arabidopsis thaliana
  peptide (1)..(542): Ceres Seq. ID no. 12659856
MGNSKPLPTISCISVFALYFSFYTITLTSSTSLQDDFIKCLYRNTNVRFTLDKTFFTPERNASIFTEVLESTAQNQRYLTKTMPKPGFIFKPVHESHVQASVICSKKLEIHFRVRSGGHDYEGVSYVSQIEKPFVLIDLSKLRQINVDIKDTSAWVEAGATVGELYYRIAEKSKFHGFPAGVYPSLGIGGHITGGAYGSLMRKYGLAADNVLDAKIVDANGKLLDRASMGEDLFWAIRGGSGGSFGIILSWKIKLVPVPETLTVFTVTKTFEQDRSFKILSKWQEIADNLVDELFLRVFFTVSGNKANKTVTMAYIGQFLGEKGTLMEVMKKDFPELGLTQKDCIEMSWIDSIIYNSGFPTNPPPPIEILLQAKSPIGKVYFKGKSDFAKKPIPVLGLEGMFKKLLEEDAALVIWTPYGGKMDKIPESEIPFPHRNGTNFMIQYYRSWSDSEKRPNRRTKWIRELYGYMTPYVSSNPRQAYVNYRDLDLGQNKDNSKSNFIEAKIWGANYFKDNFNRLVRIKSKVDPDNFFRHEQSIPTLPV

SEQ ID NO: 81460 - protein, 460 aa, Arabidopsis thaliana
  peptide (1)..(460): Ceres Seq. ID no. 12659857
MPKPGFIFKPVHESHVQASVICSKKLEIHFRVRSGGHDYEGVSYVSQIEKPFVLIDLSKLRQINVDIKDTSAWVEAGATVGELYYRIAEKSKFHGFPAGVYPSLGIGGHITGGAYGSLMRKYGLAADNVLDAKIVDANGKLLDRASMGEDLFWAIRGGSGGSFGIILSWKIKLVPVPETLTVFTVTKTFEQDRSFKILSKWQEIADNLVDELFLRVFFTVSGNKANKTVTMAYIGQFLGEKGTLMEVMKKDFPELGLTQKDCIEMSWIDSIIYNSGFPTNPPPPIEILLQAKSPIGKVYFKGKSDFAKKPIPVLGLEGMFKKLLEEDAALVIWTPYGGKMDKIPESEIPFPHRNGTNFMIQYYRSWSDSEKRPNRRTKWIRELYGYMTPYVSSNPRQAYVNYRDLDLGQNKDNSKSNFIEAKIWGANYFKDNFNRLVRIKSKVDPDNFFRHEQSIPTLPV

SEQ ID NO: 81461 - protein, 342 aa, Arabidopsis thaliana
  peptide (1)..(342): Ceres Seq. ID no. 12659858
MRKYGLAADNVLDAKIVDANGKLLDRASMGEDLFWAIRGGSGGSFGIILSWKIKLVPVPETLTVFTVTKTFEQDRSFKILSKWQEIADNLVDELFLRVFFTVSGNKANKTVTMAYIGQFLGEKGTLMEVMKKDFPELGLTQKDCIEMSWIDSIIYNSGFPTNPPPPIEILLQAKSPIGKVYFKGKSDFAKKPIPVLGLEGMFKKLLEEDAALVIWTPYGGKMDKIPESEIPFPHRNGTNFMIQYYRSWSDSEKRPNRRTKWIRELYGYMTPYVSSNPRQAYVNYRDLDLGQNKDNSKSNFIEAKIWGANYFKDNFNRLVRIKSKVDPDNFFRHEQSIPTLPV

SEQ ID NO: 81462 - DNA, 1904 bp, Arabidopsis thaliana
  misc_feature (1)..(1904): Ceres Seq. ID no. 12659859
  misc_feature (1)..(1904): Ortholog of  Ceres SEQ ID NO 14313216 as cited in SEQ ID NO 66103
aacaccacactagtcacacacttaaatgttcttccgcctttgacgccttaatctcatctccacaacccttgcagtcaagttgatgctgttgggatcaaagagtagcaaacaatacgagagcagaagaacttacttatagaaaaaaatgggaatttcaaaaccactccctctattttcgattttagtcctctatttttcactctacaccattacaccaacttcttcattagcctccctccaagatcaattcatcaactgtgtccaaagaaacacacatgtttacttcccacttgagaaaacgttctttgctcctacaaaaaatgtctctatgttcagccaagttcttgaatcgacggctcaaaatctccggttcttgaaaaaatccatgcctaaaccgggattcatattcagccctattcacgagtctcacgtacaagcttccatcatttgttccaagaaactccgaatgcatctccgtgtcagaagcggcggtcacgactacgaaggcttgtcttatgtctctcagatcgataaaccgtttatattgatggatctgtcaaagatgagacaggtcaacattaatattcaagacaacagtgcttgggttcaatctggtgccactgttggtgaactttattacaggattgcggagaagagcaaagtccatgggttcccggcgggtttgtgctcgagcttaggcataggaggacacataacaggcggtgcgtacggttccatgatgcggaaatatggtctaggtgcagacaatgttctagacgcaaagattgttgatgccaacggtaaattactcgatagagccgcgatgggtgaggatacattttgggctattagaggaggcgctggagggagttttgggataattctagcatggaagatcaagcttgttcctgttcctaagaccgtgaccgtctttaccgtcaccaaaacgttacaacaagacgtgggtaacaagattatctcaaagtggcaaagagttgcggacaagcttgttgaagagctattcatcagagtgctcttcaacgtagctggaaccggtgggaacaagactgtgacgacgtcgtacaatgctctgtttcttggcgggaaaggaacgctgatgaacgttatgaagaagagtttccccgagctagggctaacatttaaagattgtatcgaaatgagctggcttgaatccattgcttacatttctggattcccgacccacacgcctactaatgttttgcttcaagggaagtctccgttcccaaaggtcagcttcaaagccaaatcggatttcgtgaaaaccccgattcccgaatccgggcttcaagggatcttcaagaagctacttaaagaagatattccattgatgatatggaatccttacggaggaatgatggcgaaaatccccgaatcccaaatcccttttccgcatcgaaaaggagtcctcttcaaggttcagtacgtaacaagttggctagacagtgacaagagaccgagcagacacatcaactggatcagagatctctatagttacatgacgccttatgtctcaagtaacccacgagaagcttacgtgaactaccgtgatttagacctgggaaggaacacgaaagacgtgaaaacatgcatcaaacaagctcaagtctggggagctaactacttcaaaaacaatttcaacagattgatgatgattaaagcaaaggttgatccagagaacttctttagacacgagcagagcattccacctatgatgtaacgaggtcaatcaaataagaataaattagaagaaaatcagataatggttcttctgtatttcggaaaaatgttattctagctatgcttgtagtagtactatgtttcacctaaaattcgatatgttgcttcttagtacctaattcttc

SEQ ID NO: 81463 - protein, 537 aa, Arabidopsis thaliana
  peptide (1)..(537): Ceres Seq. ID no. 12659860
MGISKPLPLFSILVLYFSLYTITPTSSLASLQDQFINCVQRNTHVYFPLEKTFFAPTKNVSMFSQVLESTAQNLRFLKKSMPKPGFIFSPIHESHVQASIICSKKLRMHLRVRSGGHDYEGLSYVSQIDKPFILMDLSKMRQVNINIQDNSAWVQSGATVGELYYRIAEKSKVHGFPAGLCSSLGIGGHITGGAYGSMMRKYGLGADNVLDAKIVDANGKLLDRAAMGEDTFWAIRGGAGGSFGIILAWKIKLVPVPKTVTVFTVTKTLQQDVGNKIISKWQRVADKLVEELFIRVLFNVAGTGGNKTVTTSYNALFLGGKGTLMNVMKKSFPELGLTFKDCIEMSWLESIAYISGFPTHTPTNVLLQGKSPFPKVSFKAKSDFVKTPIPESGLQGIFKKLLKEDIPLMIWNPYGGMMAKIPESQIPFPHRKGVLFKVQYVTSWLDSDKRPSRHINWIRDLYSYMTPYVSSNPREAYVNYRDLDLGRNTKDVKTCIKQAQVWGANYFKNNFNRLMMIKAKVDPENFFRHEQSIPPMM

SEQ ID NO: 81464 - protein, 476 aa, Arabidopsis thaliana
  peptide (1)..(476): Ceres Seq. ID no. 12659861
MFSQVLESTAQNLRFLKKSMPKPGFIFSPIHESHVQASIICSKKLRMHLRVRSGGHDYEGLSYVSQIDKPFILMDLSKMRQVNINIQDNSAWVQSGATVGELYYRIAEKSKVHGFPAGLCSSLGIGGHITGGAYGSMMRKYGLGADNVLDAKIVDANGKLLDRAAMGEDTFWAIRGGAGGSFGIILAWKIKLVPVPKTVTVFTVTKTLQQDVGNKIISKWQRVADKLVEELFIRVLFNVAGTGGNKTVTTSYNALFLGGKGTLMNVMKKSFPELGLTFKDCIEMSWLESIAYISGFPTHTPTNVLLQGKSPFPKVSFKAKSDFVKTPIPESGLQGIFKKLLKEDIPLMIWNPYGGMMAKIPESQIPFPHRKGVLFKVQYVTSWLDSDKRPSRHINWIRDLYSYMTPYVSSNPREAYVNYRDLDLGRNTKDVKTCIKQAQVWGANYFKNNFNRLMMIKAKVDPENFFRHEQSIPPMM

SEQ ID NO: 81465 - protein, 457 aa, Arabidopsis thaliana
  peptide (1)..(457): Ceres Seq. ID no. 12659862
MPKPGFIFSPIHESHVQASIICSKKLRMHLRVRSGGHDYEGLSYVSQIDKPFILMDLSKMRQVNINIQDNSAWVQSGATVGELYYRIAEKSKVHGFPAGLCSSLGIGGHITGGAYGSMMRKYGLGADNVLDAKIVDANGKLLDRAAMGEDTFWAIRGGAGGSFGIILAWKIKLVPVPKTVTVFTVTKTLQQDVGNKIISKWQRVADKLVEELFIRVLFNVAGTGGNKTVTTSYNALFLGGKGTLMNVMKKSFPELGLTFKDCIEMSWLESIAYISGFPTHTPTNVLLQGKSPFPKVSFKAKSDFVKTPIPESGLQGIFKKLLKEDIPLMIWNPYGGMMAKIPESQIPFPHRKGVLFKVQYVTSWLDSDKRPSRHINWIRDLYSYMTPYVSSNPREAYVNYRDLDLGRNTKDVKTCIKQAQVWGANYFKNNFNRLMMIKAKVDPENFFRHEQSIPPMM

SEQ ID NO: 81466 - DNA, 546 bp, Arabidopsis thaliana
  misc_feature (1)..(546): Ceres Seq. ID no. 12659875
  misc_feature (1)..(546): Ortholog of  Ceres SEQ ID NO 14311693 as cited in SEQ ID NO 51239
  misc_feature (1)..(546): Ortholog of  Ceres SEQ ID NO 13661954 as cited in SEQ ID NO 61182
atggagatcaataacgagaagaagaaactctcaagacaatcttcttccttcagactacgaagtccaagtctaaacgctcttcgtctccaccgagtctttgacctattcgacaaaaataacgatggattcataaccgtcgaagaactaagtcaagcactctcaagactcggtctcgacgctgatttctccgatctcaagtcaacagttgattctttcatcaaaccggacaaaaccggactccggttcgatgactttgctgcactccacaaaaccttagacgaatctttctttggaggagaaggaagttgctgtgatgggtctccggaatcagatcttgaagaagcttttaatgtgttcgatgaagacggagatggttttatctccgctgtggaattgcaaaaggttttgaagaagcttggattacctgaagcaggagagattgaacaagtggagaagatgattgtctctgttgatagtaatcatgatggtcgcgttgactttttcgaattcaagaacatgatgcaaactgttgttgttccttcttga

SEQ ID NO: 81467 - protein, 181 aa, Arabidopsis thaliana
  peptide (1)..(181): Ceres Seq. ID no. 12659876
MEINNEKKKLSRQSSSFRLRSPSLNALRLHRVFDLFDKNNDGFITVEELSQALSRLGLDADFSDLKSTVDSFIKPDKTGLRFDDFAALHKTLDESFFGGEGSCCDGSPESDLEEAFNVFDEDGDGFISAVELQKVLKKLGLPEAGEIEQVEKMIVSVDSNHDGRVDFFEFKNMMQTVVVPS

SEQ ID NO: 81468 - DNA, 2172 bp, Arabidopsis thaliana
  misc_feature (1)..(2172): Ceres Seq. ID no. 12659900
  misc_feature (1)..(2172): Ortholog of  Ceres SEQ ID NO 12778345 as cited in SEQ ID NO 62792
atggccatgttctcgcatcgtctccgacgaatagttgtcgccgcaccttcctatttccaacgattctccactctatctcgtccctccgatttcactcccgtgccatcgttattaccgagatctgtggtgaagcaatcgacggcaattaatcgatctcccgcgagattgttctcgacgactcagtatcagtatgatccatacactggagaagattctttcatgccggataatgaaggatgcgattttaatcattggttaattacaatgaatttccctaaagataatcttccatctagagaagaaatgatttcgatttttgagcaaacttgcgccaaaggacttgctattagtttggaagaagctaagaagaaaatttatgcaatttgcacaacaagttaccaaggttttcaagcaacaatgactataggagaagtagagaagtttagagatttgcctggtgttcaatacataatacctgattcgtatattgatgttgagaataaggtttatggaggagacaaatatgagaatggagtgatcacacctgggcctgttcctgtccctactaaagaggggtttgattctttaaagaaggagagtaagccggaacaagaggaagctgaaataattctaacgcctccagatgagggtaaaacctcaggacaagtgcaaggtcaaggaagtctaacgcttccagatcagaggagtgtcaaggaaagacaaggaactcttgctctagtacaaggccaaggtcaaagaagtggaatgtctatccttggacaagggcaaggtgaaggaaggcgaatgtctattcctggacaatggcaaagtcgaggtcaaggaaattcatttcaagggagtttcaagcagagccagggaactctgcccgtgcgaaaagggcaaactcaaataagtgatgaaataccttcgttccaaggaaatgttaagcaaagacaagaaatgccaatccatggacaagggcaagctcaacgaagtcaaatgccttcatctcaggggactctaagacaaggacaagctcaaggaagtcaaagaccttccaatcaggtgggttacaaccaaggtcaaggagctcagacgcctccataccaccaaggtcaaggagctcagacgcctccataccaagaatcaccaaacaattacggtcaaggagcatttgtgcaatacaaccaagggccaccacaaggaaacgttgtccaaacgacacaagaaaaatacaaccaaatgggccaagggaattacgctccacagagtggtggaaactatagtcctgcacaaggagcaggaagtccaagatttggatatgggcaaggtcaaggaggtcagttattgtctccatatcgagggaattacaaccaaggccagggaactccgctgccaggacaaggccaagaaggtcaaccttcatatcagatgggtttcagccaaggcttaggagctccggtgcctccgaaccaagtaataccaggcaattatggtcaatgggcatttgtgaactacaaccaaggaccaccacaaggtaactttctccaaggaccacaacaaaatcacaaccaaggaggtcaatggaattacagtccacagaacggtggacactatggtcctgcacagtttggacagtggtatcctggaccccctcaaggtcaaggaattcaatggccccaatatcagcttagttacaatcaaggccaaggaactccattttctggacaatgtcgatgtccaaattgtggaatgacttcataccaggggtataacaatcaaggccaaggaactcatatccctgaacaatgggaaggtcaagattatgcagtgctttcatatcaggctagttacaatcaagcccatggagcacaggcgcctccataccatggaaactacaatcaagcaacaccaggcggttacggtcaaggaacatctgcaaacttcaaccaaagatttccagtgaaccccgcaaattacaatatgcagaacggtggaaactatggtcctccacatggattagcaggaaatccaggatttagacaagggttttctggacaaggacagaatcaaacatttcaacaagacgatcagagaaatgtagcaggtgacttgagaaacaataatcctgtagacccaactgaaaccagaaaaccaaattctcgaatataa

SEQ ID NO: 81469 - protein, 723 aa, Arabidopsis thaliana
  peptide (1)..(723): Ceres Seq. ID no. 12659901
MAMFSHRLRRIVVAAPSYFQRFSTLSRPSDFTPVPSLLPRSVVKQSTAINRSPARLFSTTQYQYDPYTGEDSFMPDNEGCDFNHWLITMNFPKDNLPSREEMISIFEQTCAKGLAISLEEAKKKIYAICTTSYQGFQATMTIGEVEKFRDLPGVQYIIPDSYIDVENKVYGGDKYENGVITPGPVPVPTKEGFDSLKKESKPEQEEAEIILTPPDEGKTSGQVQGQGSLTLPDQRSVKERQGTLALVQGQGQRSGMSILGQGQGEGRRMSIPGQWQSRGQGNSFQGSFKQSQGTLPVRKGQTQISDEIPSFQGNVKQRQEMPIHGQGQAQRSQMPSSQGTLRQGQAQGSQRPSNQVGYNQGQGAQTPPYHQGQGAQTPPYQESPNNYGQGAFVQYNQGPPQGNVVQTTQEKYNQMGQGNYAPQSGGNYSPAQGAGSPRFGYGQGQGGQLLSPYRGNYNQGQGTPLPGQGQEGQPSYQMGFSQGLGAPVPPNQVIPGNYGQWAFVNYNQGPPQGNFLQGPQQNHNQGGQWNYSPQNGGHYGPAQFGQWYPGPPQGQGIQWPQYQLSYNQGQGTPFSGQCRCPNCGMTSYQGYNNQGQGTHIPEQWEGQDYAVLSYQASYNQAHGAQAPPYHGNYNQATPGGYGQGTSANFNQRFPVNPANYNMQNGGNYGPPHGLAGNPGFRQGFSGQGQNQTFQQDDQRNVAGDLRNNNPVDPTETRKPNSRI

SEQ ID NO: 81470 - protein, 721 aa, Arabidopsis thaliana
  peptide (1)..(721): Ceres Seq. ID no. 12659902
MFSHRLRRIVVAAPSYFQRFSTLSRPSDFTPVPSLLPRSVVKQSTAINRSPARLFSTTQYQYDPYTGEDSFMPDNEGCDFNHWLITMNFPKDNLPSREEMISIFEQTCAKGLAISLEEAKKKIYAICTTSYQGFQATMTIGEVEKFRDLPGVQYIIPDSYIDVENKVYGGDKYENGVITPGPVPVPTKEGFDSLKKESKPEQEEAEIILTPPDEGKTSGQVQGQGSLTLPDQRSVKERQGTLALVQGQGQRSGMSILGQGQGEGRRMSIPGQWQSRGQGNSFQGSFKQSQGTLPVRKGQTQISDEIPSFQGNVKQRQEMPIHGQGQAQRSQMPSSQGTLRQGQAQGSQRPSNQVGYNQGQGAQTPPYHQGQGAQTPPYQESPNNYGQGAFVQYNQGPPQGNVVQTTQEKYNQMGQGNYAPQSGGNYSPAQGAGSPRFGYGQGQGGQLLSPYRGNYNQGQGTPLPGQGQEGQPSYQMGFSQGLGAPVPPNQVIPGNYGQWAFVNYNQGPPQGNFLQGPQQNHNQGGQWNYSPQNGGHYGPAQFGQWYPGPPQGQGIQWPQYQLSYNQGQGTPFSGQCRCPNCGMTSYQGYNNQGQGTHIPEQWEGQDYAVLSYQASYNQAHGAQAPPYHGNYNQATPGGYGQGTSANFNQRFPVNPANYNMQNGGNYGPPHGLAGNPGFRQGFSGQGQNQTFQQDDQRNVAGDLRNNNPVDPTETRKPNSRI

SEQ ID NO: 81471 - protein, 650 aa, Arabidopsis thaliana
  peptide (1)..(650): Ceres Seq. ID no. 12659903
MPDNEGCDFNHWLITMNFPKDNLPSREEMISIFEQTCAKGLAISLEEAKKKIYAICTTSYQGFQATMTIGEVEKFRDLPGVQYIIPDSYIDVENKVYGGDKYENGVITPGPVPVPTKEGFDSLKKESKPEQEEAEIILTPPDEGKTSGQVQGQGSLTLPDQRSVKERQGTLALVQGQGQRSGMSILGQGQGEGRRMSIPGQWQSRGQGNSFQGSFKQSQGTLPVRKGQTQISDEIPSFQGNVKQRQEMPIHGQGQAQRSQMPSSQGTLRQGQAQGSQRPSNQVGYNQGQGAQTPPYHQGQGAQTPPYQESPNNYGQGAFVQYNQGPPQGNVVQTTQEKYNQMGQGNYAPQSGGNYSPAQGAGSPRFGYGQGQGGQLLSPYRGNYNQGQGTPLPGQGQEGQPSYQMGFSQGLGAPVPPNQVIPGNYGQWAFVNYNQGPPQGNFLQGPQQNHNQGGQWNYSPQNGGHYGPAQFGQWYPGPPQGQGIQWPQYQLSYNQGQGTPFSGQCRCPNCGMTSYQGYNNQGQGTHIPEQWEGQDYAVLSYQASYNQAHGAQAPPYHGNYNQATPGGYGQGTSANFNQRFPVNPANYNMQNGGNYGPPHGLAGNPGFRQGFSGQGQNQTFQQDDQRNVAGDLRNNNPVDPTETRKPNSRI

SEQ ID NO: 81472 - DNA, 1752 bp, Arabidopsis thaliana
  misc_feature (1)..(1752): Ceres Seq. ID no. 12659952
  misc_feature (1)..(1752): Ortholog of  Ceres SEQ ID NO 14315430 as cited in SEQ ID NO 57618
  misc_feature (1)..(1752): Ortholog of  Ceres SEQ ID NO 13623344 as cited in SEQ ID NO 0
atggctggagtactagctggggaatgttcttacagtgagagtggagtttcatcacactcaaggaattcccatgaaaagcaagaagaggtttcccgctggtattttggaagaaaagaaatagaagagaattcaccgtcaaggttggatggtattgacttaaagaaggaaacatacctccgcaaatcctactgtacatttttgcaggacttgggcatgagattgaaagtttttccaatcagtccccaggttacaatagctacagcgataatcttctgtcatcgattcttctttcgccaatcacatgcaaagaatgacagaaggaccattgcaactgtatgcatgttccttgctggaaaggttgaggaaactccacggcccttgaaagatgttatttttgtctcctatgagattataaacaagaaggatcctggtgcttcccagaaaatcaagcaaaaggaagtatatgagcaacaaaaagagcttatattaaacggagaaaaaattgttctttccactctaggctttgacctcaatgtttatcatccttataaacccctggtagaagcaataaagaaatttaaggttgcacagaatgcacttgcccaagttgcatggaattttgttaatgatggtctacggacatctctctgcctgcaatttaagcctcatcatattgcggctggtgcaatatttcttgcggccaagttccttaaagtgaagttaccatcagatggagagaaggtttggtggcaagaatttgatgtcacacccagacaactggaggatgttagcaaccaaatgcttgagctttatgagcaaaatcgtgtccctgcatctcaaggaagtgaagtcgagagtagtgtaggtggagggtcagctcagcgaccaggctccagaaatgcggtttcaaccgatgagcatgttggttctaggcaaacgtcatcagtacgttcaacccatgaacaatcaaattctgataatcatgggggttcatccaaaggagtattgaatcagaacaatgagaatgggggtggtgaggcagctaatgtcagtgtcgataacaaagaggagatagagagagaaacaaaagaaagcagcctacatcttgaaagccatccagcccataaggacaatgtgagagaagccccccataactctagacctttagttgagggacctgggaaagacaactcagaaagagagggtggagagctacaagatgatggtgctgttcataaatctcgaaatgttgatgtgggtgatgccctaatcagccaatcgccaaaagatttgaaattgcttcgagataaggtgaaggctaaacgagagaaagctaagaagttgctaggtgaaagaacgaggaaaaaggatttgatggatgaggatgatttgattgaaagagaactggaagatgtgcaactagctgttgaggatgaaaagacgaaggaaaggaaagtacagagcaggccaaaggcggagaactctgatctcatgggtacagaacatggtgagattttagatgttaaaggagaagtcaaaaatacagaggaaggtgaaatggtaaacaacaatgtgtccccgatgatgcatagcagaaagagaaaaatgggaagccctcctgaaaagcagtcagaaggaaagagacgccacaatagtgagaatggggaagaaagccataagacgagcagaggtagtagccatcatggtgatagagagcacagaagacactcacaagagaataaccattcataa

SEQ ID NO: 81473 - protein, 583 aa, Arabidopsis thaliana
  peptide (1)..(583): Ceres Seq. ID no. 12659953
MAGVLAGECSYSESGVSSHSRNSHEKQEEVSRWYFGRKEIEENSPSRLDGIDLKKETYLRKSYCTFLQDLGMRLKVFPISPQVTIATAIIFCHRFFFRQSHAKNDRRTIATVCMFLAGKVEETPRPLKDVIFVSYEIINKKDPGASQKIKQKEVYEQQKELILNGEKIVLSTLGFDLNVYHPYKPLVEAIKKFKVAQNALAQVAWNFVNDGLRTSLCLQFKPHHIAAGAIFLAAKFLKVKLPSDGEKVWWQEFDVTPRQLEDVSNQMLELYEQNRVPASQGSEVESSVGGGSAQRPGSRNAVSTDEHVGSRQTSSVRSTHEQSNSDNHGGSSKGVLNQNNENGGGEAANVSVDNKEEIERETKESSLHLESHPAHKDNVREAPHNSRPLVEGPGKDNSEREGGELQDDGAVHKSRNVDVGDALISQSPKDLKLLRDKVKAKREKAKKLLGERTRKKDLMDEDDLIERELEDVQLAVEDEKTKERKVQSRPKAENSDLMGTEHGEILDVKGEVKNTEEGEMVNNNVSPMMHSRKRKMGSPPEKQSEGKRRHNSENGEESHKTSRGSSHHGDREHRRHSQENNHS

SEQ ID NO: 81474 - protein, 512 aa, Arabidopsis thaliana
  peptide (1)..(512): Ceres Seq. ID no. 12659954
MRLKVFPISPQVTIATAIIFCHRFFFRQSHAKNDRRTIATVCMFLAGKVEETPRPLKDVIFVSYEIINKKDPGASQKIKQKEVYEQQKELILNGEKIVLSTLGFDLNVYHPYKPLVEAIKKFKVAQNALAQVAWNFVNDGLRTSLCLQFKPHHIAAGAIFLAAKFLKVKLPSDGEKVWWQEFDVTPRQLEDVSNQMLELYEQNRVPASQGSEVESSVGGGSAQRPGSRNAVSTDEHVGSRQTSSVRSTHEQSNSDNHGGSSKGVLNQNNENGGGEAANVSVDNKEEIERETKESSLHLESHPAHKDNVREAPHNSRPLVEGPGKDNSEREGGELQDDGAVHKSRNVDVGDALISQSPKDLKLLRDKVKAKREKAKKLLGERTRKKDLMDEDDLIERELEDVQLAVEDEKTKERKVQSRPKAENSDLMGTEHGEILDVKGEVKNTEEGEMVNNNVSPMMHSRKRKMGSPPEKQSEGKRRHNSENGEESHKTSRGSSHHGDREHRRHSQENNHS

SEQ ID NO: 81475 - protein, 470 aa, Arabidopsis thaliana
  peptide (1)..(470): Ceres Seq. ID no. 12659955
MFLAGKVEETPRPLKDVIFVSYEIINKKDPGASQKIKQKEVYEQQKELILNGEKIVLSTLGFDLNVYHPYKPLVEAIKKFKVAQNALAQVAWNFVNDGLRTSLCLQFKPHHIAAGAIFLAAKFLKVKLPSDGEKVWWQEFDVTPRQLEDVSNQMLELYEQNRVPASQGSEVESSVGGGSAQRPGSRNAVSTDEHVGSRQTSSVRSTHEQSNSDNHGGSSKGVLNQNNENGGGEAANVSVDNKEEIERETKESSLHLESHPAHKDNVREAPHNSRPLVEGPGKDNSEREGGELQDDGAVHKSRNVDVGDALISQSPKDLKLLRDKVKAKREKAKKLLGERTRKKDLMDEDDLIERELEDVQLAVEDEKTKERKVQSRPKAENSDLMGTEHGEILDVKGEVKNTEEGEMVNNNVSPMMHSRKRKMGSPPEKQSEGKRRHNSENGEESHKTSRGSSHHGDREHRRHSQENNHS

SEQ ID NO: 81476 - DNA, 947 bp, Arabidopsis thaliana
  misc_feature (1)..(947): Ceres Seq. ID no. 12659994
  misc_feature (1)..(947): Ortholog of  Ceres SEQ ID NO 13595569 as cited in SEQ ID NO 56778
  misc_feature (1)..(947): Ortholog of  Ceres SEQ ID NO 12611159 as cited in SEQ ID NO 59821
  misc_feature (1)..(947): Ortholog of  Ceres SEQ ID NO 13661001 as cited in SEQ ID NO 67531
tctctctctctctctctctctctctctctctctctctctctctctctctctctctctctctctctctctctctcctcgggatcaagaaaagtgaagaagaatgagaatgacaagagatggaaaagaacatgaatacaagaaaggtttatggacagtggaagaagacaagatcctcatggattatgtccgaactcatggccagggccactggaaccgcatcgccaagaaaactgggctcaagagatgtgggaaaagctgtaggttgagatggatgaactacttaagccctaatgttaacagaggcaattttactgaccaagaagaagatctcatcatcagactccacaagctcctcggcaacagatggtcgttgatagcgaaaagagttccgggaagaacagacaaccaagtaaagaattactggaacacacatctcagcaagaaacttggtctcggagatcattcaactgccgtcaaagccgcatgcggtgtagagtctccaccgtctatggcccttataaccacaacgtcctcctctcatcaagagatctccggtggaaaaaattcaactctaaggttcgacactttagttgacgaatccaaactcaaaccaaaatccaaactagtccacgcaacaccaactgacgtagaagttgcagctacggttccaaatctgttcgataccttttgggttcttgaagacgacttcgagcttagttcactcactatgatggattttactaatgggtattgcctttgaatatctttgatgattagcttctaaaaagtaattaattatcgaataatagattataatgaacaataataataatatgaatacaattaaatttttttccgaatatttgcttgtagcttttgtactttcttttgtaaaagtaaggatgatcagttgataaaaaaatcttatactagaaagttatttggtt

SEQ ID NO: 81477 - protein, 219 aa, Arabidopsis thaliana
  peptide (1)..(219): Ceres Seq. ID no. 12659995
MRMTRDGKEHEYKKGLWTVEEDKILMDYVRTHGQGHWNRIAKKTGLKRCGKSCRLRWMNYLSPNVNRGNFTDQEEDLIIRLHKLLGNRWSLIAKRVPGRTDNQVKNYWNTHLSKKLGLGDHSTAVKAACGVESPPSMALITTTSSSHQEISGGKNSTLRFDTLVDESKLKPKSKLVHATPTDVEVAATVPNLFDTFWVLEDDFELSSLTMMDFTNGYCL

SEQ ID NO: 81478 - protein, 217 aa, Arabidopsis thaliana
  peptide (1)..(217): Ceres Seq. ID no. 12659996
MTRDGKEHEYKKGLWTVEEDKILMDYVRTHGQGHWNRIAKKTGLKRCGKSCRLRWMNYLSPNVNRGNFTDQEEDLIIRLHKLLGNRWSLIAKRVPGRTDNQVKNYWNTHLSKKLGLGDHSTAVKAACGVESPPSMALITTTSSSHQEISGGKNSTLRFDTLVDESKLKPKSKLVHATPTDVEVAATVPNLFDTFWVLEDDFELSSLTMMDFTNGYCL

SEQ ID NO: 81479 - protein, 194 aa, Arabidopsis thaliana
  peptide (1)..(194): Ceres Seq. ID no. 12659997
MDYVRTHGQGHWNRIAKKTGLKRCGKSCRLRWMNYLSPNVNRGNFTDQEEDLIIRLHKLLGNRWSLIAKRVPGRTDNQVKNYWNTHLSKKLGLGDHSTAVKAACGVESPPSMALITTTSSSHQEISGGKNSTLRFDTLVDESKLKPKSKLVHATPTDVEVAATVPNLFDTFWVLEDDFELSSLTMMDFTNGYCL

SEQ ID NO: 81480 - DNA, 836 bp, Arabidopsis thaliana
  misc_feature (1)..(836): Ceres Seq. ID no. 12660006
  misc_feature (1)..(836): Ortholog of  Ceres SEQ ID NO 14305994 as cited in SEQ ID NO 52280
attacaaagaaaataggtaaaaacaatttctcattagcttacaatggcggatacacaccgtgtcgaccgtactgatagacactttcaatttcagtcgccctatgaaggcggccgaggtcaaggtcagtatgaaggtgaccgtggttacggtggtggcggttacaagagcatgatgcctgaaagtggcccatctagtacccaagtattgtccctgttgattggagtccctgtcgtcggttcgctacttgccttggctggattacttctagctggttcggtgatcggcttaatggttgctttaccactatttctcctcttcagcccggttatagtcccagcggctctaactatcgggcttgcaatgacaggctttttagcctcggggatgttcggtctaaccgggcttagctcaatctcatgggtcatgaactatcttcgtgggacaaggagaactgtgcctgagcaattggagtatgctaagaggagaatggctgatgcggttggctacgcaggacaaaagggcaaagaaatgggccagcatgtgcagaacaaggcccaagatgttaaacaatatgatatttctaagccacatgacactaccactaagggtcatgagactcaggggaggacgacggctgcatgatgagttttcagtatgaacggtagatatgtgttttcactattatgtcgttttttctgcattttcaatatgatgttatgtgttttttttgtttggctttttgttgaaccgtgtatgtgttttatgtttttgtaagcatgaaagatcgcaagtgttgtggtaatatttgaatgtaataatatgataagttgataaa

SEQ ID NO: 81481 - protein, 199 aa, Arabidopsis thaliana
  peptide (1)..(199): Ceres Seq. ID no. 12660007
MADTHRVDRTDRHFQFQSPYEGGRGQGQYEGDRGYGGGGYKSMMPESGPSSTQVLSLLIGVPVVGSLLALAGLLLAGSVIGLMVALPLFLLFSPVIVPAALTIGLAMTGFLASGMFGLTGLSSISWVMNYLRGTRRTVPEQLEYAKRRMADAVGYAGQKGKEMGQHVQNKAQDVKQYDISKPHDTTTKGHETQGRTTAA

SEQ ID NO: 81482 - protein, 157 aa, Arabidopsis thaliana
  peptide (1)..(157): Ceres Seq. ID no. 12660008
MMPESGPSSTQVLSLLIGVPVVGSLLALAGLLLAGSVIGLMVALPLFLLFSPVIVPAALTIGLAMTGFLASGMFGLTGLSSISWVMNYLRGTRRTVPEQLEYAKRRMADAVGYAGQKGKEMGQHVQNKAQDVKQYDISKPHDTTTKGHETQGRTTAA

SEQ ID NO: 81483 - protein, 156 aa, Arabidopsis thaliana
  peptide (1)..(156): Ceres Seq. ID no. 12660009
MPESGPSSTQVLSLLIGVPVVGSLLALAGLLLAGSVIGLMVALPLFLLFSPVIVPAALTIGLAMTGFLASGMFGLTGLSSISWVMNYLRGTRRTVPEQLEYAKRRMADAVGYAGQKGKEMGQHVQNKAQDVKQYDISKPHDTTTKGHETQGRTTAA

SEQ ID NO: 81484 - DNA, 1881 bp, Arabidopsis thaliana
  misc_feature (1)..(1881): Ceres Seq. ID no. 12660018
  misc_feature (1)..(1881): Ortholog of  Ceres SEQ ID NO 15180647 as cited in SEQ ID NO 0
aattcttttttgggtccgtctcttgcgtgactcaagaatcaaacaacacaagtgtcaaagccaccaagaacacaaatcgtcgaaaccccaaagaaaaaagtctcagcaaaatccttctttcatcgtctttcgatttctccaaaaaaatggaagaaattttattcgatgagattctctgcgagatatttacaagactgccatcgtcttcttcttcttcttcttcctcatcatcttcgttaccttctttcgaatcggttcctcttgtctcaaaacgatggcttcgtctctacagagcatcaaagacttccatgtccttacaattcagtcctcacgacacctctgtaattacccttttgccctctatcctcaacaaccatccttgtctctcttccctctctatctatcgcggcgtaaccataggaactaccccaagtcgttcggatgaggagcatctgaaagctgaaaccattttcagcgacgagctaatctcaatcatatcttcttgctgcttcaatctcagaaacctctgtttcttgatcaatccagtttcttcatcttctttggttcctctctctacttctttatctctcacttctctctctatcgaattatggaaaccacaaaactcaggtttcacttggattgctctgttttcatctcttaaagaattatcaatccatgtttgctcaacgagttctccagctttcgatttctatccaaagtctaaacctaacccggaagttgtagagttaggtttggaatcggtttctttatttggaatccaacctgatgataatgatgttacttggttatggaaaagttgcagaaagttaaagaaactgagtctgagatcttgtggaagtattggagaagaaatcggtttgtgtttgaagaatcttgaagagattgagttaagaacatgtaggagtattgttgatgtggttctgcttaaagtatcagagatttgtgaatctttaaagtctctgttgattcatgatggtggaagcaaagatgggttggttcagtttatgagcaatgctagatgttatgatactttggaaagactcgatttacgtctaccgatggatttgaccgatgatcatttagtctctctcgctgcgaatttcaagtgtttgtcgactcttaggcttacaagctgtatctttgtgactggttttagtctaaaggcattggctttaagctttagttcgagtcttgaagagctttctttgcttagctgcaacgcgattgaacgagagcgtggtttgttggcgacaataggacagcatttggggaggttaaggaagctagatttgactcggaacgagtggttattcgataaagaggttgtttcgatgttagcttcttgcaatggtttggttgaggttgttttgagagattgtaagcatttgacaggtgcagtgttggttgctttgaacaaaaactgtgtgaagttgaagactttagacattttaggttgtcggttgattgagcctgatgatgtggaggggtttgtgatgaagacacaatgtttgaagaagcttgtggttgaagagaatcagatcacagaagctatattgaaattggcttcgagtaagtttattgaaactgttgtgtttgattctcttgtttggtaattagttagatggattagtgtttgaataactgtgaagtatatatgggtaagtgtagataacatgaataagatggaaacacaatgatgtacattttcggtgttaagttattgtgtttatttcttctgaacaattgtaaactattatggaatatgcaaaggaaaaataattgtcgtttgtttttataatatttgtaaaccgttttacgaaattttattgaccaatatgtggttttattatttgttta

SEQ ID NO: 81485 - protein, 544 aa, Arabidopsis thaliana
  peptide (1)..(544): Ceres Seq. ID no. 12660019
FFFGSVSCVTQESNNTSVKATKNTNRRNPKEKSLSKILLSSSFDFSKKMEEILFDEILCEIFTRLPSSSSSSSSSSSSLPSFESVPLVSKRWLRLYRASKTSMSLQFSPHDTSVITLLPSILNNHPCLSSLSIYRGVTIGTTPSRSDEEHLKAETIFSDELISIISSCCFNLRNLCFLINPVSSSSLVPLSTSLSLTSLSIELWKPQNSGFTWIALFSSLKELSIHVCSTSSPAFDFYPKSKPNPEVVELGLESVSLFGIQPDDNDVTWLWKSCRKLKKLSLRSCGSIGEEIGLCLKNLEEIELRTCRSIVDVVLLKVSEICESLKSLLIHDGGSKDGLVQFMSNARCYDTLERLDLRLPMDLTDDHLVSLAANFKCLSTLRLTSCIFVTGFSLKALALSFSSSLEELSLLSCNAIERERGLLATIGQHLGRLRKLDLTRNEWLFDKEVVSMLASCNGLVEVVLRDCKHLTGAVLVALNKNCVKLKTLDILGCRLIEPDDVEGFVMKTQCLKKLVVEENQITEAILKLASSKFIETVVFDSLVW

SEQ ID NO: 81486 - protein, 496 aa, Arabidopsis thaliana
  peptide (1)..(496): Ceres Seq. ID no. 12660020
MEEILFDEILCEIFTRLPSSSSSSSSSSSSLPSFESVPLVSKRWLRLYRASKTSMSLQFSPHDTSVITLLPSILNNHPCLSSLSIYRGVTIGTTPSRSDEEHLKAETIFSDELISIISSCCFNLRNLCFLINPVSSSSLVPLSTSLSLTSLSIELWKPQNSGFTWIALFSSLKELSIHVCSTSSPAFDFYPKSKPNPEVVELGLESVSLFGIQPDDNDVTWLWKSCRKLKKLSLRSCGSIGEEIGLCLKNLEEIELRTCRSIVDVVLLKVSEICESLKSLLIHDGGSKDGLVQFMSNARCYDTLERLDLRLPMDLTDDHLVSLAANFKCLSTLRLTSCIFVTGFSLKALALSFSSSLEELSLLSCNAIERERGLLATIGQHLGRLRKLDLTRNEWLFDKEVVSMLASCNGLVEVVLRDCKHLTGAVLVALNKNCVKLKTLDILGCRLIEPDDVEGFVMKTQCLKKLVVEENQITEAILKLASSKFIETVVFDSLVW

SEQ ID NO: 81487 - protein, 442 aa, Arabidopsis thaliana
  peptide (1)..(442): Ceres Seq. ID no. 12660021
MSLQFSPHDTSVITLLPSILNNHPCLSSLSIYRGVTIGTTPSRSDEEHLKAETIFSDELISIISSCCFNLRNLCFLINPVSSSSLVPLSTSLSLTSLSIELWKPQNSGFTWIALFSSLKELSIHVCSTSSPAFDFYPKSKPNPEVVELGLESVSLFGIQPDDNDVTWLWKSCRKLKKLSLRSCGSIGEEIGLCLKNLEEIELRTCRSIVDVVLLKVSEICESLKSLLIHDGGSKDGLVQFMSNARCYDTLERLDLRLPMDLTDDHLVSLAANFKCLSTLRLTSCIFVTGFSLKALALSFSSSLEELSLLSCNAIERERGLLATIGQHLGRLRKLDLTRNEWLFDKEVVSMLASCNGLVEVVLRDCKHLTGAVLVALNKNCVKLKTLDILGCRLIEPDDVEGFVMKTQCLKKLVVEENQITEAILKLASSKFIETVVFDSLVW

SEQ ID NO: 81488 - DNA, 1956 bp, Arabidopsis thaliana
  misc_feature (1)..(1956): Ceres Seq. ID no. 12660029
  misc_feature (1)..(1956): Ortholog of  Ceres SEQ ID NO 13659971 as cited in SEQ ID NO 67565
aaccgagaacacaagaaattctattaaaaaaaacctaaaaatgggttgctttagcagcaaacaccgaaacacagagagtgatatcatcaatggcagcgtacagagctcaattccgacaaatcaacctgaaaaccatgtctctcgtgatgttctcaagcctcagaaacctccttctcctcaaattccgacaacaacccaatcaaatcatcatcaccaacaagaatccaaacccgttaatcagcaaatcgaaaagaagcacgttctaacacaaccattgaaaccaatcgtttttagagaaacagagacaattctaggcaaaccctttgaagaaataaggaaactttacacgttaggtaaagaattaggtcgaggccaatttggtataacctacacttgcaaagagaattcaacaggcaacacatacgcttgcaaatcaatactcaagaggaaactaacgagaaagcaagacatagatgatgtgaagagagagattcagataatgcagtatttgtctggacaagagaacattgttgagatcaaaggtgcttatgaagatagacaatcgatacatttggtgatggagttgtgtggtggtagtgaattgttcgataggattatagctcaaggacattactctgagaaagcagctgctggtgttattagatcggttttgaatgttgttcagatttgtcatttcatgggagtgattcatcgtgatctcaagcctgagaattttctgctcgctagtactgatgagaatgctatgcttaaagctactgattttggattgtctgtgttcattgaagaagggaaagtttatagggatatagtaggaagtgcttactatgttgctcctgaagtattaagaagaagttatggaaaagaaatcgatatttggagtgcagggattattctatacatcttgctttgtggtgtgcctcctttttggtctgaaactgagaaggggatatttaatgagattataaagggagaaattgattttgatagccaaccatggccttctatatctgagagtgctaaagatcttgtgaggaagttgcttactaaggaccctaagcaacgaatctcagcggcacaagctcttgaacatccttggatcagaggaggagaagcaccggacaagcctattgatagtgctgttttatctcggatgaagcaattccgagcaatgaataagcttaaaaagctagctctaaaggttattgcagagagtctctcggaagaggaaattaaaggtcttaaaaccatgtttgcgaatatggatactgacaaaagcggcacaatcacttatgaagaactgaaaaacgggctagctaaacttggctctaaactcactgaagctgaagtgaagcaactcatggaagccgctgatgtagatggtaatggaacaattgactacatcgaatttatctcagcaacgatgcatagatacagatttgatcgagatgaacacgtattcaaagccttccaatacttcgacaaagacaacagcgggtttatcacaatggatgagttggagtcagccatgaaagagtatggtatgggagatgaagctagcatcaaagaagtcatagcggaagtcgatacagataacgatggaagaataaactatgaagaattttgtgcgatgatgagaagtggtatcacactgccacaacaagggaaaattcttccagtccaatgactgatagataaatcgagaagccttgatagaggaacttaaaaattaattagatatccaacattttttacagccgtgcaaaagagttgctgacttaaactagatactagttgtgttgtccaataaaaacaagtggcctttaatttctttctcttatctgatatgtcttgtccaaagttttggttactttagagtaccagcaaattactttcggagttatacatgtgtgcccaataaagaagttgtagtatagt

SEQ ID NO: 81489 - protein, 567 aa, Arabidopsis thaliana
  peptide (1)..(567): Ceres Seq. ID no. 12660030
TENTRNSIKKNLKMGCFSSKHRNTESDIINGSVQSSIPTNQPENHVSRDVLKPQKPPSPQIPTTTQSNHHHQQESKPVNQQIEKKHVLTQPLKPIVFRETETILGKPFEEIRKLYTLGKELGRGQFGITYTCKENSTGNTYACKSILKRKLTRKQDIDDVKREIQIMQYLSGQENIVEIKGAYEDRQSIHLVMELCGGSELFDRIIAQGHYSEKAAAGVIRSVLNVVQICHFMGVIHRDLKPENFLLASTDENAMLKATDFGLSVFIEEGKVYRDIVGSAYYVAPEVLRRSYGKEIDIWSAGIILYILLCGVPPFWSETEKGIFNEIIKGEIDFDSQPWPSISESAKDLVRKLLTKDPKQRISAAQALEHPWIRGGEAPDKPIDSAVLSRMKQFRAMNKLKKLALKVIAESLSEEEIKGLKTMFANMDTDKSGTITYEELKNGLAKLGSKLTEAEVKQLMEAADVDGNGTIDYIEFISATMHRYRFDRDEHVFKAFQYFDKDNSGFITMDELESAMKEYGMGDEASIKEVIAEVDTDNDGRINYEEFCAMMRSGITLPQQGKILPVQ

SEQ ID NO: 81490 - protein, 554 aa, Arabidopsis thaliana
  peptide (1)..(554): Ceres Seq. ID no. 12660031
MGCFSSKHRNTESDIINGSVQSSIPTNQPENHVSRDVLKPQKPPSPQIPTTTQSNHHHQQESKPVNQQIEKKHVLTQPLKPIVFRETETILGKPFEEIRKLYTLGKELGRGQFGITYTCKENSTGNTYACKSILKRKLTRKQDIDDVKREIQIMQYLSGQENIVEIKGAYEDRQSIHLVMELCGGSELFDRIIAQGHYSEKAAAGVIRSVLNVVQICHFMGVIHRDLKPENFLLASTDENAMLKATDFGLSVFIEEGKVYRDIVGSAYYVAPEVLRRSYGKEIDIWSAGIILYILLCGVPPFWSETEKGIFNEIIKGEIDFDSQPWPSISESAKDLVRKLLTKDPKQRISAAQALEHPWIRGGEAPDKPIDSAVLSRMKQFRAMNKLKKLALKVIAESLSEEEIKGLKTMFANMDTDKSGTITYEELKNGLAKLGSKLTEAEVKQLMEAADVDGNGTIDYIEFISATMHRYRFDRDEHVFKAFQYFDKDNSGFITMDELESAMKEYGMGDEASIKEVIAEVDTDNDGRINYEEFCAMMRSGITLPQQGKILPVQ

SEQ ID NO: 81491 - protein, 401 aa, Arabidopsis thaliana
  peptide (1)..(401): Ceres Seq. ID no. 12660032
MQYLSGQENIVEIKGAYEDRQSIHLVMELCGGSELFDRIIAQGHYSEKAAAGVIRSVLNVVQICHFMGVIHRDLKPENFLLASTDENAMLKATDFGLSVFIEEGKVYRDIVGSAYYVAPEVLRRSYGKEIDIWSAGIILYILLCGVPPFWSETEKGIFNEIIKGEIDFDSQPWPSISESAKDLVRKLLTKDPKQRISAAQALEHPWIRGGEAPDKPIDSAVLSRMKQFRAMNKLKKLALKVIAESLSEEEIKGLKTMFANMDTDKSGTITYEELKNGLAKLGSKLTEAEVKQLMEAADVDGNGTIDYIEFISATMHRYRFDRDEHVFKAFQYFDKDNSGFITMDELESAMKEYGMGDEASIKEVIAEVDTDNDGRINYEEFCAMMRSGITLPQQGKILPVQ

SEQ ID NO: 81492 - DNA, 1191 bp, Arabidopsis thaliana
  misc_feature (1)..(1191): Ceres Seq. ID no. 12660033
  misc_feature (1)..(1191): Ortholog of  Ceres SEQ ID NO 14306355 as cited in SEQ ID NO 1268
  misc_feature (1)..(1191): Ortholog of  Ceres SEQ ID NO 14305697 as cited in SEQ ID NO 52505
  misc_feature (1)..(1191): Ortholog of  Ceres SEQ ID NO 13624427 as cited in SEQ ID NO 0
  misc_feature (1)..(1191): Ortholog of  Ceres SEQ ID NO 14306242 as cited in SEQ ID NO 0
atggctactcattcaaggtttatatacgtgcttcttcttctttcatgcattgtttttgcattgcttgggggtagttgtggagatagtgtggagaataacaatgacgatgatgattgttcttcccggagttggcgtggttgtggtagtttctacggaaaaggtgctaaaagatatggcggtggaggcggaggaggaggtggcggtggaggaggtggtggtgaaggaggtgatgggtatggccatggagaaggatatggtgctggagctggtatgagtggctatggtggtgttggaggaggtggaggaagaggcggcggagaaggtggtggcagtagtgcaaatggaggttctgggcatggaagtggatccggtgctggtgctggtgttggtggaacaactggtggagtaggaggaggtggaggaggcggtggcggtggcggagaaggaggtggttcaagtggaggatcaggtcatgggagtggttctggagctggagctggtgctggagttggtggatcatctgggggagctgggggaggtggaggaggtggtggcggagaaggcggtggtgcgaatggaggttcaggtcatggaagtggggctggtgctggtgctggagttggaggagcagctggtggagtaggaggagggggaggaggcggtggtggagaaggcggtggtgccaatggaggatcaggtcatggaagcggatccggtgctggtggtggagttagtggagcagcaggtggaggaggaggaggaggaggaggtggtggtagcggtggtagtaaagtcggtggaggatatggtcatggtagtggttttggtggtggagttggctttggaaatagtggaggaggaggtggtggtggtggaggaggtggaggtggaggcggtggtggaaatggatctggttatggaagtggtagtggttacggttctggtatgggaaaaggtagtggtagtggtggcggtggtggtggtggtggtggaggtagcggtggaggcaacggaagcggaagtggaagtggagaaggatatggaatgggaggaggagccggaacaggcaatggaggaggagggggagtgggttttggaatgggcattggatttggtattggcattggaggaggaagtggtggtggtaccacttatcaaaccaatcttaccggtgataaaaattctccctag

SEQ ID NO: 81493 - protein, 396 aa, Arabidopsis thaliana
  peptide (1)..(396): Ceres Seq. ID no. 12660034
MATHSRFIYVLLLLSCIVFALLGGSCGDSVENNNDDDDCSSRSWRGCGSFYGKGAKRYGGGGGGGGGGGGGGGEGGDGYGHGEGYGAGAGMSGYGGVGGGGGRGGGEGGGSSANGGSGHGSGSGAGAGVGGTTGGVGGGGGGGGGGGEGGGSSGGSGHGSGSGAGAGAGVGGSSGGAGGGGGGGGGEGGGANGGSGHGSGAGAGAGVGGAAGGVGGGGGGGGGEGGGANGGSGHGSGSGAGGGVSGAAGGGGGGGGGGGSGGSKVGGGYGHGSGFGGGVGFGNSGGGGGGGGGGGGGGGGGNGSGYGSGSGYGSGMGKGSGSGGGGGGGGGGSGGGNGSGSGSGEGYGMGGGAGTGNGGGGGVGFGMGIGFGIGIGGGSGGGTTYQTNLTGDKNSP

SEQ ID NO: 81494 - protein, 306 aa, Arabidopsis thaliana
  peptide (1)..(306): Ceres Seq. ID no. 12660035
MSGYGGVGGGGGRGGGEGGGSSANGGSGHGSGSGAGAGVGGTTGGVGGGGGGGGGGGEGGGSSGGSGHGSGSGAGAGAGVGGSSGGAGGGGGGGGGEGGGANGGSGHGSGAGAGAGVGGAAGGVGGGGGGGGGEGGGANGGSGHGSGSGAGGGVSGAAGGGGGGGGGGGSGGSKVGGGYGHGSGFGGGVGFGNSGGGGGGGGGGGGGGGGGNGSGYGSGSGYGSGMGKGSGSGGGGGGGGGGSGGGNGSGSGSGEGYGMGGGAGTGNGGGGGVGFGMGIGFGIGIGGGSGGGTTYQTNLTGDKNSP

SEQ ID NO: 81495 - DNA, 1011 bp, Arabidopsis thaliana
  misc_feature (1)..(1011): Ceres Seq. ID no. 12660040
  misc_feature (1)..(1011): Ortholog of  Ceres SEQ ID NO 13599324 as cited in SEQ ID NO 0
atgtatacgagtatatttttcatcttttcctttctttctgtgtcagaagcgcttgtgagaatcccgttgcagatagatcatgccttgtcaacaaacaatgatggagttcagttgaagaacgtaaaggactttctgtactatgggaagatccaaattggcaatccaggccaaactttcactgttctgtttgataccggaagttcttccctttgggtcccgtcagaaaattggctggccaaaactgaaaaccctcgcaatcgttacatatccagtgcctcaagaacctttaaagaaaatggaacaaaggcagagctcaagtatggaaagggttccctcacgggtttcctaagtgttgacaccgttacggttggtgggattagcatcacgtcacagaccttcatagagggcgttaagactccttacaaagagtttttcaagaaaatgccgtttgatggtatattgggactcaggttcacggacccgctcaatttcggtacatctgtttggcactctatggttttccaaggcaaaattgcaaaaaatgtgttctctatctggcttagacggttttctaactctggagaaatcaacggtggagaggtagtatttggaggaatcatcccagcgcatttctccggtgaccatacatacgttgacgtggaagggccaggaaacttcttcgcaatgtccaacatttgggtcggaggaaaaaacaccaacatttgctccagtggctgcaaagctattgttgactccggaagttcaaatattaatgttccaatggattccgctgacgagatccataggtatatcggagtagaaccaaactgcaataattttgagacgctgcctgatgtcacctttacgatcggcggaaaggccttcgtcctcacaccacttgatgtaagtggaacgacattgggcatcccattcatgcgagtctttcacactgtttttgattaccagaacacacttgcagtgaaagttgggttcgctaagtcgactgattag

SEQ ID NO: 81496 - protein, 336 aa, Arabidopsis thaliana
  peptide (1)..(336): Ceres Seq. ID no. 12660041
MYTSIFFIFSFLSVSEALVRIPLQIDHALSTNNDGVQLKNVKDFLYYGKIQIGNPGQTFTVLFDTGSSSLWVPSENWLAKTENPRNRYISSASRTFKENGTKAELKYGKGSLTGFLSVDTVTVGGISITSQTFIEGVKTPYKEFFKKMPFDGILGLRFTDPLNFGTSVWHSMVFQGKIAKNVFSIWLRRFSNSGEINGGEVVFGGIIPAHFSGDHTYVDVEGPGNFFAMSNIWVGGKNTNICSSGCKAIVDSGSSNINVPMDSADEIHRYIGVEPNCNNFETLPDVTFTIGGKAFVLTPLDVSGTTLGIPFMRVFHTVFDYQNTLAVKVGFAKSTD

SEQ ID NO: 81497 - protein, 189 aa, Arabidopsis thaliana
  peptide (1)..(189): Ceres Seq. ID no. 12660042
MPFDGILGLRFTDPLNFGTSVWHSMVFQGKIAKNVFSIWLRRFSNSGEINGGEVVFGGIIPAHFSGDHTYVDVEGPGNFFAMSNIWVGGKNTNICSSGCKAIVDSGSSNINVPMDSADEIHRYIGVEPNCNNFETLPDVTFTIGGKAFVLTPLDVSGTTLGIPFMRVFHTVFDYQNTLAVKVGFAKSTD

SEQ ID NO: 81498 - DNA, 1617 bp, Arabidopsis thaliana
  misc_feature (1)..(1617): Ceres Seq. ID no. 12660047
  misc_feature (1)..(1617): Ortholog of  Ceres SEQ ID NO 13585587 as cited in SEQ ID NO 65515
atgttccggtttccagtgagtctaggcggttcacgtgacgaagaccgtcacgatcagatcacaccgttggatgaccatcgtgtggtggttgatgaggttgacttcttctcagagaagagagatagggtttcacgtgagaacatcaacgacgacgacgacgaaggcaataaggttctcatcaaaatggagggttcacgagttgaagaaaacgatcgttccagagatgtcaatatcggtctgaatcttctgaccgcgaatacgggaagcgatgagtcaacggtggatgatggactatcaatggatatggaagataaacgtgcaaagattgagaacgcacaactacaagaagagctcaagaagatgaaaatagagaatcaaaggctaagagatatgttgagccaagcgacgaccaacttcaatgccttacaaatgcaacttgttgccgtcatgaggcaacaagaacaacgtaactcttcacaagatcatctcctggctcaggagagcaaagcagaaggaaggaaacggcaggaactgcaaatcatggtgccaaggcagttcatggaccttgggccgtcgtctggagcagcagagcatggagccgaagtgtcatctgaagagaggacaacggttcgttcaggttctcctccttcgcttctagaaagttccaatccccgagagaacggaaagaggttgcttggaagagaagaaagctcagaggaatcagagtctaacgcctggggaaaccctaacaaagtccccaaacataatccatcctctagcaatagcaatggaaacagaaacggaaatgttattgatcagtcggccgcagaagccaccatgcggaaagcccgtgtctcagttcgtgcccgatctgaagctgccatgataagcgatggatgtcaatggagaaagtacggacaaaaaatggctaaaggaaacccgtgtccgcgggcttattatcgttgcacaatggccggtggatgtccagttcgcaagcaagtgcagcgttgcgcagaagacagatctattctcataaccacctacgaaggaaaccacaaccatccactcccaccagccgctacggccatggcctcaacaaccaccgcagctgcaagcatgctcctctcgggctcaatgtcgagtcaagacggtttaatgaacccaacaaacctcctagctcgagctatcttgccttgctcctcaagcatggctacaatctcagcctccgcaccattcccaaccatcacattggacctcaccaattcacccaacggtaacaaccctaatatgaccactaataacccgttgatgcagttcgctcaacggcccggtttcaacccggcagttttgcctcaagtggttggtcaagctatgtacaataaccaacaacagtccaagttttctggtttacagttaccggctcagccactgcagatcgcggccacttcctcggtggccgagagcgttagtgctgccagtgcagcaattgcgtccgatccaaactttgcggcggctctagcggcagcgatcacgtccattatgaacggttccagtcatcaaaataataacaccaataataataatgtggctacgagcaacaatgacagtaggcaataa

SEQ ID NO: 81499 - protein, 538 aa, Arabidopsis thaliana
  peptide (1)..(538): Ceres Seq. ID no. 12660048
MFRFPVSLGGSRDEDRHDQITPLDDHRVVVDEVDFFSEKRDRVSRENINDDDDEGNKVLIKMEGSRVEENDRSRDVNIGLNLLTANTGSDESTVDDGLSMDMEDKRAKIENAQLQEELKKMKIENQRLRDMLSQATTNFNALQMQLVAVMRQQEQRNSSQDHLLAQESKAEGRKRQELQIMVPRQFMDLGPSSGAAEHGAEVSSEERTTVRSGSPPSLLESSNPRENGKRLLGREESSEESESNAWGNPNKVPKHNPSSSNSNGNRNGNVIDQSAAEATMRKARVSVRARSEAAMISDGCQWRKYGQKMAKGNPCPRAYYRCTMAGGCPVRKQVQRCAEDRSILITTYEGNHNHPLPPAATAMASTTTAAASMLLSGSMSSQDGLMNPTNLLARAILPCSSSMATISASAPFPTITLDLTNSPNGNNPNMTTNNPLMQFAQRPGFNPAVLPQVVGQAMYNNQQQSKFSGLQLPAQPLQIAATSSVAESVSAASAAIASDPNFAAALAAAITSIMNGSSHQNNNTNNNNVATSNNDSRQ

SEQ ID NO: 81500 - protein, 477 aa, Arabidopsis thaliana
  peptide (1)..(477): Ceres Seq. ID no. 12660049
MEGSRVEENDRSRDVNIGLNLLTANTGSDESTVDDGLSMDMEDKRAKIENAQLQEELKKMKIENQRLRDMLSQATTNFNALQMQLVAVMRQQEQRNSSQDHLLAQESKAEGRKRQELQIMVPRQFMDLGPSSGAAEHGAEVSSEERTTVRSGSPPSLLESSNPRENGKRLLGREESSEESESNAWGNPNKVPKHNPSSSNSNGNRNGNVIDQSAAEATMRKARVSVRARSEAAMISDGCQWRKYGQKMAKGNPCPRAYYRCTMAGGCPVRKQVQRCAEDRSILITTYEGNHNHPLPPAATAMASTTTAAASMLLSGSMSSQDGLMNPTNLLARAILPCSSSMATISASAPFPTITLDLTNSPNGNNPNMTTNNPLMQFAQRPGFNPAVLPQVVGQAMYNNQQQSKFSGLQLPAQPLQIAATSSVAESVSAASAAIASDPNFAAALAAAITSIMNGSSHQNNNTNNNNVATSNNDSRQ

SEQ ID NO: 81501 - protein, 439 aa, Arabidopsis thaliana
  peptide (1)..(439): Ceres Seq. ID no. 12660050
MDMEDKRAKIENAQLQEELKKMKIENQRLRDMLSQATTNFNALQMQLVAVMRQQEQRNSSQDHLLAQESKAEGRKRQELQIMVPRQFMDLGPSSGAAEHGAEVSSEERTTVRSGSPPSLLESSNPRENGKRLLGREESSEESESNAWGNPNKVPKHNPSSSNSNGNRNGNVIDQSAAEATMRKARVSVRARSEAAMISDGCQWRKYGQKMAKGNPCPRAYYRCTMAGGCPVRKQVQRCAEDRSILITTYEGNHNHPLPPAATAMASTTTAAASMLLSGSMSSQDGLMNPTNLLARAILPCSSSMATISASAPFPTITLDLTNSPNGNNPNMTTNNPLMQFAQRPGFNPAVLPQVVGQAMYNNQQQSKFSGLQLPAQPLQIAATSSVAESVSAASAAIASDPNFAAALAAAITSIMNGSSHQNNNTNNNNVATSNNDSRQ

SEQ ID NO: 81502 - DNA, 402 bp, Arabidopsis thaliana
  misc_feature (1)..(402): Ceres Seq. ID no. 12660108
  misc_feature (1)..(402): Ortholog of  Ceres SEQ ID NO 13598157 as cited in SEQ ID NO 61570
atggctcttaaagactctcttgcgctcctccttctcttcaacatccttttcttcactctcactactgccactcgcagtaccaattgtcctcctccaccaggaaaacacaacaaacaaaaacctagcccaacacccactaccgggacttgtcctaaagatgccttaaaggtcggtgtttgtgttaacgcactcaacttgttaaacggtttgacccccggaactcctcctgtgactccatgttgcagccttatcgagggtttggtagatcttgaagctgcgatttgtctttgcactgctctcaaggctagtgttcttggcatcaaccttacccttcccatcaacctcagcttgcttctcaatatttgcaacagagaggcatcacgtgacttccaattcccttaa

SEQ ID NO: 81503 - protein, 133 aa, Arabidopsis thaliana
  peptide (1)..(133): Ceres Seq. ID no. 12660109
MALKDSLALLLLFNILFFTLTTATRSTNCPPPPGKHNKQKPSPTPTTGTCPKDALKVGVCVNALNLLNGLTPGTPPVTPCCSLIEGLVDLEAAICLCTALKASVLGINLTLPINLSLLLNICNREASRDFQFP

SEQ ID NO: 81504 - DNA, 874 bp, Arabidopsis thaliana
  misc_feature (1)..(874): Ceres Seq. ID no. 12660121
  misc_feature (1)..(874): Ortholog of  Ceres SEQ ID NO 12616162 as cited in SEQ ID NO 63260
atgtcaggagtttacgatagtcaagctgatatctacttagacgcacgacctacttatcccgccgattggtactccaagctcgccgctctctcccaccgtcacaatctcgcttgggacgccggaaccggaaacggccaagctgccatcggaatcgcggaacactacgaaagagtcgttgcgacggacgttagcgagacgatgttgaatctcggaaaaccgcatccgaaagtaacgtaccaccacacgccctcgtcgatgacggaagatgaaatggtagatcttattggaggagagaactctgtggatttgataacggtggctaccgccgtacactggttcgatctcccgagattctacgcgatcgcgaatcgtctcctccgtaaaccaggaggaatcatcgccgtgtggagctacaacactgacatggtggtgaatcccgagttcgactcggtgatgactcggttcatcgctgaaacgttgccgtattgtaaattcccagagagtcagtattttttggacggatataagacgttgccgtttccgtttgagagcgtgggtttgggctcagagggaaagcccatggaactggagatgaagaaaacggtgtcgtttgaaggattcttgcggatgctaagatcgtggtctgccgttggtgctgctaaagaaaaaggagtagacttattgtcggacaatgtagtcaaagagctcgagacggcttggggtggttatgagctggttcgaaccattgtttacaagacgtttatgctcgcaggaaccgttccttagaaactagcttctttttaatttggtatggctaagtctgaaacttgatatcttaagggtatttgaaacctcatgaaataacaaaaacagg

SEQ ID NO: 81505 - protein, 261 aa, Arabidopsis thaliana
  peptide (1)..(261): Ceres Seq. ID no. 12660122
MSGVYDSQADIYLDARPTYPADWYSKLAALSHRHNLAWDAGTGNGQAAIGIAEHYERVVATDVSETMLNLGKPHPKVTYHHTPSSMTEDEMVDLIGGENSVDLITVATAVHWFDLPRFYAIANRLLRKPGGIIAVWSYNTDMVVNPEFDSVMTRFIAETLPYCKFPESQYFLDGYKTLPFPFESVGLGSEGKPMELEMKKTVSFEGFLRMLRSWSAVGAAKEKGVDLLSDNVVKELETAWGGYELVRTIVYKTFMLAGTVP

SEQ ID NO: 81506 - protein, 195 aa, Arabidopsis thaliana
  peptide (1)..(195): Ceres Seq. ID no. 12660123
MLNLGKPHPKVTYHHTPSSMTEDEMVDLIGGENSVDLITVATAVHWFDLPRFYAIANRLLRKPGGIIAVWSYNTDMVVNPEFDSVMTRFIAETLPYCKFPESQYFLDGYKTLPFPFESVGLGSEGKPMELEMKKTVSFEGFLRMLRSWSAVGAAKEKGVDLLSDNVVKELETAWGGYELVRTIVYKTFMLAGTVP

SEQ ID NO: 81507 - protein, 176 aa, Arabidopsis thaliana
  peptide (1)..(176): Ceres Seq. ID no. 12660124
MTEDEMVDLIGGENSVDLITVATAVHWFDLPRFYAIANRLLRKPGGIIAVWSYNTDMVVNPEFDSVMTRFIAETLPYCKFPESQYFLDGYKTLPFPFESVGLGSEGKPMELEMKKTVSFEGFLRMLRSWSAVGAAKEKGVDLLSDNVVKELETAWGGYELVRTIVYKTFMLAGTVP

SEQ ID NO: 81508 - DNA, 2775 bp, Arabidopsis thaliana
  misc_feature (1)..(2775): Ceres Seq. ID no. 12660125
  misc_feature (1)..(2775): Ortholog of  Ceres SEQ ID NO 15170666 as cited in SEQ ID NO 63386
atctaagtttttccacataaagccatttacaaatattcaagcttactcagtctcacatttaagcaacctctctctctctgattctctctttctctgagaaaaatctcagtttctcagagctctcaggttcttttattcttcttcttcttcgatttcatcccccaaatctgcatgctctggatcttacgaatgttgctttgtagttttatgatctgagatcaaattttaacaaatccgtcaccggagacgaaaatgcgggttaaagagttacatccactttgttgtattactttggagagtcctcacgggattaatagccagtcaccggaagaaccggtgacaacggctttaactaggtcaaggagtttaccggcgaaatcgttgaccggtggatcggaatcggagactgtagctgggatcttatataaatggactaattttggtaaaggatggagatctagatggttcttactccgtaacggaatcttatcttattctaagatccggagaccggagaatttgaatctactttctccggatgatgatgtgaggttaatcggagatatttccggtgaacgtctttcgagaatggatagttgtagtggtcgccggaaacaacaaaaaaccgtcggcattgttcatcttaaggtttcttctttcagagaaagcaagtctgatgatagaaagttctatatattcacagcaacaaagacccttcatttgaggactgattctataactgatagagcagcttggttacaagcattagcatctacaaaatgtatctttcctctgcggtcacttaatggggatttctccttcataccaccaaaggatttgtccatatcaactgagagactaaagaaacggttgcacgaagagggtatgaatgagaatctcgtcaaagagtgcgaacagatcatgctctcagaattttctgaaatgcacggacaagttaaacttttacacgaagaacggactaatttgcttgatgcattgaggcagcttgaggcagctaatctcgaagttggtgcatcagggaagcatgagttttcaagcctaggacgtggaaagtatagtgaatgcagcacaactgcttcatctgatggtaaacaagagtttgaggatgtgtctgaggaagatgaaccttccttccacgacacaaaggagttctttaacgaacctaacattggttctgaatcaaatttagctatttctggacacacggatatcaagagaagaacaaaacttcctgatccagctgaaaaagagaaaggtgttagtctttggtctatgatcaaagacaacgttggaaaggatctcacccgagtttgcctccctgtgtatttcaatgaaccaatatcatccctccaaaaatgttttgaagacttggagtattcgtatcttttggaccgagcatatgaacatggaaaatctgggaatggtctcttaagagccttaaatgttgctgcttttgcggtctctggatatgcttccactgaaggcaggcattgtaagcccttcaatcctttgcttggagaaacctatgaagccgactttcctgaaaagggaatccgtttcttctctgagaaggtcagtcaccatccaactgttatcgcctgccactgtgaaggtaaagggtggaagttttggggtgacactaacctcaggtcaaagttttgggggaggtcgattcaagtcgaacctgttggagttttgactctggagttcgatgatggagaagtatttcagtggagcaaggtaacatcaactatatacaatatcatactaggtaaactctactgtgatcatcatggtgtgatgcaaatccgtgggaaccgccaatattcttgtacgctcaagtttaaggagcaatccattcttgagagaaatccccaccaggtaaacggttttgtagaagacgtagcagggcaaaaagcagcaacaatatttggtaaatgggatgatagcctttactatgttgctggtgatggaatcaacaagtcgaaagtcagtgatcctgcatcaaatgcctcgttactgtggaaaaggaccaagccaccgcctaatgtaactagatacaacttaacctcatttgccattactctgaacgagctaacacctgggttacaggagatacttcctcccacagactctaggctcagaccagatcaacggcatcttgagaatggtgaatatgagaaggcgaacttagagaaacaacggttagaaagaaggcaaagaatgtcgcggcaacttcaagaaagcggttggagaccgagatggtttgagagacaaggtgaaagcgacaccttcaagtacacgggtggttattgggaagcacgagggcataggaactgggatgattgccccgacatcttcggggagttcacagaagagctagcggacgccgcttagaaagcttcttgacttcattccagaagatcttcattcggaccatattggagttgtttacacggcagcacccatctttcgaccatggtttcagttttctgcttgaaagagggcatagaacaaatatcagaaggaggctttggttctatctcctaaaagacgtcctccttttgagtcttagagtgtcactgtaaagtcttatatccttctcttcaattctctatctccctcgtcaaatagttgagattaatgtagtaggttggtcttacattggacaagttccttgtaatccatttgtatttaattattaaaaaaatatatgtcagcaataaaaataaatcccgacaaagactctttcac

SEQ ID NO: 81509 - protein, 721 aa, Arabidopsis thaliana
  peptide (1)..(721): Ceres Seq. ID no. 12660126
MRVKELHPLCCITLESPHGINSQSPEEPVTTALTRSRSLPAKSLTGGSESETVAGILYKWTNFGKGWRSRWFLLRNGILSYSKIRRPENLNLLSPDDDVRLIGDISGERLSRMDSCSGRRKQQKTVGIVHLKVSSFRESKSDDRKFYIFTATKTLHLRTDSITDRAAWLQALASTKCIFPLRSLNGDFSFIPPKDLSISTERLKKRLHEEGMNENLVKECEQIMLSEFSEMHGQVKLLHEERTNLLDALRQLEAANLEVGASGKHEFSSLGRGKYSECSTTASSDGKQEFEDVSEEDEPSFHDTKEFFNEPNIGSESNLAISGHTDIKRRTKLPDPAEKEKGVSLWSMIKDNVGKDLTRVCLPVYFNEPISSLQKCFEDLEYSYLLDRAYEHGKSGNGLLRALNVAAFAVSGYASTEGRHCKPFNPLLGETYEADFPEKGIRFFSEKVSHHPTVIACHCEGKGWKFWGDTNLRSKFWGRSIQVEPVGVLTLEFDDGEVFQWSKVTSTIYNIILGKLYCDHHGVMQIRGNRQYSCTLKFKEQSILERNPHQVNGFVEDVAGQKAATIFGKWDDSLYYVAGDGINKSKVSDPASNASLLWKRTKPPPNVTRYNLTSFAITLNELTPGLQEILPPTDSRLRPDQRHLENGEYEKANLEKQRLERRQRMSRQLQESGWRPRWFERQGESDTFKYTGGYWEARGHRNWDDCPDIFGEFTEELADAA

SEQ ID NO: 81510 - protein, 609 aa, Arabidopsis thaliana
  peptide (1)..(609): Ceres Seq. ID no. 12660127
MDSCSGRRKQQKTVGIVHLKVSSFRESKSDDRKFYIFTATKTLHLRTDSITDRAAWLQALASTKCIFPLRSLNGDFSFIPPKDLSISTERLKKRLHEEGMNENLVKECEQIMLSEFSEMHGQVKLLHEERTNLLDALRQLEAANLEVGASGKHEFSSLGRGKYSECSTTASSDGKQEFEDVSEEDEPSFHDTKEFFNEPNIGSESNLAISGHTDIKRRTKLPDPAEKEKGVSLWSMIKDNVGKDLTRVCLPVYFNEPISSLQKCFEDLEYSYLLDRAYEHGKSGNGLLRALNVAAFAVSGYASTEGRHCKPFNPLLGETYEADFPEKGIRFFSEKVSHHPTVIACHCEGKGWKFWGDTNLRSKFWGRSIQVEPVGVLTLEFDDGEVFQWSKVTSTIYNIILGKLYCDHHGVMQIRGNRQYSCTLKFKEQSILERNPHQVNGFVEDVAGQKAATIFGKWDDSLYYVAGDGINKSKVSDPASNASLLWKRTKPPPNVTRYNLTSFAITLNELTPGLQEILPPTDSRLRPDQRHLENGEYEKANLEKQRLERRQRMSRQLQESGWRPRWFERQGESDTFKYTGGYWEARGHRNWDDCPDIFGEFTEELADAA

SEQ ID NO: 81511 - protein, 510 aa, Arabidopsis thaliana
  peptide (1)..(510): Ceres Seq. ID no. 12660128
MNENLVKECEQIMLSEFSEMHGQVKLLHEERTNLLDALRQLEAANLEVGASGKHEFSSLGRGKYSECSTTASSDGKQEFEDVSEEDEPSFHDTKEFFNEPNIGSESNLAISGHTDIKRRTKLPDPAEKEKGVSLWSMIKDNVGKDLTRVCLPVYFNEPISSLQKCFEDLEYSYLLDRAYEHGKSGNGLLRALNVAAFAVSGYASTEGRHCKPFNPLLGETYEADFPEKGIRFFSEKVSHHPTVIACHCEGKGWKFWGDTNLRSKFWGRSIQVEPVGVLTLEFDDGEVFQWSKVTSTIYNIILGKLYCDHHGVMQIRGNRQYSCTLKFKEQSILERNPHQVNGFVEDVAGQKAATIFGKWDDSLYYVAGDGINKSKVSDPASNASLLWKRTKPPPNVTRYNLTSFAITLNELTPGLQEILPPTDSRLRPDQRHLENGEYEKANLEKQRLERRQRMSRQLQESGWRPRWFERQGESDTFKYTGGYWEARGHRNWDDCPDIFGEFTEELADAA

SEQ ID NO: 81512 - DNA, 2670 bp, Arabidopsis thaliana
  misc_feature (1)..(2670): Ceres Seq. ID no. 12660147
  misc_feature (1)..(2670): Ortholog of  Ceres SEQ ID NO 12586556 as cited in SEQ ID NO 64667
  misc_feature (1)..(2670): Ortholog of  Ceres SEQ ID NO 13660894 as cited in SEQ ID NO 67475
atgtctgattcgattcaccggagaaaagtttcgaatcctgtaggaaatggaggtcggagctccagaacaagacgaacagctttcagatatgtttccgacaagaataatcgctctaaatcgagtaataaggttttcgagagaagcttctcagagccgagtcttaatcgccaccgcgacggacagagtaatcacttgcggcgaccatcgccgatgagaggtttaccgatggaagaagaaacaaaaccgatcgtttacttgcctaggattcgctctgaggttttcgcttcgtctccgtcgttgttgaacttatattcgccctcgtcttcatctccgatcaatcaagagggtaatacaaaagaagcaccaaaagtaataatcagtgtagcagtagaaggaagtcctggaccggtaagagcaatggttaaactgagttgcaacgtcgaagaaacgatcaaaattgtcgttgacaagtactgtaaagaaggaagaactccaaaactcgatcgagattctgcctttgaattgcatcagtcacatttcagcatccagtgtttggagaaaagagaaataattggagaattaggcagtagaagcttctacatgagaaagaaagctcctgaaaccggaggttcgttcgccgggatttctccagcgagaacgagcctaattccgtcgtcgaatttgatcggatcgtgcatcgctcagttgattgggaaaatcatgaggagaacaagaaggatatggaacatattgtggaaggtctttggtagattggttcttgtgttggttttagagtttgtttcacaaatgttggattctaagctgagattcttccttcaaagatgtgtagtgcttgaacaggcgaagcaagttcatgcacagttagtagtgaaccgctataaccatcttgaacccatcttggttcaccaaactcttcacttcactaaagagttctctaggaatattgtaacctatgttaaaagaatcctcaaggggtttaatggtcatgattctttctcctgggggtgtttagttcggttcttaagccagcataggaagtttaaagaaacggttgacgtgtatattgatatgcataactctgggattcctccaagttcacatgctgtaacctcagtgttaagagcctgtggtaaaatggagaatatggttgatggtaaaccgattcatgctcaggctctgaaaaatggattgtgtggttgtgtttatgttcagacaggtctggtgggtttgtattctagacttggttacattgagctggcaaagaaggcgtttgatgatattgctgagaagaacacagtttcgtggaactcgctattacacgggtatctggaaagcggggaactagatgaggctcgcagagtctttgacaagatccctgagaaagatgctgtgtcatggaatctgattatctcgagctatgcaaaaaaaggtgacatgggcaatgcatgctctttgttttcagcaatgcctttgaaaagtccggcttcttggaatatattgataggcgggtatgtgaattgcagggaaatgaaactagcaagaacctacttcgatgcaatgccccagaagaatggtgtctcttggattacaatgatttcagggtacacaaaattgggagatgttcagtctgctgaggagctctttagactgatgtctaagaaagacaaactcgtctatgatgccatgatagcttgttatactcaaaacggcaagccaaaggatgctctgaagctattcgctcagatgcttgaaaggaattcatatattcagccggatgagatcacactctcaagtgttgtatcagctaattcacagttgggtaataccagttttggtacatgggttgagtcatatataaccgaacatggaatcaagatcgatgatctcttaagtacctctctaattgatctttacatgaaaggcggagactttgccaaggcattcaaaatgttcagcaatctaaacaaaaaggacacagtttcttactctgctatgatcatgggctgcgggataaacggcatggccacagaagcaaacagtttgtttacagctatgattgaaaagaagatccctccaaatgtagtaacattcacaggactattatcagcgtatagccattcaggtcttgttcaagaaggctacaaatgctttaactccatgaaagaccacaacttggaaccctccgctgatcattatgggataatggtggatatgttgggacgagccgggaggctagaagaagcatatgagctgatcaagagtatgccgatgcagccaaatgctggagtttggggagctttgcttttagccagtgggttacacaacaacgttgaatttggagagattgcgtgcagtcactgcgttaaactcgagacagatcctacaggttatctttcgcatcttgctatgatatattcgtctgttggtagatgggacgatgccaggactgttagagacagtataaaagagaagaaactgtctgtaggtagttttttagccggcagcaagatcatagaccgaagcagcagaatcaaaaggtgtctccaatgccaaccggcaaccacattgcagcatgtaaactggaaaacagtaccttatgttgaaaaagaaagacaaaatggtggttcgattgtgtacaaattaaaataa

SEQ ID NO: 81513 - protein, 889 aa, Arabidopsis thaliana
  peptide (1)..(889): Ceres Seq. ID no. 12660148
MSDSIHRRKVSNPVGNGGRSSRTRRTAFRYVSDKNNRSKSSNKVFERSFSEPSLNRHRDGQSNHLRRPSPMRGLPMEEETKPIVYLPRIRSEVFASSPSLLNLYSPSSSSPINQEGNTKEAPKVIISVAVEGSPGPVRAMVKLSCNVEETIKIVVDKYCKEGRTPKLDRDSAFELHQSHFSIQCLEKREIIGELGSRSFYMRKKAPETGGSFAGISPARTSLIPSSNLIGSCIAQLIGKIMRRTRRIWNILWKVFGRLVLVLVLEFVSQMLDSKLRFFLQRCVVLEQAKQVHAQLVVNRYNHLEPILVHQTLHFTKEFSRNIVTYVKRILKGFNGHDSFSWGCLVRFLSQHRKFKETVDVYIDMHNSGIPPSSHAVTSVLRACGKMENMVDGKPIHAQALKNGLCGCVYVQTGLVGLYSRLGYIELAKKAFDDIAEKNTVSWNSLLHGYLESGELDEARRVFDKIPEKDAVSWNLIISSYAKKGDMGNACSLFSAMPLKSPASWNILIGGYVNCREMKLARTYFDAMPQKNGVSWITMISGYTKLGDVQSAEELFRLMSKKDKLVYDAMIACYTQNGKPKDALKLFAQMLERNSYIQPDEITLSSVVSANSQLGNTSFGTWVESYITEHGIKIDDLLSTSLIDLYMKGGDFAKAFKMFSNLNKKDTVSYSAMIMGCGINGMATEANSLFTAMIEKKIPPNVVTFTGLLSAYSHSGLVQEGYKCFNSMKDHNLEPSADHYGIMVDMLGRAGRLEEAYELIKSMPMQPNAGVWGALLLASGLHNNVEFGEIACSHCVKLETDPTGYLSHLAMIYSSVGRWDDARTVRDSIKEKKLSVGSFLAGSKIIDRSSRIKRCLQCQPATTLQHVNWKTVPYVEKERQNGGSIVYKLK

SEQ ID NO: 81514 - protein, 819 aa, Arabidopsis thaliana
  peptide (1)..(819): Ceres Seq. ID no. 12660149
MRGLPMEEETKPIVYLPRIRSEVFASSPSLLNLYSPSSSSPINQEGNTKEAPKVIISVAVEGSPGPVRAMVKLSCNVEETIKIVVDKYCKEGRTPKLDRDSAFELHQSHFSIQCLEKREIIGELGSRSFYMRKKAPETGGSFAGISPARTSLIPSSNLIGSCIAQLIGKIMRRTRRIWNILWKVFGRLVLVLVLEFVSQMLDSKLRFFLQRCVVLEQAKQVHAQLVVNRYNHLEPILVHQTLHFTKEFSRNIVTYVKRILKGFNGHDSFSWGCLVRFLSQHRKFKETVDVYIDMHNSGIPPSSHAVTSVLRACGKMENMVDGKPIHAQALKNGLCGCVYVQTGLVGLYSRLGYIELAKKAFDDIAEKNTVSWNSLLHGYLESGELDEARRVFDKIPEKDAVSWNLIISSYAKKGDMGNACSLFSAMPLKSPASWNILIGGYVNCREMKLARTYFDAMPQKNGVSWITMISGYTKLGDVQSAEELFRLMSKKDKLVYDAMIACYTQNGKPKDALKLFAQMLERNSYIQPDEITLSSVVSANSQLGNTSFGTWVESYITEHGIKIDDLLSTSLIDLYMKGGDFAKAFKMFSNLNKKDTVSYSAMIMGCGINGMATEANSLFTAMIEKKIPPNVVTFTGLLSAYSHSGLVQEGYKCFNSMKDHNLEPSADHYGIMVDMLGRAGRLEEAYELIKSMPMQPNAGVWGALLLASGLHNNVEFGEIACSHCVKLETDPTGYLSHLAMIYSSVGRWDDARTVRDSIKEKKLSVGSFLAGSKIIDRSSRIKRCLQCQPATTLQHVNWKTVPYVEKERQNGGSIVYKLK

SEQ ID NO: 81515 - protein, 814 aa, Arabidopsis thaliana
  peptide (1)..(814): Ceres Seq. ID no. 12660150
MEEETKPIVYLPRIRSEVFASSPSLLNLYSPSSSSPINQEGNTKEAPKVIISVAVEGSPGPVRAMVKLSCNVEETIKIVVDKYCKEGRTPKLDRDSAFELHQSHFSIQCLEKREIIGELGSRSFYMRKKAPETGGSFAGISPARTSLIPSSNLIGSCIAQLIGKIMRRTRRIWNILWKVFGRLVLVLVLEFVSQMLDSKLRFFLQRCVVLEQAKQVHAQLVVNRYNHLEPILVHQTLHFTKEFSRNIVTYVKRILKGFNGHDSFSWGCLVRFLSQHRKFKETVDVYIDMHNSGIPPSSHAVTSVLRACGKMENMVDGKPIHAQALKNGLCGCVYVQTGLVGLYSRLGYIELAKKAFDDIAEKNTVSWNSLLHGYLESGELDEARRVFDKIPEKDAVSWNLIISSYAKKGDMGNACSLFSAMPLKSPASWNILIGGYVNCREMKLARTYFDAMPQKNGVSWITMISGYTKLGDVQSAEELFRLMSKKDKLVYDAMIACYTQNGKPKDALKLFAQMLERNSYIQPDEITLSSVVSANSQLGNTSFGTWVESYITEHGIKIDDLLSTSLIDLYMKGGDFAKAFKMFSNLNKKDTVSYSAMIMGCGINGMATEANSLFTAMIEKKIPPNVVTFTGLLSAYSHSGLVQEGYKCFNSMKDHNLEPSADHYGIMVDMLGRAGRLEEAYELIKSMPMQPNAGVWGALLLASGLHNNVEFGEIACSHCVKLETDPTGYLSHLAMIYSSVGRWDDARTVRDSIKEKKLSVGSFLAGSKIIDRSSRIKRCLQCQPATTLQHVNWKTVPYVEKERQNGGSIVYKLK

SEQ ID NO: 81516 - DNA, 975 bp, Arabidopsis thaliana
  misc_feature (1)..(975): Ceres Seq. ID no. 12660155
  misc_feature (1)..(975): Ortholog of  Ceres SEQ ID NO 13584646 as cited in SEQ ID NO 60715
atggatccagtacaatctcatggatcacaaagctctctacctcctcctttccacgcaagagactttcaattacatcttcaacaacagcaacaagagttcttcctccaccatcaccagcaacaaagaaaccaaaccgatggtgaccaacaaggaggatcaggaggaaaccgacaaatcaagatggatcgtgaagagacaagcgacaacatagacaacatagctaacaacagcggtagtgaaggtaaagacatagatatacacggtggttcaggagaaggaggtggtggctccggaggagatcatcagatgacaagaagaccaagaggaagaccagcgggatccaagaacaaaccaaaaccaccgattatcatcacacgggacagcgcaaacgcgcttagaacccacgtgatggagatcggagatggctgcgacttagtcgaaagcgttgccacttttgcacgaagacgccaacgcggcgtttgcgttatgagcggtactggaaatgttactaacgtcactatacgtcagcctggatctcatccttctcctggctcggtagttagtcttcacggaaggttcgagattctatctctctcaggatcttttctccctcctccggctcctcctacagccaccggattgagtgtttacctcgctggaggacaaggacaggtggttggaggaagcgtagttggtccgttgttatgtgctggtcctgtcgttgtcatggctgcgtcttttagcaatgcggcgtacgaaaggttgcctttagaggaagatgagatgcagacgccggttcatggcggaggaggaggaggatcattggagtcgccgccaatgatgggacaacaactgcaacatcagcaacaagctatgtcaggtcatcaagggttaccacctaatcttcttggttcggttcagttgcagcagcaacatgatcagtcttattggtcaacgggacgaccaccgtattga

SEQ ID NO: 81517 - protein, 324 aa, Arabidopsis thaliana
  peptide (1)..(324): Ceres Seq. ID no. 12660156
MDPVQSHGSQSSLPPPFHARDFQLHLQQQQQEFFLHHHQQQRNQTDGDQQGGSGGNRQIKMDREETSDNIDNIANNSGSEGKDIDIHGGSGEGGGGSGGDHQMTRRPRGRPAGSKNKPKPPIIITRDSANALRTHVMEIGDGCDLVESVATFARRRQRGVCVMSGTGNVTNVTIRQPGSHPSPGSVVSLHGRFEILSLSGSFLPPPAPPTATGLSVYLAGGQGQVVGGSVVGPLLCAGPVVVMAASFSNAAYERLPLEEDEMQTPVHGGGGGGSLESPPMMGQQLQHQQQAMSGHQGLPPNLLGSVQLQQQHDQSYWSTGRPPY

SEQ ID NO: 81518 - protein, 264 aa, Arabidopsis thaliana
  peptide (1)..(264): Ceres Seq. ID no. 12660157
MDREETSDNIDNIANNSGSEGKDIDIHGGSGEGGGGSGGDHQMTRRPRGRPAGSKNKPKPPIIITRDSANALRTHVMEIGDGCDLVESVATFARRRQRGVCVMSGTGNVTNVTIRQPGSHPSPGSVVSLHGRFEILSLSGSFLPPPAPPTATGLSVYLAGGQGQVVGGSVVGPLLCAGPVVVMAASFSNAAYERLPLEEDEMQTPVHGGGGGGSLESPPMMGQQLQHQQQAMSGHQGLPPNLLGSVQLQQQHDQSYWSTGRPPY

SEQ ID NO: 81519 - protein, 222 aa, Arabidopsis thaliana
  peptide (1)..(222): Ceres Seq. ID no. 12660158
MTRRPRGRPAGSKNKPKPPIIITRDSANALRTHVMEIGDGCDLVESVATFARRRQRGVCVMSGTGNVTNVTIRQPGSHPSPGSVVSLHGRFEILSLSGSFLPPPAPPTATGLSVYLAGGQGQVVGGSVVGPLLCAGPVVVMAASFSNAAYERLPLEEDEMQTPVHGGGGGGSLESPPMMGQQLQHQQQAMSGHQGLPPNLLGSVQLQQQHDQSYWSTGRPPY

SEQ ID NO: 81520 - DNA, 654 bp, Arabidopsis thaliana
  misc_feature (1)..(654): Ceres Seq. ID no. 12660159
  misc_feature (1)..(654): Ortholog of  Ceres SEQ ID NO 13596087 as cited in SEQ ID NO 68336
atgactgttacggaggacgaaaaaccggttcttgagctgctggtgagagttgaagacgacgatgagaaagggccttatgtgaaattgagtgaggttttagagaaaggtcaagaatcagagcaggagaaggaagaagaaaagactgattcgtcgcggttttggttttgggtcaagctttctcttttattcgcctttcttgctgcattggctgttgtgggttacatttggatcggtccattgatcatggataagggatggctagaaagatatcctgatcaagcagccgtattaagagctgctggtgaagggaattggcttcaccaatttctattagtaaccttaatccggatttctccattcccttacattctttataactactgttctgtagcaactcgtgttaagtatggtccttacatcacgggctctctcttaggcatggtgcctgaggtttttgtcgcaatctacacagggatacttgtaaggacattagcagaagcatcttctgcagaagaacagggtctctcggtaacacaggtgattctcaacattctcggctttttagcaacagtggctacaacgattctcatcacaaagtatgcgaaaagacagctggagacgatgaagaaagaggacgaagcattgttgcagtaa

SEQ ID NO: 81521 - protein, 217 aa, Arabidopsis thaliana
  peptide (1)..(217): Ceres Seq. ID no. 12660160
MTVTEDEKPVLELLVRVEDDDEKGPYVKLSEVLEKGQESEQEKEEEKTDSSRFWFWVKLSLLFAFLAALAVVGYIWIGPLIMDKGWLERYPDQAAVLRAAGEGNWLHQFLLVTLIRISPFPYILYNYCSVATRVKYGPYITGSLLGMVPEVFVAIYTGILVRTLAEASSAEEQGLSVTQVILNILGFLATVATTILITKYAKRQLETMKKEDEALLQ

SEQ ID NO: 81522 - protein, 136 aa, Arabidopsis thaliana
  peptide (1)..(136): Ceres Seq. ID no. 12660161
MDKGWLERYPDQAAVLRAAGEGNWLHQFLLVTLIRISPFPYILYNYCSVATRVKYGPYITGSLLGMVPEVFVAIYTGILVRTLAEASSAEEQGLSVTQVILNILGFLATVATTILITKYAKRQLETMKKEDEALLQ

SEQ ID NO: 81523 - DNA, 1509 bp, Arabidopsis thaliana
  misc_feature (1)..(1509): Ceres Seq. ID no. 12660170
  misc_feature (1)..(1509): Ortholog of  Ceres SEQ ID NO 14302875 as cited in SEQ ID NO 66242
  misc_feature (1)..(1509): Ortholog of  Ceres SEQ ID NO 13660287 as cited in SEQ ID NO 67316
atggcagctcctttgttgatgatcatcaagaaccaaacagatcaccgacaagatccgaatccgaacccgacccacctttcctcttcgatccaagaagccaaatcaatcgccaaaatatctctcccactgatcttaaccggtttacttctctactctcgctcaatgatctcaatgctcttcctcggccgtctcaacgatctctctgctctttccggtggctcactcgccctcggcttcgctaacatcacgggttactctctcctctccggtctctctatcggcatggaacccatctgcgttcaagcctttggcgccaaaagattcaaacttttaggccttgctttgcaaagaaccacacttttgcttctcctctgttctcttcccatatctatcctctggctcaacatcaagaagatccttctcttcttcggacaagacgaagaaatctcaaaccaagctgagatctttatcctcttctctctccctgatctgatcctccaatcttttttacatcctatccgtatctacctccgatctcaatcgatcactcttcctctaacctactctgctttcttcgcagtattactccacattccgattaactaccttctcgtttcttctctcggtctcggccttaaaggagtcgccttgggagcaatctggactaatgtcaatctcctagggtttctaatcatctacatagtgttttccggtgtttaccagaagacttggggaggattctcaatggattgctttaaaggatggagatctctaatgaaactagccatccctagctgcgtctcggtttgtttagagtggtggtggtatgaaatcatgattcttctatgtggattgttacttaacccgcaagcaaccgtggcatctatgggaatcttgatccaaaccaccgctttgatctacattttcccttcctctctgagtatcagcgtatcgacacgtgtcgggaatgaattaggtgcgaatcagcctgataaagcgaggatagctgcgagaaccggacttagtttaagccttggtttaggtttattggcaatgtttttcgctttgatggtgaggaattgctgggcaagattgttcacagatgaggaagagattgtgaagttgacttcaatggttttaccgatcatcgggctttgcgagctaggaaactgtcctcagaccacattgtgtggagtgttgagaggaagtgcgagacctaagttaggagcaaacataaacttgtgttgtttctactttgtgggaatgccagtggctgtatggttaagtttctttagcgggtttgacttcaaaggactatggctcggtctatttgcagcacaaggctcgtgcctgatttcgatgctggtcgtgttggctaggactgattgggaagttgaggttcatagagcaaaagaactcatgactagatcatgtgatggtgatgaagatgatggtaatacaccgtttttattggattctttggatatagaagaaaatcttgtcttctag

SEQ ID NO: 81524 - protein, 502 aa, Arabidopsis thaliana
  peptide (1)..(502): Ceres Seq. ID no. 12660171
MAAPLLMIIKNQTDHRQDPNPNPTHLSSSIQEAKSIAKISLPLILTGLLLYSRSMISMLFLGRLNDLSALSGGSLALGFANITGYSLLSGLSIGMEPICVQAFGAKRFKLLGLALQRTTLLLLLCSLPISILWLNIKKILLFFGQDEEISNQAEIFILFSLPDLILQSFLHPIRIYLRSQSITLPLTYSAFFAVLLHIPINYLLVSSLGLGLKGVALGAIWTNVNLLGFLIIYIVFSGVYQKTWGGFSMDCFKGWRSLMKLAIPSCVSVCLEWWWYEIMILLCGLLLNPQATVASMGILIQTTALIYIFPSSLSISVSTRVGNELGANQPDKARIAARTGLSLSLGLGLLAMFFALMVRNCWARLFTDEEEIVKLTSMVLPIIGLCELGNCPQTTLCGVLRGSARPKLGANINLCCFYFVGMPVAVWLSFFSGFDFKGLWLGLFAAQGSCLISMLVVLARTDWEVEVHRAKELMTRSCDGDEDDGNTPFLLDSLDIEENLVF

SEQ ID NO: 81525 - protein, 496 aa, Arabidopsis thaliana
  peptide (1)..(496): Ceres Seq. ID no. 12660172
MIIKNQTDHRQDPNPNPTHLSSSIQEAKSIAKISLPLILTGLLLYSRSMISMLFLGRLNDLSALSGGSLALGFANITGYSLLSGLSIGMEPICVQAFGAKRFKLLGLALQRTTLLLLLCSLPISILWLNIKKILLFFGQDEEISNQAEIFILFSLPDLILQSFLHPIRIYLRSQSITLPLTYSAFFAVLLHIPINYLLVSSLGLGLKGVALGAIWTNVNLLGFLIIYIVFSGVYQKTWGGFSMDCFKGWRSLMKLAIPSCVSVCLEWWWYEIMILLCGLLLNPQATVASMGILIQTTALIYIFPSSLSISVSTRVGNELGANQPDKARIAARTGLSLSLGLGLLAMFFALMVRNCWARLFTDEEEIVKLTSMVLPIIGLCELGNCPQTTLCGVLRGSARPKLGANINLCCFYFVGMPVAVWLSFFSGFDFKGLWLGLFAAQGSCLISMLVVLARTDWEVEVHRAKELMTRSCDGDEDDGNTPFLLDSLDIEENLVF

SEQ ID NO: 81526 - protein, 448 aa, Arabidopsis thaliana
  peptide (1)..(448): Ceres Seq. ID no. 12660173
MISMLFLGRLNDLSALSGGSLALGFANITGYSLLSGLSIGMEPICVQAFGAKRFKLLGLALQRTTLLLLLCSLPISILWLNIKKILLFFGQDEEISNQAEIFILFSLPDLILQSFLHPIRIYLRSQSITLPLTYSAFFAVLLHIPINYLLVSSLGLGLKGVALGAIWTNVNLLGFLIIYIVFSGVYQKTWGGFSMDCFKGWRSLMKLAIPSCVSVCLEWWWYEIMILLCGLLLNPQATVASMGILIQTTALIYIFPSSLSISVSTRVGNELGANQPDKARIAARTGLSLSLGLGLLAMFFALMVRNCWARLFTDEEEIVKLTSMVLPIIGLCELGNCPQTTLCGVLRGSARPKLGANINLCCFYFVGMPVAVWLSFFSGFDFKGLWLGLFAAQGSCLISMLVVLARTDWEVEVHRAKELMTRSCDGDEDDGNTPFLLDSLDIEENLVF

SEQ ID NO: 81527 - DNA, 2808 bp, Arabidopsis thaliana
  misc_feature (1)..(2808): Ceres Seq. ID no. 12660174
  misc_feature (1)..(2808): Ortholog of  Ceres SEQ ID NO 13593889 as cited in SEQ ID NO 53305
  misc_feature (1)..(2808): Ortholog of  Ceres SEQ ID NO 13581959 as cited in SEQ ID NO 56156
atcagagtcggatcttgatgcgactgctcaaacagagtcaccggcgattacgatggccggaaacaactcggaatcgagtctctaccaggttttggtggagtggtgtcagaggatggagacgagtcaagcgagactaagggaggatgttgatgacttattgcttcaggaggagagtcgaaccggtaaggaatcggcgacgggattggagacggacacggagaaagaggctgaggtagaggtggaagcggaggcggcggattcctgggataatccgacggcgacttgggagagagctgtttcaggattctatttcgctgatagtgcgtatcggactttgatggattcaatgggacacgcgattcatgtaacatcagctgcgtctggagaaattacattctggagtcgttctgctgagaatctgtaccattggtatgctgaggaagttgttggctacagaactattgatgtgcttgtaaccgaagaataccgtaattcccttactggtatcaggaatagggtgtgccgtggagagacttggactggtcagtttccgtttcagaagaaaactggtgaactatttatggctttggtgactaaaagccctgtgtatgaaaacggtgagctggttggtgttgttactgtctcgagcgatgcaacccttttcaataggatgcatccactaagtaatgagcatcaacaacaagctcgtagtaataatagacatgaatcaaacttgagaaaacatcagtggcacctcccgaggcctcagatcgctgcagcatcacaggttccagttgtcccacaatattcatcagctgttgcttcaaacctggcgtcgaagcttctaccacagagaaatggagatgattccttcaatggaaatcataattcgaggagccgagatgaaaatgttccggttgttgcctccacaactttcgagaagtatggctcactggcggataagtttttggggaagctgcaaaggaagattactggcagccaaggaaccgaagataatgagcctatcttaagaaacggtatcaataagtcagcatgtggcagtggaggtagttctaaggcttctaatgcagttacctgcacggctttcagagacaatggcaatggaaaaccaaaaagggctgaagttagaatttcagatgtctatggaaatggagctgagggtttgatacataatggagatcgctttcagtatattgggaacctgggacaaagtaaacctcccagaggactagagagtggtttggtgtctggcatgcggggaacaaaaatgtcggacctaaatggtgagatagaagatgcttggaatactcgtcttagtgttgatcccttgccaattctaggagtcaacagcggtaggcaacaaagtcctgtcaaccaaaggaataatagattagttactgattcgtcatgtgagatacgatgggaagatctacaacttggggaggaggtcggaagaggttcatttgctgcggttcatcgtggagtttggaatggatcggatgttgctattaaggtttacttcgatggtgattacaatgcgatgactttgacggagtgcaaaaaggagatcaacattatgaagaaactgagacatccgaatgtgctactatttatgggagcagtatgtacagaagaaaaatctgccataatcatggaatatatgccaagagggagtctcttcaaaatacttcataatacgaatcagccattggacaagaaacgccgtttaagaatggcccttgatgttgctaggggaatgaattacttacaccgcagaaatccgccaattgtacatagagacttgaaatcttccaatctactcgtggacaagaactggaatgtcaaggttggagactttgggttatcaaagtggaagaacgcaaccttcttgagtactaaatccgggaaaggaactccgcagtggatggctcctgaagttctcagaagtgaaccttcgaatgagaagtgtgatgtgttcagctttggagtcatcttatgggagctaatgactacgttagtaccatgggaccgtttgaactctattcaggttgttggagttgttggtttcatggatcgacgattagacttacctgaaggattaaatccccggatcgcatccataatacaggattgttggcaaactgatccagcaaaacgaccgtcgttcgaggaattaattagtcagatgatgagcctgttccgcaaaccagggtcaggtgcgcaagaagaagacgattgagaaggtaaacagtacatggttaaaggatagttcacaaagcaaaggacgtgaaaagaaaacgaaagcatcgtcctgatcacttactatacaaatgtttcattgtgttataccaaactactatttatgttttcattgaaagaaagaaagcaaaaatagctaaatcaaagtaatatacagtagaatcttaggttagtttagttaaactatgcattatataaactgttgtcggtttatgagctaagttgtaaaatgggatctaaaaaggcagaggcgcagaggccagaggaggactcagatgtaatttaagaagtaaaagggtgaaaaagagaaatacgagaaaaactgtgagattgatggtgtcttgtagtgaattgtaatgtagttggttttggtttgatggggtaagagaaggaggagtgacaattcgtaggcattgcttcttttgctttaatattctcttattacagcttcccatcactgcgtcgtctgtagcttctcagcacctaattataagagagagtcagaaccctaaataaaacttttttttc

SEQ ID NO: 81528 - protein, 752 aa, Arabidopsis thaliana
  peptide (1)..(752): Ceres Seq. ID no. 12660175
SESDLDATAQTESPAITMAGNNSESSLYQVLVEWCQRMETSQARLREDVDDLLLQEESRTGKESATGLETDTEKEAEVEVEAEAADSWDNPTATWERAVSGFYFADSAYRTLMDSMGHAIHVTSAASGEITFWSRSAENLYHWYAEEVVGYRTIDVLVTEEYRNSLTGIRNRVCRGETWTGQFPFQKKTGELFMALVTKSPVYENGELVGVVTVSSDATLFNRMHPLSNEHQQQARSNNRHESNLRKHQWHLPRPQIAAASQVPVVPQYSSAVASNLASKLLPQRNGDDSFNGNHNSRSRDENVPVVASTTFEKYGSLADKFLGKLQRKITGSQGTEDNEPILRNGINKSACGSGGSSKASNAVTCTAFRDNGNGKPKRAEVRISDVYGNGAEGLIHNGDRFQYIGNLGQSKPPRGLESGLVSGMRGTKMSDLNGEIEDAWNTRLSVDPLPILGVNSGRQQSPVNQRNNRLVTDSSCEIRWEDLQLGEEVGRGSFAAVHRGVWNGSDVAIKVYFDGDYNAMTLTECKKEINIMKKLRHPNVLLFMGAVCTEEKSAIIMEYMPRGSLFKILHNTNQPLDKKRRLRMALDVARGMNYLHRRNPPIVHRDLKSSNLLVDKNWNVKVGDFGLSKWKNATFLSTKSGKGTPQWMAPEVLRSEPSNEKCDVFSFGVILWELMTTLVPWDRLNSIQVVGVVGFMDRRLDLPEGLNPRIASIIQDCWQTDPAKRPSFEELISQMMSLFRKPGSGAQEEDD

SEQ ID NO: 81529 - protein, 735 aa, Arabidopsis thaliana
  peptide (1)..(735): Ceres Seq. ID no. 12660176
MAGNNSESSLYQVLVEWCQRMETSQARLREDVDDLLLQEESRTGKESATGLETDTEKEAEVEVEAEAADSWDNPTATWERAVSGFYFADSAYRTLMDSMGHAIHVTSAASGEITFWSRSAENLYHWYAEEVVGYRTIDVLVTEEYRNSLTGIRNRVCRGETWTGQFPFQKKTGELFMALVTKSPVYENGELVGVVTVSSDATLFNRMHPLSNEHQQQARSNNRHESNLRKHQWHLPRPQIAAASQVPVVPQYSSAVASNLASKLLPQRNGDDSFNGNHNSRSRDENVPVVASTTFEKYGSLADKFLGKLQRKITGSQGTEDNEPILRNGINKSACGSGGSSKASNAVTCTAFRDNGNGKPKRAEVRISDVYGNGAEGLIHNGDRFQYIGNLGQSKPPRGLESGLVSGMRGTKMSDLNGEIEDAWNTRLSVDPLPILGVNSGRQQSPVNQRNNRLVTDSSCEIRWEDLQLGEEVGRGSFAAVHRGVWNGSDVAIKVYFDGDYNAMTLTECKKEINIMKKLRHPNVLLFMGAVCTEEKSAIIMEYMPRGSLFKILHNTNQPLDKKRRLRMALDVARGMNYLHRRNPPIVHRDLKSSNLLVDKNWNVKVGDFGLSKWKNATFLSTKSGKGTPQWMAPEVLRSEPSNEKCDVFSFGVILWELMTTLVPWDRLNSIQVVGVVGFMDRRLDLPEGLNPRIASIIQDCWQTDPAKRPSFEELISQMMSLFRKPGSGAQEEDD

SEQ ID NO: 81530 - protein, 715 aa, Arabidopsis thaliana
  peptide (1)..(715): Ceres Seq. ID no. 12660177
METSQARLREDVDDLLLQEESRTGKESATGLETDTEKEAEVEVEAEAADSWDNPTATWERAVSGFYFADSAYRTLMDSMGHAIHVTSAASGEITFWSRSAENLYHWYAEEVVGYRTIDVLVTEEYRNSLTGIRNRVCRGETWTGQFPFQKKTGELFMALVTKSPVYENGELVGVVTVSSDATLFNRMHPLSNEHQQQARSNNRHESNLRKHQWHLPRPQIAAASQVPVVPQYSSAVASNLASKLLPQRNGDDSFNGNHNSRSRDENVPVVASTTFEKYGSLADKFLGKLQRKITGSQGTEDNEPILRNGINKSACGSGGSSKASNAVTCTAFRDNGNGKPKRAEVRISDVYGNGAEGLIHNGDRFQYIGNLGQSKPPRGLESGLVSGMRGTKMSDLNGEIEDAWNTRLSVDPLPILGVNSGRQQSPVNQRNNRLVTDSSCEIRWEDLQLGEEVGRGSFAAVHRGVWNGSDVAIKVYFDGDYNAMTLTECKKEINIMKKLRHPNVLLFMGAVCTEEKSAIIMEYMPRGSLFKILHNTNQPLDKKRRLRMALDVARGMNYLHRRNPPIVHRDLKSSNLLVDKNWNVKVGDFGLSKWKNATFLSTKSGKGTPQWMAPEVLRSEPSNEKCDVFSFGVILWELMTTLVPWDRLNSIQVVGVVGFMDRRLDLPEGLNPRIASIIQDCWQTDPAKRPSFEELISQMMSLFRKPGSGAQEEDD

SEQ ID NO: 81531 - DNA, 942 bp, Arabidopsis thaliana
  misc_feature (1)..(942): Ceres Seq. ID no. 12660178
  misc_feature (1)..(942): Ortholog of  Ceres SEQ ID NO 15225703 as cited in SEQ ID NO 59527
  misc_feature (1)..(942): Ortholog of  Ceres SEQ ID NO 12615972 as cited in SEQ ID NO 62455
  misc_feature (1)..(942): Ortholog of  Ceres SEQ ID NO 13596229 as cited in SEQ ID NO 68800
  misc_feature (1)..(942): Ortholog of  Ceres SEQ ID NO 15179393 as cited in SEQ ID NO 0
atgctttccacagcagcagaggaagatcctgaaggaggaagcagagaaactaataatggcggcgagacgacaccggacatgcaatggagatcgtggattatcccaatagtagtgattgctaacgtcgtcgttttcgttgttgtaatgtactataatgattgtcctcacaaaagccatcgatgtcttgcaaagttcctcggacgattctcttttgagtctttcaagtctaatcctcttcttggtccttcttcctctacgttggagaaaatgggagctttggcgtgggggaaaatagttcacaagcgtcaagtttggagactattaacatgtatgtggttgcacgctggcgttattcatttgttagcaaacatgtgttgtgttgcctacattggagttcgtctcgagcagcagtttggttttgttcgagtcgggacgatctaccttgtatcgggtttctgtgggagcatattatcttgtttgtttcttgaggatgctatatctgttggtgcctctagtgctttgtttggactcttaggagcaatgttatctgaattgttaatcaactggacaacctatgacaacaagggtgtggctatagtaatgcttttggtgattgttggtgttaacttaggattaggaacacttcctcctgttgataattttgctcatattggaggtttctttggtggttttctactcggttttcttctcttgattcatccgcagttcgaatgggaagaaaaccaagtttctcttatgcctggtaccattgttaaacccaagtacaacacttgccaactcgtgctttgcatagttgcatcgatcgtctttgtcgcagggtttacttctggattggtgatactattcagaggagatagcttgaacagatattgtaagtggtgccataaactaagctactcctctaaatcccaatggacatga

SEQ ID NO: 81532 - protein, 313 aa, Arabidopsis thaliana
  peptide (1)..(313): Ceres Seq. ID no. 12660179
MLSTAAEEDPEGGSRETNNGGETTPDMQWRSWIIPIVVIANVVVFVVVMYYNDCPHKSHRCLAKFLGRFSFESFKSNPLLGPSSSTLEKMGALAWGKIVHKRQVWRLLTCMWLHAGVIHLLANMCCVAYIGVRLEQQFGFVRVGTIYLVSGFCGSILSCLFLEDAISVGASSALFGLLGAMLSELLINWTTYDNKGVAIVMLLVIVGVNLGLGTLPPVDNFAHIGGFFGGFLLGFLLLIHPQFEWEENQVSLMPGTIVKPKYNTCQLVLCIVASIVFVAGFTSGLVILFRGDSLNRYCKWCHKLSYSSKSQWT

SEQ ID NO: 81533 - protein, 287 aa, Arabidopsis thaliana
  peptide (1)..(287): Ceres Seq. ID no. 12660180
MQWRSWIIPIVVIANVVVFVVVMYYNDCPHKSHRCLAKFLGRFSFESFKSNPLLGPSSSTLEKMGALAWGKIVHKRQVWRLLTCMWLHAGVIHLLANMCCVAYIGVRLEQQFGFVRVGTIYLVSGFCGSILSCLFLEDAISVGASSALFGLLGAMLSELLINWTTYDNKGVAIVMLLVIVGVNLGLGTLPPVDNFAHIGGFFGGFLLGFLLLIHPQFEWEENQVSLMPGTIVKPKYNTCQLVLCIVASIVFVAGFTSGLVILFRGDSLNRYCKWCHKLSYSSKSQWT

SEQ ID NO: 81534 - protein, 265 aa, Arabidopsis thaliana
  peptide (1)..(265): Ceres Seq. ID no. 12660181
MYYNDCPHKSHRCLAKFLGRFSFESFKSNPLLGPSSSTLEKMGALAWGKIVHKRQVWRLLTCMWLHAGVIHLLANMCCVAYIGVRLEQQFGFVRVGTIYLVSGFCGSILSCLFLEDAISVGASSALFGLLGAMLSELLINWTTYDNKGVAIVMLLVIVGVNLGLGTLPPVDNFAHIGGFFGGFLLGFLLLIHPQFEWEENQVSLMPGTIVKPKYNTCQLVLCIVASIVFVAGFTSGLVILFRGDSLNRYCKWCHKLSYSSKSQWT

SEQ ID NO: 81535 - DNA, 2125 bp, Arabidopsis thaliana
  misc_feature (1)..(2125): Ceres Seq. ID no. 12660193
  misc_feature (1)..(2125): Ortholog of  Ceres SEQ ID NO 15174879 as cited in SEQ ID NO 53786
atgtctgcttatacctcattaaactttctcttccttctaaccttcttcattggaagcttgagagtttctgcacaattacaagaccctacttacgttggccatgtttgtactaacaggatatcaagaaactccatttacttctcaaatctccaaacacttttgacctctctttcttctaacaatgcttacttctctttgggatctcatagtctcacaaagggtcaaaactccgacatggtgttcggactttatctctgcaaaggagatctctcgccagaatcttgccgtgagtgcgtcatctttgctgctaaagacactcggagtcgatgtccaggtgggaaagagttcttgattcagtatgatgagtgcatgcttggatactcagacaggaatatattcatggatactgtaaccacaactacaataatcacttggaacactcagaaagttacggcggaccaatctgaccggtttaatgatgcagtgctttctctgatgaaaaagtctgcagaggaagcggctaatagtacaagcaagaaattcgcggttaagaagtcggatttcagttcgtctcagtcgctttatgcatcggttcagtgcattcctgatctgactagtgaagattgtgtaatgtgtcttcaacaatccatcaaagaattatatttcaacaaagttggaggaagatttcttgtcccaagttgtaactcaaggtacgaggtttaccccttttacaaggaaactatagagggaactgttcttcctccgccggtttcggctcctccactgccactggtttcaactccttcctttccgcctggaaaaggcaaaaattctacagtgataatcatagcaattgttgtgccagtcgctatctcagttcttatttgtgtagctgtttttagcttccatgcatcaaagagagcaaagaagacttatgatacaccagaagaggatgacatcacaactgcagggtcactgcagtttgatttcaaggttattgaagctgcaacagataagttttcgatgtgtaacaaactcggtcaaggtggatttggacaagtttacaagggcacacttcctaatggagtacaagttgccgtgaagagactatcgaaaacatcaggacaaggtgagaaagagttcaagaacgaagttgttgttgtggcaaagcttcagcacagaaatctggtcaagcttcttggattttgtttggagagagaagagaaaatacttgtctacgagtttgtgtctaataaaagccttgattacttcttgtttgattctagaatgcagagccagctggattggactacacggtacaagatcataggaggaattgctagaggaattctgtatctccatcaagattcacgactcacaatcatacatcgagacctaaaagcgggtaacatccttttggatgctgatatgaacccgaaagttgcagattttggaatggcgaggatttttgaaatagaccaaacagaagcccatacgagaagagtagttggaacctatggttacatgtctcccgagtatgcgatgtatggccaattttcaatgaaatctgatgtctatagcttcggtgtcttagttcttgagattataagcgggaggaaaaatagcagcctctatcagatggatgctagttttggaaacttggttacatatacttggaggctatggagtgacgggtcaccactagacctcgtggattcttcctttcgagatagttatcaaagaaacgaaataattagatgcatccatattgccttattatgtgtccaagaagatactgaaaatcgtccaaccatgtcagcgatcgtccaaatgcttactactagctcgatcgccctcgctgtacctcaaccacctggatttttcttccggagtaatcatgaacaagcaggtccatcgatggataagtcttctctttgttccattgatgctgcatcgattactattttagctcctcgttaaagacaaacttgtttcataaactagaactaactgcaaatttcaacatttggattttggtgttcattttctaatactctaggagattgttactagaattgaggtcacggtgttttgaattgtttgcacataaatgtacaaataattt

SEQ ID NO: 81536 - protein, 659 aa, Arabidopsis thaliana
  peptide (1)..(659): Ceres Seq. ID no. 12660194
MSAYTSLNFLFLLTFFIGSLRVSAQLQDPTYVGHVCTNRISRNSIYFSNLQTLLTSLSSNNAYFSLGSHSLTKGQNSDMVFGLYLCKGDLSPESCRECVIFAAKDTRSRCPGGKEFLIQYDECMLGYSDRNIFMDTVTTTTIITWNTQKVTADQSDRFNDAVLSLMKKSAEEAANSTSKKFAVKKSDFSSSQSLYASVQCIPDLTSEDCVMCLQQSIKELYFNKVGGRFLVPSCNSRYEVYPFYKETIEGTVLPPPVSAPPLPLVSTPSFPPGKGKNSTVIIIAIVVPVAISVLICVAVFSFHASKRAKKTYDTPEEDDITTAGSLQFDFKVIEAATDKFSMCNKLGQGGFGQVYKGTLPNGVQVAVKRLSKTSGQGEKEFKNEVVVVAKLQHRNLVKLLGFCLEREEKILVYEFVSNKSLDYFLFDSRMQSQLDWTTRYKIIGGIARGILYLHQDSRLTIIHRDLKAGNILLDADMNPKVADFGMARIFEIDQTEAHTRRVVGTYGYMSPEYAMYGQFSMKSDVYSFGVLVLEIISGRKNSSLYQMDASFGNLVTYTWRLWSDGSPLDLVDSSFRDSYQRNEIIRCIHIALLCVQEDTENRPTMSAIVQMLTTSSIALAVPQPPGFFFRSNHEQAGPSMDKSSLCSIDAASITILAPR

SEQ ID NO: 81537 - protein, 581 aa, Arabidopsis thaliana
  peptide (1)..(581): Ceres Seq. ID no. 12660195
MVFGLYLCKGDLSPESCRECVIFAAKDTRSRCPGGKEFLIQYDECMLGYSDRNIFMDTVTTTTIITWNTQKVTADQSDRFNDAVLSLMKKSAEEAANSTSKKFAVKKSDFSSSQSLYASVQCIPDLTSEDCVMCLQQSIKELYFNKVGGRFLVPSCNSRYEVYPFYKETIEGTVLPPPVSAPPLPLVSTPSFPPGKGKNSTVIIIAIVVPVAISVLICVAVFSFHASKRAKKTYDTPEEDDITTAGSLQFDFKVIEAATDKFSMCNKLGQGGFGQVYKGTLPNGVQVAVKRLSKTSGQGEKEFKNEVVVVAKLQHRNLVKLLGFCLEREEKILVYEFVSNKSLDYFLFDSRMQSQLDWTTRYKIIGGIARGILYLHQDSRLTIIHRDLKAGNILLDADMNPKVADFGMARIFEIDQTEAHTRRVVGTYGYMSPEYAMYGQFSMKSDVYSFGVLVLEIISGRKNSSLYQMDASFGNLVTYTWRLWSDGSPLDLVDSSFRDSYQRNEIIRCIHIALLCVQEDTENRPTMSAIVQMLTTSSIALAVPQPPGFFFRSNHEQAGPSMDKSSLCSIDAASITILAPR

SEQ ID NO: 81538 - protein, 536 aa, Arabidopsis thaliana
  peptide (1)..(536): Ceres Seq. ID no. 12660196
MLGYSDRNIFMDTVTTTTIITWNTQKVTADQSDRFNDAVLSLMKKSAEEAANSTSKKFAVKKSDFSSSQSLYASVQCIPDLTSEDCVMCLQQSIKELYFNKVGGRFLVPSCNSRYEVYPFYKETIEGTVLPPPVSAPPLPLVSTPSFPPGKGKNSTVIIIAIVVPVAISVLICVAVFSFHASKRAKKTYDTPEEDDITTAGSLQFDFKVIEAATDKFSMCNKLGQGGFGQVYKGTLPNGVQVAVKRLSKTSGQGEKEFKNEVVVVAKLQHRNLVKLLGFCLEREEKILVYEFVSNKSLDYFLFDSRMQSQLDWTTRYKIIGGIARGILYLHQDSRLTIIHRDLKAGNILLDADMNPKVADFGMARIFEIDQTEAHTRRVVGTYGYMSPEYAMYGQFSMKSDVYSFGVLVLEIISGRKNSSLYQMDASFGNLVTYTWRLWSDGSPLDLVDSSFRDSYQRNEIIRCIHIALLCVQEDTENRPTMSAIVQMLTTSSIALAVPQPPGFFFRSNHEQAGPSMDKSSLCSIDAASITILAPR

SEQ ID NO: 81539 - DNA, 2191 bp, Arabidopsis thaliana
  misc_feature (1)..(2191): Ceres Seq. ID no. 12660197
  misc_feature (1)..(2191): Ortholog of  Ceres SEQ ID NO 13655237 as cited in SEQ ID NO 62892
  misc_feature (1)..(2191): Ortholog of  Ceres SEQ ID NO 13659840 as cited in SEQ ID NO 66970
  misc_feature (1)..(2191): Ortholog of  Ceres SEQ ID NO 13660544 as cited in SEQ ID NO 67401
atgtcttctcttatatctttcaacttccttttccttttctcattcctcactagctccttcacagcttctgctcaagatcctttttacttaaatcattattgtccaaatacgacaacttactcaagtaacagcacttactccaccaatctcagaacccttttgtcctctctatcttcacgtaacgcctcttactccaccggattccaaaacgccactgcaggaaaagcccccgacagagtcaccggacttttcctttgccgcggagacgtctcaccggaagtttgccgtaactgcgtagccttttctgtcaatcaaaccttaaatctttgtcccaaggtaagagaagccgtgttttactacgagcaatgtatactcagatattctcacaagaatattctatcgacggccattacaaacgaaggagaatttatcttgagtaacaccaacactatttctcctaatcaaaaacaaatagacgggttcacaagttttgtttcctccacgatgagtgaagctgccggtaaagcagccaacagttctagaaaattatatacggtgaataccgaattgaccgcataccagaatttgtacgggctgcttcagtgcactcctgatcttacaagagcagactgcttgagttgtttgcaaagttccatcaatggaatggctctttccagaataggagcaagactttactggccgagttgtactgcaaggtacgagctttacccgttctacaatgaaagcgccattgaaacaccaccactaccaccaccaccaccaccaccaccaccgagggagtcgttggtgtctactcctccgatatcatcttcttcattacctgggaaaagtgggaactcaacagtgttagtggtagccgttgttgtgctggctgttctgcttttcatagctttagttggttattgtttccttgcaaaaaagaaaaagaagacttttgacacagcatctgcatcggaggtaggagatgatatggcaaccgcagactcactacagctcgactatagaacaatccaaactgcaacaaatgattttgcagagagtaataagattggtcgaggtggttttggtgaggtttacaagggtacattttcaaatgggaaagaagttgcggtgaagagattgtcgaaaaattcaagacaaggcgaagcggagttcaagaccgaggttgttgtagttgccaagcttcaacacagaaatttggttaggcttcttggattttcattacaaggagaggaaagaattttggtctacgagtatatgcctaacaaaagccttgattgcttactatttgaccctacaaagcaaattcagctggactggatgcagcgatacaatatcattggaggaattgctcgggggattctatatcttcatcaagattcacggctcacaatcatacaccgtgaccttaaagcaagtaacattctcctagatgcggatataaatccgaaaattgcagattttggaatggctaggatctttggattggaccaaacccaagataacacaagcagaatagttggtacctacggttacatggctcctgaatatgcgatgcatggccaattctcaatgaaatctgatgtctatagcttcggagtgttagttcttgagattataagtggtaggaagaatagcagcttcggcgagtcagacggtgcacaagacttgctcacacatgcttggaggctttggactaacaaaaaagcattagacctcgtggatccacttatagcagagaattgccagaatagtgaagtggttcgatgcatccatatcggtcttttatgtgttcaagaagatcctgcaaagcgtccggcaatatcaaccgttttcatgatgctcactagtaatactgtgaccttaccagtgcctcggcaaccagggtttttcattcaatgtagagccgtaaaggacccgcttgattcagatcagtctaccacgaccaagtcttttccagcgtctattgatgatgaatcgatcacagatttatatccgcgctaaatatgaccttaaacttcatgcttgtaatcaagcttacgcaaatgtttacatatttgtagaattgtggatgtgatcaaccctaataattttttagttttgatttggtttgttaaaaccatatgtattttgttttgattttttaataatgaataattagtctagtctc

SEQ ID NO: 81540 - protein, 674 aa, Arabidopsis thaliana
  peptide (1)..(674): Ceres Seq. ID no. 12660198
MSSLISFNFLFLFSFLTSSFTASAQDPFYLNHYCPNTTTYSSNSTYSTNLRTLLSSLSSRNASYSTGFQNATAGKAPDRVTGLFLCRGDVSPEVCRNCVAFSVNQTLNLCPKVREAVFYYEQCILRYSHKNILSTAITNEGEFILSNTNTISPNQKQIDGFTSFVSSTMSEAAGKAANSSRKLYTVNTELTAYQNLYGLLQCTPDLTRADCLSCLQSSINGMALSRIGARLYWPSCTARYELYPFYNESAIETPPLPPPPPPPPPRESLVSTPPISSSSLPGKSGNSTVLVVAVVVLAVLLFIALVGYCFLAKKKKKTFDTASASEVGDDMATADSLQLDYRTIQTATNDFAESNKIGRGGFGEVYKGTFSNGKEVAVKRLSKNSRQGEAEFKTEVVVVAKLQHRNLVRLLGFSLQGEERILVYEYMPNKSLDCLLFDPTKQIQLDWMQRYNIIGGIARGILYLHQDSRLTIIHRDLKASNILLDADINPKIADFGMARIFGLDQTQDNTSRIVGTYGYMAPEYAMHGQFSMKSDVYSFGVLVLEIISGRKNSSFGESDGAQDLLTHAWRLWTNKKALDLVDPLIAENCQNSEVVRCIHIGLLCVQEDPAKRPAISTVFMMLTSNTVTLPVPRQPGFFIQCRAVKDPLDSDQSTTTKSFPASIDDESITDLYPR

SEQ ID NO: 81541 - protein, 506 aa, Arabidopsis thaliana
  peptide (1)..(506): Ceres Seq. ID no. 12660199
MSEAAGKAANSSRKLYTVNTELTAYQNLYGLLQCTPDLTRADCLSCLQSSINGMALSRIGARLYWPSCTARYELYPFYNESAIETPPLPPPPPPPPPRESLVSTPPISSSSLPGKSGNSTVLVVAVVVLAVLLFIALVGYCFLAKKKKKTFDTASASEVGDDMATADSLQLDYRTIQTATNDFAESNKIGRGGFGEVYKGTFSNGKEVAVKRLSKNSRQGEAEFKTEVVVVAKLQHRNLVRLLGFSLQGEERILVYEYMPNKSLDCLLFDPTKQIQLDWMQRYNIIGGIARGILYLHQDSRLTIIHRDLKASNILLDADINPKIADFGMARIFGLDQTQDNTSRIVGTYGYMAPEYAMHGQFSMKSDVYSFGVLVLEIISGRKNSSFGESDGAQDLLTHAWRLWTNKKALDLVDPLIAENCQNSEVVRCIHIGLLCVQEDPAKRPAISTVFMMLTSNTVTLPVPRQPGFFIQCRAVKDPLDSDQSTTTKSFPASIDDESITDLYPR

SEQ ID NO: 81542 - protein, 453 aa, Arabidopsis thaliana
  peptide (1)..(453): Ceres Seq. ID no. 12660200
MALSRIGARLYWPSCTARYELYPFYNESAIETPPLPPPPPPPPPRESLVSTPPISSSSLPGKSGNSTVLVVAVVVLAVLLFIALVGYCFLAKKKKKTFDTASASEVGDDMATADSLQLDYRTIQTATNDFAESNKIGRGGFGEVYKGTFSNGKEVAVKRLSKNSRQGEAEFKTEVVVVAKLQHRNLVRLLGFSLQGEERILVYEYMPNKSLDCLLFDPTKQIQLDWMQRYNIIGGIARGILYLHQDSRLTIIHRDLKASNILLDADINPKIADFGMARIFGLDQTQDNTSRIVGTYGYMAPEYAMHGQFSMKSDVYSFGVLVLEIISGRKNSSFGESDGAQDLLTHAWRLWTNKKALDLVDPLIAENCQNSEVVRCIHIGLLCVQEDPAKRPAISTVFMMLTSNTVTLPVPRQPGFFIQCRAVKDPLDSDQSTTTKSFPASIDDESITDLYPR

SEQ ID NO: 81543 - DNA, 2157 bp, Arabidopsis thaliana
  misc_feature (1)..(2157): Ceres Seq. ID no. 12660204
  misc_feature (1)..(2157): Ortholog of  Ceres SEQ ID NO 13655640 as cited in SEQ ID NO 63844
attcatacttacttgctgtcctaacgtaaatatcatctgtactatcttgaaaatggaattgaagaatctctttccaatcttctggtttgtcctcgtaggctttgctgtggtgtctgcacaagaatgcggcaaaacagggttttttgtaccacaaagtaggtatgaaacaaaccggggccttctcctctcttctcttccttccaatgtttcagctcgaggaggattctacaattcttcgattggccaaggccctgatcgagtgtatgctctggggatgtgcattgaaggtgctgaaccagatgtttgctccgactgtattgaatatgcttctaatctgttattagacacgtgtctcaaccagacagaagcctggcctggccggagaaacggattttgtgtatggtacgatactccaatagttctttttttggatcactcaaggcagaaccgcatttctatatccacaacgtggatgatattacatccaatttaacagagtttgatcaagtgtgggaagagttagcacgtcgtatgatagctagtactacttctccatcatctaaacgcaagtactacgcagcagacgtagcagccttgacagctttccagataatatatgcactaatgcaatgcactccggacttatctttggaggattgccatatctgtttaagacaaagtgttggtgactatgaaacatgctgcaatggaaagcaaggtggcattgtgtaccgagccagctgtgttttccggtgggagctttttcccttctctgaggcttttagtcgtatttcgttggcacctccgcctcaatccccagcatttcccacgcttccggcagtaaccaatacagcgaccaagaaaggtagcataacaatctcgataggaattgtctgggcaatcattattcctactgtcattgttgtcttcttggtactgcttgcgctaggatttgttgtttataggaggaggaaatcataccaaggatccagcactgatatcaccattacacactcactgcaattcgatttcaaagcgattgaagatgcaacaaataaattctcggagagcaacataattggtcgcggtggatttggagaagttttcatgggtgtccttaacggtactgaagttgcaattaagaggctgtcaaaagcatcgagacaaggtgcacgagaattcaaaaatgaggttgttgttgttgcaaaactccatcataggaatcttgttaagcttctcgggttttgtctagaaggagaagagaaaatacttgtttacgagtttgtccccaacaagagcctcgactacttcctctttgaccctacaaagcaagggcagttagactggactaaacgatacaacattatccggggaatcactcgaggaattctgtatcttcatcaagactcacggctcacgatcatacatcgtgacctcaaagccagcaacattctcctagatgcagatatgaacccaaaaattgctgattttggaatggcgagaatttttgggatcgatcaaagtggagctaatacaaaaaaaatagctgggacacgcggttacatgcctccagaatatgtgaggcaaggtcagttctcaacaagatcagatgtttatagtttcggagtcttagttcttgagattatatgtggtcgaaataacagattcatccaccagtcagacactacagttgagaatttggtcacatacgcttggaggttgtggagaaacgattcaccattagaactcgtggatccaaccatttcggagaattgtgaaaccgaagaagtgacaagatgcatccacattgcgttgctgtgtgttcaacacaatcccacagatcgccccagcttgtcgacaatcaacatgatgctcataaacaattcgtatgttttacctgatcctcaacaacctggattcttctttccaataataagcaaccaagaacgagatggcctcgactctatgaacaggtccaatccacaaactatcaatgatgtaaccattacagattttgaacctcgttgaagttgctattccagtgagacattgttccatttgaatgattatgtatctaagtatctttatcattcctacgttgtaatatcagctctctgttttatgggagtcttgacgtataatatccaaaccggtctt

SEQ ID NO: 81544 - protein, 542 aa, Arabidopsis thaliana
  peptide (1)..(542): Ceres Seq. ID no. 12660205
MVRYSNSSFFGSLKAEPHFYIHNVDDITSNLTEFDQVWEELARRMIASTTSPSSKRKYYAADVAALTAFQIIYALMQCTPDLSLEDCHICLRQSVGDYETCCNGKQGGIVYRASCVFRWELFPFSEAFSRISLAPPPQSPAFPTLPAVTNTATKKGSITISIGIVWAIIIPTVIVVFLVLLALGFVVYRRRKSYQGSSTDITITHSLQFDFKAIEDATNKFSESNIIGRGGFGEVFMGVLNGTEVAIKRLSKASRQGAREFKNEVVVVAKLHHRNLVKLLGFCLEGEEKILVYEFVPNKSLDYFLFDPTKQGQLDWTKRYNIIRGITRGILYLHQDSRLTIIHRDLKASNILLDADMNPKIADFGMARIFGIDQSGANTKKIAGTRGYMPPEYVRQGQFSTRSDVYSFGVLVLEIICGRNNRFIHQSDTTVENLVTYAWRLWRNDSPLELVDPTISENCETEEVTRCIHIALLCVQHNPTDRPSLSTINMMLINNSYVLPDPQQPGFFFPIISNQERDGLDSMNRSNPQTINDVTITDFEPR

SEQ ID NO: 81545 - protein, 498 aa, Arabidopsis thaliana
  peptide (1)..(498): Ceres Seq. ID no. 12660206
MIASTTSPSSKRKYYAADVAALTAFQIIYALMQCTPDLSLEDCHICLRQSVGDYETCCNGKQGGIVYRASCVFRWELFPFSEAFSRISLAPPPQSPAFPTLPAVTNTATKKGSITISIGIVWAIIIPTVIVVFLVLLALGFVVYRRRKSYQGSSTDITITHSLQFDFKAIEDATNKFSESNIIGRGGFGEVFMGVLNGTEVAIKRLSKASRQGAREFKNEVVVVAKLHHRNLVKLLGFCLEGEEKILVYEFVPNKSLDYFLFDPTKQGQLDWTKRYNIIRGITRGILYLHQDSRLTIIHRDLKASNILLDADMNPKIADFGMARIFGIDQSGANTKKIAGTRGYMPPEYVRQGQFSTRSDVYSFGVLVLEIICGRNNRFIHQSDTTVENLVTYAWRLWRNDSPLELVDPTISENCETEEVTRCIHIALLCVQHNPTDRPSLSTINMMLINNSYVLPDPQQPGFFFPIISNQERDGLDSMNRSNPQTINDVTITDFEPR

SEQ ID NO: 81546 - protein, 467 aa, Arabidopsis thaliana
  peptide (1)..(467): Ceres Seq. ID no. 12660207
MQCTPDLSLEDCHICLRQSVGDYETCCNGKQGGIVYRASCVFRWELFPFSEAFSRISLAPPPQSPAFPTLPAVTNTATKKGSITISIGIVWAIIIPTVIVVFLVLLALGFVVYRRRKSYQGSSTDITITHSLQFDFKAIEDATNKFSESNIIGRGGFGEVFMGVLNGTEVAIKRLSKASRQGAREFKNEVVVVAKLHHRNLVKLLGFCLEGEEKILVYEFVPNKSLDYFLFDPTKQGQLDWTKRYNIIRGITRGILYLHQDSRLTIIHRDLKASNILLDADMNPKIADFGMARIFGIDQSGANTKKIAGTRGYMPPEYVRQGQFSTRSDVYSFGVLVLEIICGRNNRFIHQSDTTVENLVTYAWRLWRNDSPLELVDPTISENCETEEVTRCIHIALLCVQHNPTDRPSLSTINMMLINNSYVLPDPQQPGFFFPIISNQERDGLDSMNRSNPQTINDVTITDFEPR

SEQ ID NO: 81547 - DNA, 1731 bp, Arabidopsis thaliana
  misc_feature (1)..(1731): Ceres Seq. ID no. 12660245
  misc_feature (1)..(1731): Ortholog of  Ceres SEQ ID NO 15169623 as cited in SEQ ID NO 67523
  misc_feature (1)..(1731): Ortholog of  Ceres SEQ ID NO 12614670 as cited in SEQ ID NO 68565
atggcttttcctgccgctgctacttatcccacccatttccaaggcggcgctcttcatctgggtaggaccgatcattgcctcttcggtttctaccctcaaaccatttcctctgtgaattctcggagagcttctgtttccatcaagtgccaatctacggagccaaagacgaatggtaacatattggacaatgcgagcaaccttttgacaaattttttaagtggtggaagtttggggtcaatgcctactgctgaaggctctgtctctgatttgtttggaaagcctctctttttatctctttacgactggttcttggagcatggaggaatttataaacttgcgtttggtccaaaagcctttgttgtcatctcagatcccattattgcaaggcatgtcctccgggaaaatgctttttcttatgacaagggagttcttgctgagatcttagagccgattatgggaaaagggttaataccggctgatctagatacgtggaagttaagaagaagagctatcactcccgcattccataaattgtatctagaggccatggtcaaagtatttagtgactgttcggagaaaatgatattgaaatctgagaaactcataagggagaaagaaacttcaagcggggaggacaccattgagttggatctggaagcagaattctcgagtctggctcttgatattataggtcttagcgtgttcaactacgattttggctctgtcacaaaagagtcccctgtgatcaaggcagtttatggaactcttttcgaggcagagcatcggtctactttctacttcccttattggaactttcctccagctagatggatagttccgaggcaacgaaagttccaaagcgatctgaagattataaacgattgccttgatggcctcattcaaaatgctaaagagacaagacaggaaacagatgttgagaagctccaggaaagggactacactaatctcaaggatgcaagtcttttgcggttcttagtcgatatgcgcggtgttgacattgatgaccggcagctgagggatgacttgatgactatgctaattgctggtcatgagacaacagcagcagtacttacttgggctgttttccttctgtcacaaaatcctgaaaaaattaggaaagctcaagctgagattgatgctgtgcttggtcaaggtccacccacttatgaatcaatgaaaaagctcgagtacatacgactgatcgttgtagaagtccttcgtctctttcctcagccacctttgctcatcagacgcactctcaaaccagaaacattacccggaggacacaaaggggaaaaagaaggtcataaagttccaaaagggactgatatcttcatttctgtgtataatctccatagatctccatacttttgggataatccccacgattttgagcctgagaggtttttaagaacaaaggagagcaatggaattgaaggatgggctggctttgatccatctcgtagccccggggcactatatccgaatgagataatagcagactttgcattcttaccatttggtggaggaccaagaaaatgcattggagaccagtttgcactaatggaatcgaccgtcgcactagctatgttgtttcagaaattcgatgtggagctgcgtggaacgccagaatctgttgaactcgtgagcggcgcaacgattcatgccaaaaatgggatgtggtgcaaactaaagagaagatcaaagtga

SEQ ID NO: 81548 - protein, 576 aa, Arabidopsis thaliana; identical to SEQ ID NO: 44982
  peptide (1)..(576): Ceres Seq. ID no. 12660246

SEQ ID NO: 81549 - protein, 497 aa, Arabidopsis thaliana; identical to SEQ ID NO: 44983
  peptide (1)..(497): Ceres Seq. ID no. 12660247

SEQ ID NO: 81550 - protein, 425 aa, Arabidopsis thaliana
  peptide (1)..(425): Ceres Seq. ID no. 12660248
MGKGLIPADLDTWKLRRRAITPAFHKLYLEAMVKVFSDCSEKMILKSEKLIREKETSSGEDTIELDLEAEFSSLALDIIGLSVFNYDFGSVTKESPVIKAVYGTLFEAEHRSTFYFPYWNFPPARWIVPRQRKFQSDLKIINDCLDGLIQNAKETRQETDVEKLQERDYTNLKDASLLRFLVDMRGVDIDDRQLRDDLMTMLIAGHETTAAVLTWAVFLLSQNPEKIRKAQAEIDAVLGQGPPTYESMKKLEYIRLIVVEVLRLFPQPPLLIRRTLKPETLPGGHKGEKEGHKVPKGTDIFISVYNLHRSPYFWDNPHDFEPERFLRTKESNGIEGWAGFDPSRSPGALYPNEIIADFAFLPFGGGPRKCIGDQFALMESTVALAMLFQKFDVELRGTPESVELVSGATIHAKNGMWCKLKRRSK

SEQ ID NO: 81551 - DNA, 975 bp, Arabidopsis thaliana
  misc_feature (1)..(975): Ceres Seq. ID no. 12660281
  misc_feature (1)..(975): Ortholog of  Ceres SEQ ID NO 13597546 as cited in SEQ ID NO 65017
atggagatagcaaaggcgagttcgcagttgcgtgctacggagagcgtaacgcggatatttggagaaaacaacccgttcctccagagcaaggagattcataaatatgtccggaacttgacttcccgatttgttggtcccgagggtttaaaaacaagattaattcatgacattgacaatttgttacgaaatgatgttgagaacggagcacgaaacggttctttcgacgttagagaggcaacaatcaagatggtgggtgaacttattgcaaagaaaataatgggtgaaacggaatccgaggccgtaaaagaactcgggttatgctggagtgctttccgaaccagttggtttcagttttcttacaacattcctggaacaactgtttatcgactcgtgaaggctcggaggaaggctgcgaagctgctaaaggccttgattctgaagaagaaagcatcaaaagaaggacttggcgatttcttagatataatatttgatgaaatggaaaaggatgggaccgctttagatatagacaaagccgtaaacttaatattcgtcttcttcatactctcccaagagacaactcctggtgttcaaggagcggttgtgaagcttgtagcagaccaccccagcgttatggaagaattgcagagagagcacgaggcgattgttcaaaatcgagctgataaagacactggagtcacatgggaagaatacaaatctatgacatttactcacatggttatcaaagagtctcttcggtttactagtacacaacctacagtgcacagaatacctgatcaggacgttcagattggagctcaagctaggtctttccggaaaatgttggatattttggtaaatacagttgttgaacttgagcctcacgctttgaagatgttcaataatgatgtcgatcagaagatgttagatctacaatataatgtaatgcacaaaaattttcaaagagattgtagctaa

SEQ ID NO: 81552 - protein, 324 aa, Arabidopsis thaliana
  peptide (1)..(324): Ceres Seq. ID no. 12660282
MEIAKASSQLRATESVTRIFGENNPFLQSKEIHKYVRNLTSRFVGPEGLKTRLIHDIDNLLRNDVENGARNGSFDVREATIKMVGELIAKKIMGETESEAVKELGLCWSAFRTSWFQFSYNIPGTTVYRLVKARRKAAKLLKALILKKKASKEGLGDFLDIIFDEMEKDGTALDIDKAVNLIFVFFILSQETTPGVQGAVVKLVADHPSVMEELQREHEAIVQNRADKDTGVTWEEYKSMTFTHMVIKESLRFTSTQPTVHRIPDQDVQIGAQARSFRKMLDILVNTVVELEPHALKMFNNDVDQKMLDLQYNVMHKNFQRDCS

SEQ ID NO: 81553 - protein, 242 aa, Arabidopsis thaliana
  peptide (1)..(242): Ceres Seq. ID no. 12660283
MVGELIAKKIMGETESEAVKELGLCWSAFRTSWFQFSYNIPGTTVYRLVKARRKAAKLLKALILKKKASKEGLGDFLDIIFDEMEKDGTALDIDKAVNLIFVFFILSQETTPGVQGAVVKLVADHPSVMEELQREHEAIVQNRADKDTGVTWEEYKSMTFTHMVIKESLRFTSTQPTVHRIPDQDVQIGAQARSFRKMLDILVNTVVELEPHALKMFNNDVDQKMLDLQYNVMHKNFQRDCS

SEQ ID NO: 81554 - protein, 232 aa, Arabidopsis thaliana
  peptide (1)..(232): Ceres Seq. ID no. 12660284
MGETESEAVKELGLCWSAFRTSWFQFSYNIPGTTVYRLVKARRKAAKLLKALILKKKASKEGLGDFLDIIFDEMEKDGTALDIDKAVNLIFVFFILSQETTPGVQGAVVKLVADHPSVMEELQREHEAIVQNRADKDTGVTWEEYKSMTFTHMVIKESLRFTSTQPTVHRIPDQDVQIGAQARSFRKMLDILVNTVVELEPHALKMFNNDVDQKMLDLQYNVMHKNFQRDCS

SEQ ID NO: 81555 - DNA, 1584 bp, Arabidopsis thaliana
  misc_feature (1)..(1584): Ceres Seq. ID no. 12660297
  misc_feature (1)..(1584): Ortholog of  Ceres SEQ ID NO 13502874 as cited in SEQ ID NO 66298
  misc_feature (1)..(1584): Ortholog of  Ceres SEQ ID NO 12614124 as cited in SEQ ID NO 68392
atgatagcaatcatcgttgagttccaaaacttctttatcttcatccttctatgcctcttctcactcctctgtcactctctcttcttcaagaaaccaaaagactcacgaagctttgttctgccttcaagccctccttctcttccaatcatcggccatcttcaccttctcctctctgtcctaactcacaagtctcttcagaaactctcctccaagtacggacctcttctccttatccgcatcttctatgtacccatcattcttgtctcctcttcctctatggcctacgagatcttcaaggcccatgacgtgaacgtctcttctcgcggtattattgctcttgatgagtctctcatgtttggggcttctggcatcttgaacgctccctatggagattactggaagttcatgaagaagctcatggccactaagctactccgaccgcaagtgctggagcggtcacgaggtgttcgtgttgaagagctacatagattttacaggagcattcttgataaggcgacgaagaatgagagcgttgagatcggtaaggaagcgatgaagctcatgaacaacaccttgtgtaaactgatcatgggaaggagtttttcagaggacaacggtgaatcaaatagagtcaggggcttggttgatgaaacctatgccttgtccgagaagatattcttggcagctatattgcgcagacctcttgcaaaacttcggatctcactattcaagaaagagataatgggtgtctccaacaaattcgatgagctactagagaggatccttcaggaacgcaaagagaatttggaagagaagaataatgaaggtatggatatgatggacgtgttgttggaagcttatggagatgaaaacgctgagtataagatcacatggaagcatatcaaggcatttttcgtggagtttttcattggagggactgatacctcagtgcaaacaacacaatgggcaatggccgagatgatcaataacgctaacgttcttgagagactgagagaagaaatcgtctccgttgtaggggaaacaaggttgatccaagaaacagatttaccaaacctaccttatttgcaagcagtggttaaggaagttctaagattgcacccaccatcaccggtcttaatacggaagttccaagaaaaatgtgaggtcaaaggattttacataccggagaagacaacactcattgttaatgtttacgctataatgagagattctgattcttgggaagatcctgagaaatttaagccagagaggtttctaacttcttcaagatcaggggaagaggatgaaaaagagcttaagtttcttccttttggcagcggaaggagaggatgtcctggagcaaaccttggttctatatttgtaggaaccgcaataggagtgatggtgcagtgctttgactggaaaatcaaagaagataaggtcaacatggaagagacttttgaaggaatgaccctgaaaatggttcatccgcttacttgcactccgttcttcgaacccaacctttatcttttgcttttaatctctaaatttccgtgtctgatacttagctttggagcttgttaa

SEQ ID NO: 81556 - protein, 527 aa, Arabidopsis thaliana
  peptide (1)..(527): Ceres Seq. ID no. 12660298
MIAIIVEFQNFFIFILLCLFSLLCHSLFFKKPKDSRSFVLPSSPPSLPIIGHLHLLLSVLTHKSLQKLSSKYGPLLLIRIFYVPIILVSSSSMAYEIFKAHDVNVSSRGIIALDESLMFGASGILNAPYGDYWKFMKKLMATKLLRPQVLERSRGVRVEELHRFYRSILDKATKNESVEIGKEAMKLMNNTLCKLIMGRSFSEDNGESNRVRGLVDETYALSEKIFLAAILRRPLAKLRISLFKKEIMGVSNKFDELLERILQERKENLEEKNNEGMDMMDVLLEAYGDENAEYKITWKHIKAFFVEFFIGGTDTSVQTTQWAMAEMINNANVLERLREEIVSVVGETRLIQETDLPNLPYLQAVVKEVLRLHPPSPVLIRKFQEKCEVKGFYIPEKTTLIVNVYAIMRDSDSWEDPEKFKPERFLTSSRSGEEDEKELKFLPFGSGRRGCPGANLGSIFVGTAIGVMVQCFDWKIKEDKVNMEETFEGMTLKMVHPLTCTPFFEPNLYLLLLISKFPCLILSFGAC

SEQ ID NO: 81557 - protein, 435 aa, Arabidopsis thaliana
  peptide (1)..(435): Ceres Seq. ID no. 12660299
MAYEIFKAHDVNVSSRGIIALDESLMFGASGILNAPYGDYWKFMKKLMATKLLRPQVLERSRGVRVEELHRFYRSILDKATKNESVEIGKEAMKLMNNTLCKLIMGRSFSEDNGESNRVRGLVDETYALSEKIFLAAILRRPLAKLRISLFKKEIMGVSNKFDELLERILQERKENLEEKNNEGMDMMDVLLEAYGDENAEYKITWKHIKAFFVEFFIGGTDTSVQTTQWAMAEMINNANVLERLREEIVSVVGETRLIQETDLPNLPYLQAVVKEVLRLHPPSPVLIRKFQEKCEVKGFYIPEKTTLIVNVYAIMRDSDSWEDPEKFKPERFLTSSRSGEEDEKELKFLPFGSGRRGCPGANLGSIFVGTAIGVMVQCFDWKIKEDKVNMEETFEGMTLKMVHPLTCTPFFEPNLYLLLLISKFPCLILSFGAC

SEQ ID NO: 81558 - protein, 410 aa, Arabidopsis thaliana
  peptide (1)..(410): Ceres Seq. ID no. 12660300
MFGASGILNAPYGDYWKFMKKLMATKLLRPQVLERSRGVRVEELHRFYRSILDKATKNESVEIGKEAMKLMNNTLCKLIMGRSFSEDNGESNRVRGLVDETYALSEKIFLAAILRRPLAKLRISLFKKEIMGVSNKFDELLERILQERKENLEEKNNEGMDMMDVLLEAYGDENAEYKITWKHIKAFFVEFFIGGTDTSVQTTQWAMAEMINNANVLERLREEIVSVVGETRLIQETDLPNLPYLQAVVKEVLRLHPPSPVLIRKFQEKCEVKGFYIPEKTTLIVNVYAIMRDSDSWEDPEKFKPERFLTSSRSGEEDEKELKFLPFGSGRRGCPGANLGSIFVGTAIGVMVQCFDWKIKEDKVNMEETFEGMTLKMVHPLTCTPFFEPNLYLLLLISKFPCLILSFGAC

SEQ ID NO: 81559 - DNA, 1584 bp, Arabidopsis thaliana
  misc_feature (1)..(1584): Ceres Seq. ID no. 12660301
  misc_feature (1)..(1584): Ortholog of  Ceres SEQ ID NO 13502874 as cited in SEQ ID NO 66298
  misc_feature (1)..(1584): Ortholog of  Ceres SEQ ID NO 12614124 as cited in SEQ ID NO 68392
atggcagcaatgaacatgattgactttcaaaactgcttcatctttatcctcctatgtctcttctcacgactctgttattctcacttcttcaagaaaccaaaggaccctcgccttcactttgatttacctccgagccctccgtctcttcccatcatcggtcatctgcaccttcttctctctgttctactccacagatctttacaaaaactctccaccaagtacggatctattctctatctccgagtctttaggttccctgtagtcctcatctcgtcagcctcaattgcatatgagatcttcagggcacacgacctgaacatctcgtaccgcggtttcactccgaccgatgattcactttttgccggatctttcagctttatctctgctccctatggagattattggaagttcatgaagaaggtcctagttacaaacgtttttgggccccaagcacacgagcagtcacgaggtgtccgtgcagatgtgctagagcggttttatgggaatctgttcgataaagcgataaagaagcagagcgtggagatatgtgctgaagcgttgaagttatctaactccagcatctgcaagatgatcatggggaggagttgttcagaggagagattcagggctttggctaccgagttagatgttttgacaaagaagctcttctttgcaaacatgttgcgagcatggtttaagaagcttgttgtctctctgtttaaaaaagaaactacagttatttcctacagattcgatgagctgctcgaaagcattcttgtggaacacgaaaagaaactggacgtgcatcatcaacgtacggacttgatggacgcattgttggcagcttatcgggatgaaaatgcagagtataagatcacaaggaaccatatcaagtcaattattgcggatcttttatttgcaggcactgaaaaccaagtgcagacaatacaatgggcaatggcagagatcattaacaaccctaacgttcttgagagactgagaggagaaatcgatagcgtggtaggaaagtcaaggttgattcaagaaacggatttaccaaagctcccttatttgcaagctgtggttaaggaaacgataagactgcacccgccggggcctttcttcttaaggttcacaaaagaagggtgtaggatcagagggttctatgtaccagagaacacgtcagtcgttgttaacgtttatgctgtgatgagggatcctgatgcttgggaggatcctcttgtgtttaagccagagaggttcttagcttcttcaagagcagaacaagaggaggagagaagagagaaagaaattaagtaccttccttttggaagcggaagaagaagttgtcccggagaaaatctagcttatgtcattatgggaactgcaattggagtgatggtgcagggttttgagtggagaaccacagaagagaaaattaacatggacgaggctgttgtaggactgagcttgaccatggctcatcctcttaagatcattcctgttgctcgaacctcaaactctttaacttcgagtttgcaaaaatgtttgtgagttttcacatattatgtatgatagttgaag

SEQ ID NO: 81560 - protein, 517 aa, Arabidopsis thaliana
  peptide (1)..(517): Ceres Seq. ID no. 12660302
MAAMNMIDFQNCFIFILLCLFSRLCYSHFFKKPKDPRLHFDLPPSPPSLPIIGHLHLLLSVLLHRSLQKLSTKYGSILYLRVFRFPVVLISSASIAYEIFRAHDLNISYRGFTPTDDSLFAGSFSFISAPYGDYWKFMKKVLVTNVFGPQAHEQSRGVRADVLERFYGNLFDKAIKKQSVEICAEALKLSNSSICKMIMGRSCSEERFRALATELDVLTKKLFFANMLRAWFKKLVVSLFKKETTVISYRFDELLESILVEHEKKLDVHHQRTDLMDALLAAYRDENAEYKITRNHIKSIIADLLFAGTENQVQTIQWAMAEIINNPNVLERLRGEIDSVVGKSRLIQETDLPKLPYLQAVVKETIRLHPPGPFFLRFTKEGCRIRGFYVPENTSVVVNVYAVMRDPDAWEDPLVFKPERFLASSRAEQEEERREKEIKYLPFGSGRRSCPGENLAYVIMGTAIGVMVQGFEWRTTEEKINMDEAVVGLSLTMAHPLKIIPVARTSNSLTSSLQKCL

SEQ ID NO: 81561 - protein, 514 aa, Arabidopsis thaliana
  peptide (1)..(514): Ceres Seq. ID no. 12660303
MNMIDFQNCFIFILLCLFSRLCYSHFFKKPKDPRLHFDLPPSPPSLPIIGHLHLLLSVLLHRSLQKLSTKYGSILYLRVFRFPVVLISSASIAYEIFRAHDLNISYRGFTPTDDSLFAGSFSFISAPYGDYWKFMKKVLVTNVFGPQAHEQSRGVRADVLERFYGNLFDKAIKKQSVEICAEALKLSNSSICKMIMGRSCSEERFRALATELDVLTKKLFFANMLRAWFKKLVVSLFKKETTVISYRFDELLESILVEHEKKLDVHHQRTDLMDALLAAYRDENAEYKITRNHIKSIIADLLFAGTENQVQTIQWAMAEIINNPNVLERLRGEIDSVVGKSRLIQETDLPKLPYLQAVVKETIRLHPPGPFFLRFTKEGCRIRGFYVPENTSVVVNVYAVMRDPDAWEDPLVFKPERFLASSRAEQEEERREKEIKYLPFGSGRRSCPGENLAYVIMGTAIGVMVQGFEWRTTEEKINMDEAVVGLSLTMAHPLKIIPVARTSNSLTSSLQKCL

SEQ ID NO: 81562 - protein, 512 aa, Arabidopsis thaliana
  peptide (1)..(512): Ceres Seq. ID no. 12660304
MIDFQNCFIFILLCLFSRLCYSHFFKKPKDPRLHFDLPPSPPSLPIIGHLHLLLSVLLHRSLQKLSTKYGSILYLRVFRFPVVLISSASIAYEIFRAHDLNISYRGFTPTDDSLFAGSFSFISAPYGDYWKFMKKVLVTNVFGPQAHEQSRGVRADVLERFYGNLFDKAIKKQSVEICAEALKLSNSSICKMIMGRSCSEERFRALATELDVLTKKLFFANMLRAWFKKLVVSLFKKETTVISYRFDELLESILVEHEKKLDVHHQRTDLMDALLAAYRDENAEYKITRNHIKSIIADLLFAGTENQVQTIQWAMAEIINNPNVLERLRGEIDSVVGKSRLIQETDLPKLPYLQAVVKETIRLHPPGPFFLRFTKEGCRIRGFYVPENTSVVVNVYAVMRDPDAWEDPLVFKPERFLASSRAEQEEERREKEIKYLPFGSGRRSCPGENLAYVIMGTAIGVMVQGFEWRTTEEKINMDEAVVGLSLTMAHPLKIIPVARTSNSLTSSLQKCL

SEQ ID NO: 81563 - DNA, 1362 bp, Arabidopsis thaliana
  misc_feature (1)..(1362): Ceres Seq. ID no. 12660305
  misc_feature (1)..(1362): Ortholog of  Ceres SEQ ID NO 13597546 as cited in SEQ ID NO 65017
  misc_feature (1)..(1362): Ortholog of  Ceres SEQ ID NO 13654353 as cited in SEQ ID NO 68318
atggtagaggtttatgagttctgggccgtgatagtttcactcatagtggtaaagctgtgtcactggatctaccagtggaaaaatccaaaaggaaatggaaaacttcctccaggatctatgggttatccaatcatcggagagactttcgagttcatgaagcttcatgatgctattcagttaccaacattcgttaaggagaaattactcaggacaagcttatttggaggcaaagttatcatttcgactgatattggattgaacatggagatcgcaaagacaaatcatattcccggtatgccgaagagcttagagcggttatttggggcaaccaacttgtttgtgaataaggatactcataaacatgcccgcagcttgacaaaccagtttttaggttcgcaagctttaaaattaaggatgattcaagacatcgatttcttggctcgcacacacatgaaggaaggagctaggaaaggctgccttgacgtcaaggaaactgcaagcaagaaagtaatgggagagatggaaccagaggcagcaaaggaactcacactctgttggacatttttcccaagggattggtttcgattcgcttggaatttcccggggactggtgtctatcgcatagtgaaggcaagaaatcgtatgatgaaggttataaaggagacagtagttaaaaaaagagcatcaggaaagaaattgggggagtttttcgagaccatctttggagatacggaaagtgtaactatgagcatagagattgcgactgagtacatatttactctgtttgtgcttgctaacgaaacaacaccaggggtccttgcggcaacaataaagctcataagtgataaccctaaagtcatgcaggagttacggagagaacatgaaggaatcgtccaagataagattaagaaggatgagacagctgacctaacttgggaagactacaaatcaatgacttttacccagatggtgataaatgagtcgcttaggatcacaagcacggtaccaacggtgcttagaataattgatcatgagatccaatttggtgattatacaattccggctggttggatctttatgggttatccttatgtgcatttcaatccagagaagtatgatgaccctttagcttttaatccatggcgctggaagggaaaagacttgagcacgatcgtctccaagacttaccttccctttggctctggtactagactatgtgtgggagctgaattcgttaagttgcaaatggccatttttatccatcatttgtttagatacaggtggtcaatgaaggcagagactactttacttcgaagatttatacttgtgcttccacgtggatctgatgttcaaatctcataa

SEQ ID NO: 81564 - protein, 453 aa, Arabidopsis thaliana
  peptide (1)..(453): Ceres Seq. ID no. 12660306
MVEVYEFWAVIVSLIVVKLCHWIYQWKNPKGNGKLPPGSMGYPIIGETFEFMKLHDAIQLPTFVKEKLLRTSLFGGKVIISTDIGLNMEIAKTNHIPGMPKSLERLFGATNLFVNKDTHKHARSLTNQFLGSQALKLRMIQDIDFLARTHMKEGARKGCLDVKETASKKVMGEMEPEAAKELTLCWTFFPRDWFRFAWNFPGTGVYRIVKARNRMMKVIKETVVKKRASGKKLGEFFETIFGDTESVTMSIEIATEYIFTLFVLANETTPGVLAATIKLISDNPKVMQELRREHEGIVQDKIKKDETADLTWEDYKSMTFTQMVINESLRITSTVPTVLRIIDHEIQFGDYTIPAGWIFMGYPYVHFNPEKYDDPLAFNPWRWKGKDLSTIVSKTYLPFGSGTRLCVGAEFVKLQMAIFIHHLFRYRWSMKAETTLLRRFILVLPRGSDVQIS

SEQ ID NO: 81565 - protein, 414 aa, Arabidopsis thaliana
  peptide (1)..(414): Ceres Seq. ID no. 12660307
MGYPIIGETFEFMKLHDAIQLPTFVKEKLLRTSLFGGKVIISTDIGLNMEIAKTNHIPGMPKSLERLFGATNLFVNKDTHKHARSLTNQFLGSQALKLRMIQDIDFLARTHMKEGARKGCLDVKETASKKVMGEMEPEAAKELTLCWTFFPRDWFRFAWNFPGTGVYRIVKARNRMMKVIKETVVKKRASGKKLGEFFETIFGDTESVTMSIEIATEYIFTLFVLANETTPGVLAATIKLISDNPKVMQELRREHEGIVQDKIKKDETADLTWEDYKSMTFTQMVINESLRITSTVPTVLRIIDHEIQFGDYTIPAGWIFMGYPYVHFNPEKYDDPLAFNPWRWKGKDLSTIVSKTYLPFGSGTRLCVGAEFVKLQMAIFIHHLFRYRWSMKAETTLLRRFILVLPRGSDVQIS

SEQ ID NO: 81566 - protein, 402 aa, Arabidopsis thaliana
  peptide (1)..(402): Ceres Seq. ID no. 12660308
MKLHDAIQLPTFVKEKLLRTSLFGGKVIISTDIGLNMEIAKTNHIPGMPKSLERLFGATNLFVNKDTHKHARSLTNQFLGSQALKLRMIQDIDFLARTHMKEGARKGCLDVKETASKKVMGEMEPEAAKELTLCWTFFPRDWFRFAWNFPGTGVYRIVKARNRMMKVIKETVVKKRASGKKLGEFFETIFGDTESVTMSIEIATEYIFTLFVLANETTPGVLAATIKLISDNPKVMQELRREHEGIVQDKIKKDETADLTWEDYKSMTFTQMVINESLRITSTVPTVLRIIDHEIQFGDYTIPAGWIFMGYPYVHFNPEKYDDPLAFNPWRWKGKDLSTIVSKTYLPFGSGTRLCVGAEFVKLQMAIFIHHLFRYRWSMKAETTLLRRFILVLPRGSDVQIS

SEQ ID NO: 81567 - DNA, 1410 bp, Arabidopsis thaliana
  misc_feature (1)..(1410): Ceres Seq. ID no. 12660309
  misc_feature (1)..(1410): Ortholog of  Ceres SEQ ID NO 13597546 as cited in SEQ ID NO 65017
  misc_feature (1)..(1410): Ortholog of  Ceres SEQ ID NO 13654353 as cited in SEQ ID NO 68318
atggtagatctttatgagttctgggctgtgatagtttcactcatagtggtgaagctgtgtcactcgatctatcagtggaggaatccaaaaagtaatggagaacttcctccaggatctatgggttatccaatcattggagagactttcgagttcatgaagcctcatgacgctattcagttaccaacattcgtgaaggagaaagtactcaggacaagcttatttggaggaaaagttataatttcgactgatattgggttgaacatggagatagcaaagacaaatcatattcctggtatgccgaagagcttagcgcggctatttggggcaaacaacttgttcgtgaataaggatactcataaacatgcccgcagcttgacaaaccagtttttaggttcgcaagctttgaaattaagaatgcttcaagacatcgatttcttggttcgcacacacctgaaggaaggagctaggaaaggcagccttgacatcaaggaaacgacaagcaagatcattattgaatgtcttgcgaagaaagtaatgggggagatggaaccagatgcagcaaaagaactcacactctgttggacatttttcccaagggaatggtttggattcgcttggaatatcccggggactggtgtctatcgaatggtgaaggcaagaaatcggatgatgaaggtactaaaggagacggtacttaagaaaagagcatcaggagaggaattgggggactttttcaagactatctttggagatactgaaagaggcgtgaaaactataagtttagagagtgccaccgagtacatatttactctgtttttgcttgctaacgaaacaacaccagcggtccttgcggctacaataaagctcataagtgaccatcctaaagtgatgcaagagttacagagagagcatgaaggaattgtccgagataagattgagaaaaatgagaaagctgacctaacatgggaagactacaaatcaatgacttttacccagatggtgataaatgagtcgcttaggatcacaagcacggtaccgacggtgcttagaataattgatcatgagtttcaatttggtgagtatacaattccagcaggttggatctttatgggttatccttatgtgcatttcaatgcagaaaagtatgatgaccctttagcatttaatccatggcgctggaagggaaaagacttgagcgcgattgtctccaggacttacattccctttggctcgggttctagactatgtgtaggagctgaatttgttaagttgaagatggccatttttatccatcatttgtctagatacaggtggtcaatgaagacagagactactttacttcgaagatttgtacttatacttccacgtggatcagatgttcaaatcttagaagacaccaaagctaaataa

SEQ ID NO: 81568 - protein, 469 aa, Arabidopsis thaliana
  peptide (1)..(469): Ceres Seq. ID no. 12660310
MVDLYEFWAVIVSLIVVKLCHSIYQWRNPKSNGELPPGSMGYPIIGETFEFMKPHDAIQLPTFVKEKVLRTSLFGGKVIISTDIGLNMEIAKTNHIPGMPKSLARLFGANNLFVNKDTHKHARSLTNQFLGSQALKLRMLQDIDFLVRTHLKEGARKGSLDIKETTSKIIIECLAKKVMGEMEPDAAKELTLCWTFFPREWFGFAWNIPGTGVYRMVKARNRMMKVLKETVLKKRASGEELGDFFKTIFGDTERGVKTISLESATEYIFTLFLLANETTPAVLAATIKLISDHPKVMQELQREHEGIVRDKIEKNEKADLTWEDYKSMTFTQMVINESLRITSTVPTVLRIIDHEFQFGEYTIPAGWIFMGYPYVHFNAEKYDDPLAFNPWRWKGKDLSAIVSRTYIPFGSGSRLCVGAEFVKLKMAIFIHHLSRYRWSMKTETTLLRRFVLILPRGSDVQILEDTKAK

SEQ ID NO: 81569 - protein, 430 aa, Arabidopsis thaliana
  peptide (1)..(430): Ceres Seq. ID no. 12660311
MGYPIIGETFEFMKPHDAIQLPTFVKEKVLRTSLFGGKVIISTDIGLNMEIAKTNHIPGMPKSLARLFGANNLFVNKDTHKHARSLTNQFLGSQALKLRMLQDIDFLVRTHLKEGARKGSLDIKETTSKIIIECLAKKVMGEMEPDAAKELTLCWTFFPREWFGFAWNIPGTGVYRMVKARNRMMKVLKETVLKKRASGEELGDFFKTIFGDTERGVKTISLESATEYIFTLFLLANETTPAVLAATIKLISDHPKVMQELQREHEGIVRDKIEKNEKADLTWEDYKSMTFTQMVINESLRITSTVPTVLRIIDHEFQFGEYTIPAGWIFMGYPYVHFNAEKYDDPLAFNPWRWKGKDLSAIVSRTYIPFGSGSRLCVGAEFVKLKMAIFIHHLSRYRWSMKTETTLLRRFVLILPRGSDVQILEDTKAK

SEQ ID NO: 81570 - protein, 418 aa, Arabidopsis thaliana
  peptide (1)..(418): Ceres Seq. ID no. 12660312
MKPHDAIQLPTFVKEKVLRTSLFGGKVIISTDIGLNMEIAKTNHIPGMPKSLARLFGANNLFVNKDTHKHARSLTNQFLGSQALKLRMLQDIDFLVRTHLKEGARKGSLDIKETTSKIIIECLAKKVMGEMEPDAAKELTLCWTFFPREWFGFAWNIPGTGVYRMVKARNRMMKVLKETVLKKRASGEELGDFFKTIFGDTERGVKTISLESATEYIFTLFLLANETTPAVLAATIKLISDHPKVMQELQREHEGIVRDKIEKNEKADLTWEDYKSMTFTQMVINESLRITSTVPTVLRIIDHEFQFGEYTIPAGWIFMGYPYVHFNAEKYDDPLAFNPWRWKGKDLSAIVSRTYIPFGSGSRLCVGAEFVKLKMAIFIHHLSRYRWSMKTETTLLRRFVLILPRGSDVQILEDTKAK

SEQ ID NO: 81571 - DNA, 1455 bp, Arabidopsis thaliana
  misc_feature (1)..(1455): Ceres Seq. ID no. 12660334
  misc_feature (1)..(1455): Ortholog of  Ceres SEQ ID NO 13594345 as cited in SEQ ID NO 58043
  misc_feature (1)..(1455): Ortholog of  Ceres SEQ ID NO 12614112 as cited in SEQ ID NO 60891
  misc_feature (1)..(1455): Ortholog of  Ceres SEQ ID NO 13597574 as cited in SEQ ID NO 64677
  misc_feature (1)..(1455): Ortholog of  Ceres SEQ ID NO 13597678 as cited in SEQ ID NO 65375
  misc_feature (1)..(1455): Ortholog of  Ceres SEQ ID NO 13662880 as cited in SEQ ID NO 65422
  misc_feature (1)..(1455): Ortholog of  Ceres SEQ ID NO 12779098 as cited in SEQ ID NO 67698
  misc_feature (1)..(1455): Ortholog of  Ceres SEQ ID NO 13596180 as cited in SEQ ID NO 67941
  misc_feature (1)..(1455): Ortholog of  Ceres SEQ ID NO 13591190 as cited in SEQ ID NO 68044
  misc_feature (1)..(1455): Ortholog of  Ceres SEQ ID NO 13596089 as cited in SEQ ID NO 68373
  misc_feature (1)..(1455): Ortholog of  Ceres SEQ ID NO 14313563 as cited in SEQ ID NO 68700
atggtgttcgaaacttgtccatctccaaacccaattcatgtaatgctcgtctcgtttcaaggacaaggccacgtcaaccctcttcttcgtctcggcaagttaattgcttcaaagggtttactcgttaccttcgttacaacggagctttggggcaagaaaatgagacaagccaacaaaatcgttgacggtgaacttaaaccggttggttccggttcaatccggtttgagttctttgatgaagaatgggcagaggatgatgaccggagagctgatttctctttgtacattgctcacctagagagcgttgggatacgagaagtgtctaagcttgtgagaagatacgaggaagcgaacgagcctgtctcgtgtcttatcaataacccgtttatcccatgggtctgccacgtggcggaagagttcaacattccttgtgcggttctctgggttcagtcttgtgcttgtttctctgcttattaccattaccaagatggctctgtttcattccctacggaaacagagcctgagctcgatgtgaagcttccttgtgttcctgtcttgaagaacgacgagattcctagctttctccatccttcttctaggttcacgggttttcgacaagcgattcttgggcaattcaagaatctgagcaagtccttctgtgttctaatcgattcttttgactcattggaacaagaagttatcgattacatgtcaagtctttgtccggttaaaaccgttggaccgcttttcaaagttgctaggacagttacttctgacgtaagcggtgacatttgcaaatcaacagataaatgcctcgagtggttagactcgaggcctaaatcgtcagttgtctacatttcgttcgggacagttgcatatttgaagcaagaacagatcgaagagatcgctcacggagttttgaagtcgggtttatcgttcttgtgggtgattagacctccaccacacgatctgaaggtcgagacacatgtcttgcctcaagaacttaaagagagtagtgctaaaggtaaagggatgattgtggattggtgcccacaagagcaagtcttgtctcatccttcagtggcatgcttcgtgactcattgtggatggaactcgacaatggaatctttgtcttcaggtgttccggtggtttgttgtccgcaatggggagatcaagtgactgatgcagtgtatttgatcgatgttttcaagaccggggttagactaggccgtggagcgaccgaggagagggtagtgccaagggaggaagtggcggagaagcttttggaagcgacagttggggagaaggcagaggagttgagaaagaacgctttgaaatggaaggcggaggcggaagcagcggtggctccaggaggttcgtcggataagaattttagggagtttgtggagaagttaggtgcgggagtaacgaagactaaagataatggatactag

SEQ ID NO: 81572 - protein, 484 aa, Arabidopsis thaliana; identical to SEQ ID NO: 36413
  peptide (1)..(484): Ceres Seq. ID no. 12660335

SEQ ID NO: 81573 - protein, 470 aa, Arabidopsis thaliana
  peptide (1)..(470): Ceres Seq. ID no. 12660336
MLVSFQGQGHVNPLLRLGKLIASKGLLVTFVTTELWGKKMRQANKIVDGELKPVGSGSIRFEFFDEEWAEDDDRRADFSLYIAHLESVGIREVSKLVRRYEEANEPVSCLINNPFIPWVCHVAEEFNIPCAVLWVQSCACFSAYYHYQDGSVSFPTETEPELDVKLPCVPVLKNDEIPSFLHPSSRFTGFRQAILGQFKNLSKSFCVLIDSFDSLEQEVIDYMSSLCPVKTVGPLFKVARTVTSDVSGDICKSTDKCLEWLDSRPKSSVVYISFGTVAYLKQEQIEEIAHGVLKSGLSFLWVIRPPPHDLKVETHVLPQELKESSAKGKGMIVDWCPQEQVLSHPSVACFVTHCGWNSTMESLSSGVPVVCCPQWGDQVTDAVYLIDVFKTGVRLGRGATEERVVPREEVAEKLLEATVGEKAEELRKNALKWKAEAEAAVAPGGSSDKNFREFVEKLGAGVTKTKDNGY

SEQ ID NO: 81574 - protein, 431 aa, Arabidopsis thaliana
  peptide (1)..(431): Ceres Seq. ID no. 12660337
MRQANKIVDGELKPVGSGSIRFEFFDEEWAEDDDRRADFSLYIAHLESVGIREVSKLVRRYEEANEPVSCLINNPFIPWVCHVAEEFNIPCAVLWVQSCACFSAYYHYQDGSVSFPTETEPELDVKLPCVPVLKNDEIPSFLHPSSRFTGFRQAILGQFKNLSKSFCVLIDSFDSLEQEVIDYMSSLCPVKTVGPLFKVARTVTSDVSGDICKSTDKCLEWLDSRPKSSVVYISFGTVAYLKQEQIEEIAHGVLKSGLSFLWVIRPPPHDLKVETHVLPQELKESSAKGKGMIVDWCPQEQVLSHPSVACFVTHCGWNSTMESLSSGVPVVCCPQWGDQVTDAVYLIDVFKTGVRLGRGATEERVVPREEVAEKLLEATVGEKAEELRKNALKWKAEAEAAVAPGGSSDKNFREFVEKLGAGVTKTKDNGY

SEQ ID NO: 81575 - DNA, 1014 bp, Arabidopsis thaliana
  misc_feature (1)..(1014): Ceres Seq. ID no. 12660344
  misc_feature (1)..(1014): Ortholog of  Ceres SEQ ID NO 13654431 as cited in SEQ ID NO 67761
atgtcagagatagaagaagaagaagaagaaggatcagcaagtgcaattacaggttcgagaagtttcgatcttcccgatgaacttcttcaagttctaccgtccgatccattcgagcagctagatgtagctcgcaaaatcacatccattgctctctcgacacgtgtctcagctctcgaatcagagtcgtcggatctccgggaacttctcgccgagaaagaaaaagaatttgaagaactccagtctcacgttgagtctctcgaggcttctctttccgatgcgtttcataagctttctctcgctgatggtgaaaaggagaatctgataagagaaaatgcttctttgtctaatactgtcaagagacttcagagagatgtctcaaagcttgagggttttaggaagacgcttatgatgtctcttcaagatgatgaccaaaatgcaggaacaacgcaaatcatcgctaagccgacaccaaacgatgatgatactccatttcaaccttcaagacattcatcaatccaatctcaacaagcttctgaagccattgaaccagctgcaactgacaacgaaaacgatgctcctaaaccaagtttatcagctagtcttccgttagtatcacaaactactacgccacggcttactcctcctggttctccaccaatcttatctgcttctggtacaccgaaaacaacttcgagacctatctctcctcgacgccattctgtatcgttcgctaccactagaggcatgtttgatgatactagatcttctatttcaatctcagagcctggttcacaaactgcgagaactcgggttgatggaaaagagttctttcgacaagtcaggagccgattatcttacgagcaatttggtgcatttcttggaaatgtgaaggatcttaacgcccacaagcaaacaagagaagaaacacttaggaaagctgaagagatatttggaggcgataacagagatctctacgtcatattcgagggcttgatcacacgcaacgctcactaa

SEQ ID NO: 81576 - protein, 337 aa, Arabidopsis thaliana; identical to SEQ ID NO: 25685
  peptide (1)..(337): Ceres Seq. ID no. 12660345

SEQ ID NO: 81577 - protein, 202 aa, Arabidopsis thaliana; identical to SEQ ID NO: 25686
  peptide (1)..(202): Ceres Seq. ID no. 12660346

SEQ ID NO: 81578 - protein, 201 aa, Arabidopsis thaliana
  peptide (1)..(201): Ceres Seq. ID no. 12660347
MSLQDDDQNAGTTQIIAKPTPNDDDTPFQPSRHSSIQSQQASEAIEPAATDNENDAPKPSLSASLPLVSQTTTPRLTPPGSPPILSASGTPKTTSRPISPRRHSVSFATTRGMFDDTRSSISISEPGSQTARTRVDGKEFFRQVRSRLSYEQFGAFLGNVKDLNAHKQTREETLRKAEEIFGGDNRDLYVIFEGLITRNAH

SEQ ID NO: 81579 - DNA, 2076 bp, Arabidopsis thaliana
  misc_feature (1)..(2076): Ceres Seq. ID no. 12660367
  misc_feature (1)..(2076): Ortholog of  Ceres SEQ ID NO 12586556 as cited in SEQ ID NO 64667
  misc_feature (1)..(2076): Ortholog of  Ceres SEQ ID NO 13660894 as cited in SEQ ID NO 67475
actaaaaagaatatagagatatagtatcaacacaaatgtcgtccaccatttctcaaaacaatagtccaataatgaaaatccaaaatctgtaacatgaccaattgacccaatgaagaaagggttcatccaaaatgtccatttagcccctgcaacttctctgttcgtccctcagtacaaaaacgacttctttcatctcaaaaccaaagctttcttggttcacaagctttcagaatctaccaacgctgctttcacgaatttactacatactctgactctgaaacttgggttcgcgagcgacactttcactgtgaatcacctagttattagttatgtcaagctcaaagaaatcaacactgcacgcaaactgtttgatgaaatgtgtgaaccaaatgtggtttcatggacttcggttatttctgggtataacgacatgggtaaacctcaaaatgctctttctatgtttcagaagatgcatgaagatagacctgtgcctcccaatgagtacacgtttgctagtgtctttaaagcatgttctgctttggctgaatcaagaatcggtaaaaacatccatgcccgtctggagatttcagggctcagaaggaatattgtagtgagttcctctcttgttgacatgtatgggaaatgcaacgatgtggaaaccgctagacgggttttcgactcgatgattggttatggaagaaatgttgtttcttggacctcgatgatcactgcttatgcgcagaacgctcgtggccatgaagctattgagttgtttagatcattcaatgctgctttgacgtcggatagggcgaatcagtttatgctggctagtgtaattagcgcatgctctagtttaggtaggctgcaatgggggaaagttgctcacgggttagttactcgaggtggttatgaatcgaacactgtggttgctacctctcttctagatatgtacgcgaaatgcggatctctaagctgtgcggagaaaatcttcttgagaattcgttgtcattctgttatttcgtacacatctatgatcatggcgaaggcaaagcatggacttggagaagcagcggttaaactattcgatgaaatggttgcagggagaataaatcctaactatgtaacattacttggcgtgttacacgcttgtagccattcgggtctggttaacgaaggcctagaatacttgagtttaatggctgagaagtatggtgtggttcctgactcgaggcattacacttgtgttgttgatatgcttggaagatttggtcgtgttgatgaagcttatgaattggcgaaaactatagaagttggagcagagcaaggtgcgctcttgtggggagctcttctctcagctggtaggttacatggaagagttgagattgtaagtgaagcgagcaagcgattaatacaatctaatcagcaagtgacaagtgcgtacatcgcattatccaatgcttatgctgtgtctggaggatgggaagattcagaatctcttcgattagagatgaaacgtagtggaaatgtgaaagaacgagcttgtagctggattgaaaataaagattcagtttatgtttttcatgctggggatttgtcatgtgatgagagcggtgagattgaaaggttcctgaaagatctagagaagagaatgaaagaaagaggacacagaggaagtagtagtatgatcacaacaagttcatcggtttttgtcgatgttgatgaggaagctaaagatgaaatggtgagtttgcattgtgaaagattggctttagcatatggattgcttcatttgcctgcaggatcaacaattaggattatgaacaatttgaggatgtgtagagattgccatgaggctttcaagctgatcagtgagattgtggagagggaaattgttgtcagggatgtgaataggtttcattgctttaagaatggctcttgcacttgtcgtgattattggtgaactttttactaaattatattgattttttgttctgatatgatccgaatcattcatagtcaaaacattgatgtagaagcgtatgtttcaatcacttatataattaaagtagttgtaag

SEQ ID NO: 81580 - protein, 616 aa, Arabidopsis thaliana
  peptide (1)..(616): Ceres Seq. ID no. 12660368
MKKGFIQNVHLAPATSLFVPQYKNDFFHLKTKAFLVHKLSESTNAAFTNLLHTLTLKLGFASDTFTVNHLVISYVKLKEINTARKLFDEMCEPNVVSWTSVISGYNDMGKPQNALSMFQKMHEDRPVPPNEYTFASVFKACSALAESRIGKNIHARLEISGLRRNIVVSSSLVDMYGKCNDVETARRVFDSMIGYGRNVVSWTSMITAYAQNARGHEAIELFRSFNAALTSDRANQFMLASVISACSSLGRLQWGKVAHGLVTRGGYESNTVVATSLLDMYAKCGSLSCAEKIFLRIRCHSVISYTSMIMAKAKHGLGEAAVKLFDEMVAGRINPNYVTLLGVLHACSHSGLVNEGLEYLSLMAEKYGVVPDSRHYTCVVDMLGRFGRVDEAYELAKTIEVGAEQGALLWGALLSAGRLHGRVEIVSEASKRLIQSNQQVTSAYIALSNAYAVSGGWEDSESLRLEMKRSGNVKERACSWIENKDSVYVFHAGDLSCDESGEIERFLKDLEKRMKERGHRGSSSMITTSSSVFVDVDEEAKDEMVSLHCERLALAYGLLHLPAGSTIRIMNNLRMCRDCHEAFKLISEIVEREIVVRDVNRFHCFKNGSCTCRDYW

SEQ ID NO: 81581 - protein, 527 aa, Arabidopsis thaliana
  peptide (1)..(527): Ceres Seq. ID no. 12660369
MCEPNVVSWTSVISGYNDMGKPQNALSMFQKMHEDRPVPPNEYTFASVFKACSALAESRIGKNIHARLEISGLRRNIVVSSSLVDMYGKCNDVETARRVFDSMIGYGRNVVSWTSMITAYAQNARGHEAIELFRSFNAALTSDRANQFMLASVISACSSLGRLQWGKVAHGLVTRGGYESNTVVATSLLDMYAKCGSLSCAEKIFLRIRCHSVISYTSMIMAKAKHGLGEAAVKLFDEMVAGRINPNYVTLLGVLHACSHSGLVNEGLEYLSLMAEKYGVVPDSRHYTCVVDMLGRFGRVDEAYELAKTIEVGAEQGALLWGALLSAGRLHGRVEIVSEASKRLIQSNQQVTSAYIALSNAYAVSGGWEDSESLRLEMKRSGNVKERACSWIENKDSVYVFHAGDLSCDESGEIERFLKDLEKRMKERGHRGSSSMITTSSSVFVDVDEEAKDEMVSLHCERLALAYGLLHLPAGSTIRIMNNLRMCRDCHEAFKLISEIVEREIVVRDVNRFHCFKNGSCTCRDYW

SEQ ID NO: 81582 - protein, 509 aa, Arabidopsis thaliana
  peptide (1)..(509): Ceres Seq. ID no. 12660370
MGKPQNALSMFQKMHEDRPVPPNEYTFASVFKACSALAESRIGKNIHARLEISGLRRNIVVSSSLVDMYGKCNDVETARRVFDSMIGYGRNVVSWTSMITAYAQNARGHEAIELFRSFNAALTSDRANQFMLASVISACSSLGRLQWGKVAHGLVTRGGYESNTVVATSLLDMYAKCGSLSCAEKIFLRIRCHSVISYTSMIMAKAKHGLGEAAVKLFDEMVAGRINPNYVTLLGVLHACSHSGLVNEGLEYLSLMAEKYGVVPDSRHYTCVVDMLGRFGRVDEAYELAKTIEVGAEQGALLWGALLSAGRLHGRVEIVSEASKRLIQSNQQVTSAYIALSNAYAVSGGWEDSESLRLEMKRSGNVKERACSWIENKDSVYVFHAGDLSCDESGEIERFLKDLEKRMKERGHRGSSSMITTSSSVFVDVDEEAKDEMVSLHCERLALAYGLLHLPAGSTIRIMNNLRMCRDCHEAFKLISEIVEREIVVRDVNRFHCFKNGSCTCRDYW

SEQ ID NO: 81583 - DNA, 2157 bp, Arabidopsis thaliana
  misc_feature (1)..(2157): Ceres Seq. ID no. 12660404
  misc_feature (1)..(2157): Ortholog of  Ceres SEQ ID NO 14307164 as cited in SEQ ID NO 54775
  misc_feature (1)..(2157): Ortholog of  Ceres SEQ ID NO 13518411 as cited in SEQ ID NO 55230
  misc_feature (1)..(2157): Ortholog of  Ceres SEQ ID NO 13654989 as cited in SEQ ID NO 63117
  misc_feature (1)..(2157): Ortholog of  Ceres SEQ ID NO 13655640 as cited in SEQ ID NO 63844
  misc_feature (1)..(2157): Ortholog of  Ceres SEQ ID NO 13584744 as cited in SEQ ID NO 69137
atggacaaagtccagcaacaagcagatttattcggtaagacgatatctccgtttgtagcttcacaaccaacaaatgtcggaggattcactgatcagaaaatcattggcggttctgagacgacacaacctccagccacctcacctccttctcctccatcccctgacacacaaacatctcccccgccggcaacagctgctcaaccaccaccgaatcagcctcctaatacaactccacctccaacgcctccttcttcccctccaccttctataactccacctccttcacctcctcagcctcaacctccgcctcaatccaccccaactggagattctccggtggtgattccttttccaaagcctcaattacctcctccttctctttttcctcccccctccttagttaatcagctaccggatccaagacctaatgataataacatacttgaacccatcaacaaccctatttctcttccgtctccgccttctactcccttttcgccaccgtctcaggaaaattccggcagtcaagggtctcctccgttgtcatctttattgcctccgatgcttccgctaaaccctaattctcctggaaaccctttacagcccttggattcacctctgggaggagaatcaaatcgtgtaccctcgtcgtcttcttccccatctcctccttccctctccggatcaaataaccattccggaggctctaatagacataatgccaatagtaacggggatggtggtactagccaacaaagtaatgagtctaattacaccgagaagacagtgattggtattgggatcgcaggtgtgttggtcatattgttcatcgctggcgttttctttgttaggaggaaacaaaagaaaggctcttcttccccgcgctctaaccagtatttgccaccggctaatgtctctgtaaatacagaaggattcatccattacagacagaaacccgggaatgggaacagctcggcgcagaactcttcaccggatactaacagtcttgggaacccaaaacatggtagaggaacccctgactccgcagtaatagggacttcaaagatccatttcacctacgaagagctaagtcagataactgaaggattttgcaagagctttgtggtaggagaaggcgggttcgggtgtgtctacaagggcatcctattcgagggaaagccagtagcgatcaaacagctgaagtcggtcagcgcagaaggatatagagagttcaaagctgaagtagagatcataagcagagtgcatcataggcacttggtgtctcttgtgggttattgcatctctgaacaacacagattcctcatctatgagtttgtccccaacaatactttggattaccatttacatggcaaaaacttaccggttttggaatggagtagaagagtcaggattgcaataggcgcagccaaaggacttgcttatctacatgaagattgccacccaaagattatccatagggacatcaaatcgtcaaacattctgctggatgatgaattcgaagctcaggttgcagatttcggactcgctagactgaacgatactgcacagtcacacatatcaacgcgtgtcatgggcacattcgggtatctagcaccagaatatgcgtcaagcggaaagctaacggatagatcagatgtgttttcatttggagttgtgcttctcgaactcatcaccggtcgcaaacctgttgatacctctcaacctttgggtgaagaaagtctcgtcgaatgggcacgtccaaggctaatcgaggccattgaaaaaggtgacatcagcgaagtagtggatccacggctagagaatgattacgtcgaaagtgaagtctataaaatgattgaaacggcagcgtcttgtgttagacattccgctttaaaacgacctcgtatggttcaggttgttagagctctggacacgagagatgacttgtcggatctgacaaacggagttaaagtgggtcaaagtagggtctacgactccggtcaatacagtaatgagattcgaattttcagacgagcctctgaagattcctcggatcttggtactaatactggctactaccctagccaagactacgccactagccatgaatatgaatctgagagccgagccttcaacacaagtcaccggaaccattga

SEQ ID NO: 81584 - protein, 718 aa, Arabidopsis thaliana
  peptide (1)..(718): Ceres Seq. ID no. 12660405
MDKVQQQADLFGKTISPFVASQPTNVGGFTDQKIIGGSETTQPPATSPPSPPSPDTQTSPPPATAAQPPPNQPPNTTPPPTPPSSPPPSITPPPSPPQPQPPPQSTPTGDSPVVIPFPKPQLPPPSLFPPPSLVNQLPDPRPNDNNILEPINNPISLPSPPSTPFSPPSQENSGSQGSPPLSSLLPPMLPLNPNSPGNPLQPLDSPLGGESNRVPSSSSSPSPPSLSGSNNHSGGSNRHNANSNGDGGTSQQSNESNYTEKTVIGIGIAGVLVILFIAGVFFVRRKQKKGSSSPRSNQYLPPANVSVNTEGFIHYRQKPGNGNSSAQNSSPDTNSLGNPKHGRGTPDSAVIGTSKIHFTYEELSQITEGFCKSFVVGEGGFGCVYKGILFEGKPVAIKQLKSVSAEGYREFKAEVEIISRVHHRHLVSLVGYCISEQHRFLIYEFVPNNTLDYHLHGKNLPVLEWSRRVRIAIGAAKGLAYLHEDCHPKIIHRDIKSSNILLDDEFEAQVADFGLARLNDTAQSHISTRVMGTFGYLAPEYASSGKLTDRSDVFSFGVVLLELITGRKPVDTSQPLGEESLVEWARPRLIEAIEKGDISEVVDPRLENDYVESEVYKMIETAASCVRHSALKRPRMVQVVRALDTRDDLSDLTNGVKVGQSRVYDSGQYSNEIRIFRRASEDSSDLGTNTGYYPSQDYATSHEYESESRAFNTSHRNH

SEQ ID NO: 81585 - protein, 531 aa, Arabidopsis thaliana
  peptide (1)..(531): Ceres Seq. ID no. 12660406
MLPLNPNSPGNPLQPLDSPLGGESNRVPSSSSSPSPPSLSGSNNHSGGSNRHNANSNGDGGTSQQSNESNYTEKTVIGIGIAGVLVILFIAGVFFVRRKQKKGSSSPRSNQYLPPANVSVNTEGFIHYRQKPGNGNSSAQNSSPDTNSLGNPKHGRGTPDSAVIGTSKIHFTYEELSQITEGFCKSFVVGEGGFGCVYKGILFEGKPVAIKQLKSVSAEGYREFKAEVEIISRVHHRHLVSLVGYCISEQHRFLIYEFVPNNTLDYHLHGKNLPVLEWSRRVRIAIGAAKGLAYLHEDCHPKIIHRDIKSSNILLDDEFEAQVADFGLARLNDTAQSHISTRVMGTFGYLAPEYASSGKLTDRSDVFSFGVVLLELITGRKPVDTSQPLGEESLVEWARPRLIEAIEKGDISEVVDPRLENDYVESEVYKMIETAASCVRHSALKRPRMVQVVRALDTRDDLSDLTNGVKVGQSRVYDSGQYSNEIRIFRRASEDSSDLGTNTGYYPSQDYATSHEYESESRAFNTSHRNH

SEQ ID NO: 81586 - DNA, 1347 bp, Arabidopsis thaliana
  misc_feature (1)..(1347): Ceres Seq. ID no. 12660411
  misc_feature (1)..(1347): Ortholog of  Ceres SEQ ID NO 13648212 as cited in SEQ ID NO 20387
  misc_feature (1)..(1347): Ortholog of  Ceres SEQ ID NO 14314471 as cited in SEQ ID NO 52369
atggcatcaagctcttgtctcaagcaagggtcagtgccaatgaacaatgtttgtgttacccctgaagcaacgtatgaggctgtggttgcagaccctaggcttttcatgacttccttggaaaggctgcactctctcttgggtactaaattcatggttccgatcataggaggaagagatttggacttgcacaagcttttcgttgaggtaacctcacgtggcggaatcaataagatacttaatgaaaggagatggaaagaagtaactgctacatttgtctttcctccaactgcaacaaacgcatcatatgttctgcgcaaatactacttctcgctgctgaacaattatgagcaaatctatttcttcagatctaatggtcagattcctccagactctatgcagagtccatctgctagaccatgctttattcagggagccattagaccttcacaagaacttcaagctctaacctttaccccacagcccaagatcaatactgcagaattcctcggaggatcacttgctggatcaaatgtggttggagtgatcgatggaaaattcgaaagtggttaccttgtaactgtaacaattggatcagagcagcttaaaggagttctgtatcagcttcttcctcagaacacagtttcttatcaaactccgcaacagagtcatggtgtcctcccgaacactctgaacatttctgccaatcctcagggggttgcaggaggagtaacaaaacgccgtaggagaagaaagaaatcagagatcaaaagacgtgatcctgatcatccaaaacccaacagaagtggttataacttctttttcgcagagcagcacgcgagacttaaaccgcttcatcctggtaaggatagggatatcagcaggatgattggtgagctatggaacaagctgaatgaagacgaaaaattgatttaccaagggaaggcaatggaggacaaagagcgatacagaactgaaatggaagattacagagagaaaaaaaagaatggacagctcataagcaacgctgttccgctgcaacagagacttccggagcaaaacgtagacatggctgaagctgaccttccaattgatgaagtcgaagaagatgacgaagaaggtgattcaagcggatcctcaggcgaaagcgagccacatgatgatcagagcatagaaactgatcctgaattggaagagccatctctgaatccctcaggtccaaacctaaaccctaatccgactgagatagtggtggctcctaaggagaaaaacggcgatgttgtgatggaaacatctccattgaagaaagccgatgagccaactgtggcggtgactgctgagcagaactga

SEQ ID NO: 81587 - protein, 448 aa, Arabidopsis thaliana
  peptide (1)..(448): Ceres Seq. ID no. 12660412
MASSSCLKQGSVPMNNVCVTPEATYEAVVADPRLFMTSLERLHSLLGTKFMVPIIGGRDLDLHKLFVEVTSRGGINKILNERRWKEVTATFVFPPTATNASYVLRKYYFSLLNNYEQIYFFRSNGQIPPDSMQSPSARPCFIQGAIRPSQELQALTFTPQPKINTAEFLGGSLAGSNVVGVIDGKFESGYLVTVTIGSEQLKGVLYQLLPQNTVSYQTPQQSHGVLPNTLNISANPQGVAGGVTKRRRRRKKSEIKRRDPDHPKPNRSGYNFFFAEQHARLKPLHPGKDRDISRMIGELWNKLNEDEKLIYQGKAMEDKERYRTEMEDYREKKKNGQLISNAVPLQQRLPEQNVDMAEADLPIDEVEEDDEEGDSSGSSGESEPHDDQSIETDPELEEPSLNPSGPNLNPNPTEIVVAPKEKNGDVVMETSPLKKADEPTVAVTAEQN

SEQ ID NO: 81588 - protein, 435 aa, Arabidopsis thaliana
  peptide (1)..(435): Ceres Seq. ID no. 12660413
MNNVCVTPEATYEAVVADPRLFMTSLERLHSLLGTKFMVPIIGGRDLDLHKLFVEVTSRGGINKILNERRWKEVTATFVFPPTATNASYVLRKYYFSLLNNYEQIYFFRSNGQIPPDSMQSPSARPCFIQGAIRPSQELQALTFTPQPKINTAEFLGGSLAGSNVVGVIDGKFESGYLVTVTIGSEQLKGVLYQLLPQNTVSYQTPQQSHGVLPNTLNISANPQGVAGGVTKRRRRRKKSEIKRRDPDHPKPNRSGYNFFFAEQHARLKPLHPGKDRDISRMIGELWNKLNEDEKLIYQGKAMEDKERYRTEMEDYREKKKNGQLISNAVPLQQRLPEQNVDMAEADLPIDEVEEDDEEGDSSGSSGESEPHDDQSIETDPELEEPSLNPSGPNLNPNPTEIVVAPKEKNGDVVMETSPLKKADEPTVAVTAEQN

SEQ ID NO: 81589 - protein, 413 aa, Arabidopsis thaliana
  peptide (1)..(413): Ceres Seq. ID no. 12660414
MTSLERLHSLLGTKFMVPIIGGRDLDLHKLFVEVTSRGGINKILNERRWKEVTATFVFPPTATNASYVLRKYYFSLLNNYEQIYFFRSNGQIPPDSMQSPSARPCFIQGAIRPSQELQALTFTPQPKINTAEFLGGSLAGSNVVGVIDGKFESGYLVTVTIGSEQLKGVLYQLLPQNTVSYQTPQQSHGVLPNTLNISANPQGVAGGVTKRRRRRKKSEIKRRDPDHPKPNRSGYNFFFAEQHARLKPLHPGKDRDISRMIGELWNKLNEDEKLIYQGKAMEDKERYRTEMEDYREKKKNGQLISNAVPLQQRLPEQNVDMAEADLPIDEVEEDDEEGDSSGSSGESEPHDDQSIETDPELEEPSLNPSGPNLNPNPTEIVVAPKEKNGDVVMETSPLKKADEPTVAVTAEQN

SEQ ID NO: 81590 - DNA, 648 bp, Arabidopsis thaliana
  misc_feature (1)..(648): Ceres Seq. ID no. 12660423
  misc_feature (1)..(648): Ortholog of  Ceres SEQ ID NO 14316436 as cited in SEQ ID NO 59213
atgaagcttgtggagaagacgactactacagagcaggacaatggagaagatttctgccgcaccatcatcgaggtttccgaggttaacagaaacgtgtttcaggctccgggcggtgaagctgatccctttcgagttgtctccggcgaagaacttcacctaattccgccgctcaacttctccatggtcgataacggtatattccggtctggattccctgattcagctaacttctcctttctccagactctcggtctccgctcaatcatatacttgtgcccggagccctacccagagagcaatctccagttccttaaatccaatggaatcaggcttttccagtttggtattgaaggcaacaaggagccatttgtgaatattccagaccataaaatccgcatggcactgaaagtgcttctagatgagaaaaaccatcctgttctgattcattgtaagcgaggcaagcatcggaccggttgtcttgttggttgcttgaggaagctccagaaatggtgtttgacatcgatattcgacgagtaccaacgatttgcagcagcgaaagctagagtttcagatcaaagattcatggagatattcgatgtttccagcttcagtcatattccaatgtcattctcttgttccatcaggtaa

SEQ ID NO: 81591 - protein, 215 aa, Arabidopsis thaliana
  peptide (1)..(215): Ceres Seq. ID no. 12660424
MKLVEKTTTTEQDNGEDFCRTIIEVSEVNRNVFQAPGGEADPFRVVSGEELHLIPPLNFSMVDNGIFRSGFPDSANFSFLQTLGLRSIIYLCPEPYPESNLQFLKSNGIRLFQFGIEGNKEPFVNIPDHKIRMALKVLLDEKNHPVLIHCKRGKHRTGCLVGCLRKLQKWCLTSIFDEYQRFAAAKARVSDQRFMEIFDVSSFSHIPMSFSCSIR

SEQ ID NO: 81592 - protein, 155 aa, Arabidopsis thaliana
  peptide (1)..(155): Ceres Seq. ID no. 12660425
MVDNGIFRSGFPDSANFSFLQTLGLRSIIYLCPEPYPESNLQFLKSNGIRLFQFGIEGNKEPFVNIPDHKIRMALKVLLDEKNHPVLIHCKRGKHRTGCLVGCLRKLQKWCLTSIFDEYQRFAAAKARVSDQRFMEIFDVSSFSHIPMSFSCSIR

SEQ ID NO: 81593 - DNA, 1205 bp, Arabidopsis thaliana
  misc_feature (1)..(1205): Ceres Seq. ID no. 12660441
  misc_feature (1)..(1205): Ortholog of  Ceres SEQ ID NO 13596198 as cited in SEQ ID NO 68488
aaacattcaaaaaaaaaaaaaaaccattttttttttcttactcaaatcttttttagtatcattctccaaatgaattggactagaggaaaaactttaggccgtggctcaacggccaccgtttccgccgccacttgtcacgaatccggcgaaacactcgccgtaaaatccgccgagtttcaccggtcggagttcttgcaaagagaagccaagattctctcctcattaaactctccgtacgtcatcggatacagaggatgcgaaattacgagagagcccttccacaacaacggagaagctacgacttacagtcttcttatggagtacgcgccgtacggaacgttgaccgacgtagcgaccaagaacggcggcttcattgacgaggctcgggtcgtgaagtacacgcgccagatacttcttgggttggagtacattcataactcaaagggaattgcgcattgcgacattaagggaagcaacgtgttggtcggagagaacggagaagccaagatcgctgatttcgggtgtgcgaaatgggttgaaccggaaataaccgaaccggttagaggaacgccggcgttcatggctccagaagcggcgcgtggagagagacaagggaaagagagtgatatatgggcggtgggttgtacggtgatagagatggttaccgggtctcagccgtggattggggcggattttaccgacccggtttcggttctttaccgggtcggatatttaggtgagttaccagagctgccttgctcgcttacggaacaagcaaaggattttttaggaaagtgtttgaaaaaagaagcgacggagagatggacagcgagtcaactactaaaccatccgttcttggttaataaagaaccggaattggtaaccggtttggttacgaactcaccgacaagtgtgacggatcaaatgttctggagatcagtggaagaggaggtgtcagaggaccgttcaagctggtgggaatgtcacgaggatgagagaattggagtgctaagctggattggtcatgttgtggtggagtccacatgggacttggacggtgaggattggatcacggttcgacggaattagtcggttcacatgaaggagcgttgattattcgattcaattagtgaagatattgttttagtttagtagaagttgaggtttagagattttcatgtacatttcctaattcatcatttttt

SEQ ID NO: 81594 - protein, 362 aa, Arabidopsis thaliana
  peptide (1)..(362): Ceres Seq. ID no. 12660442
KHSKKKKNHFFFLTQIFFSIILQMNWTRGKTLGRGSTATVSAATCHESGETLAVKSAEFHRSEFLQREAKILSSLNSPYVIGYRGCEITREPFHNNGEATTYSLLMEYAPYGTLTDVATKNGGFIDEARVVKYTRQILLGLEYIHNSKGIAHCDIKGSNVLVGENGEAKIADFGCAKWVEPEITEPVRGTPAFMAPEAARGERQGKESDIWAVGCTVIEMVTGSQPWIGADFTDPVSVLYRVGYLGELPELPCSLTEQAKDFLGKCLKKEATERWTASQLLNHPFLVNKEPELVTGLVTNSPTSVTDQMFWRSVEEEVSEDRSSWWECHEDERIGVLSWIGHVVVESTWDLDGEDWITVRRN

SEQ ID NO: 81595 - protein, 339 aa, Arabidopsis thaliana
  peptide (1)..(339): Ceres Seq. ID no. 12660443
MNWTRGKTLGRGSTATVSAATCHESGETLAVKSAEFHRSEFLQREAKILSSLNSPYVIGYRGCEITREPFHNNGEATTYSLLMEYAPYGTLTDVATKNGGFIDEARVVKYTRQILLGLEYIHNSKGIAHCDIKGSNVLVGENGEAKIADFGCAKWVEPEITEPVRGTPAFMAPEAARGERQGKESDIWAVGCTVIEMVTGSQPWIGADFTDPVSVLYRVGYLGELPELPCSLTEQAKDFLGKCLKKEATERWTASQLLNHPFLVNKEPELVTGLVTNSPTSVTDQMFWRSVEEEVSEDRSSWWECHEDERIGVLSWIGHVVVESTWDLDGEDWITVRRN

SEQ ID NO: 81596 - protein, 257 aa, Arabidopsis thaliana
  peptide (1)..(257): Ceres Seq. ID no. 12660444
MEYAPYGTLTDVATKNGGFIDEARVVKYTRQILLGLEYIHNSKGIAHCDIKGSNVLVGENGEAKIADFGCAKWVEPEITEPVRGTPAFMAPEAARGERQGKESDIWAVGCTVIEMVTGSQPWIGADFTDPVSVLYRVGYLGELPELPCSLTEQAKDFLGKCLKKEATERWTASQLLNHPFLVNKEPELVTGLVTNSPTSVTDQMFWRSVEEEVSEDRSSWWECHEDERIGVLSWIGHVVVESTWDLDGEDWITVRRN

SEQ ID NO: 81597 - DNA, 1209 bp, Arabidopsis thaliana
  misc_feature (1)..(1209): Ceres Seq. ID no. 12660445
  misc_feature (1)..(1209): Ortholog of  Ceres SEQ ID NO 14306355 as cited in SEQ ID NO 1268
  misc_feature (1)..(1209): Ortholog of  Ceres SEQ ID NO 14304202 as cited in SEQ ID NO 56346
  misc_feature (1)..(1209): Ortholog of  Ceres SEQ ID NO 14314070 as cited in SEQ ID NO 56946
  misc_feature (1)..(1209): Ortholog of  Ceres SEQ ID NO 12635446 as cited in SEQ ID NO 0
  misc_feature (1)..(1209): Ortholog of  Ceres SEQ ID NO 13624427 as cited in SEQ ID NO 0
  misc_feature (1)..(1209): Ortholog of  Ceres SEQ ID NO 14305939 as cited in SEQ ID NO 0
  misc_feature (1)..(1209): Ortholog of  Ceres SEQ ID NO 14306242 as cited in SEQ ID NO 0
atggcgaccgccgccgccaccactaccgcttccgctgccggaaccttgaccagagcctccacctaccccaacacctattccaattccaatcccaatgccgacgcctcctccatgccctccaccaacaccaccaccgtgccccaaacctcctcctcctccacctccagcaccaccaccgccaccgagtcctcctccggcaccaccgccgagtcctcctccagcaccaaatccgccaccatgtccggatccaccacccacaccacctcctccgccaccgcctcctccaccgcctccaccagcacctcctcctactccacctcctactccacctccagcaccaaaaccactaccatgaccggatccaccattagcaccaccgcctccgccgcccccacctccaccgcctccaccagcacctcctcctactccacctcctactccacctccagcaccaaaaccactaccgtgaccggatccaccattggcaccaccgcctccgccgcccccacctccacctccacctccaccgccaactcctccgccagctccaccaccaatccctcctccggctccaaacccactgccatgaccggaaccaccgccaacacctccccctccgcccccaccagctccccctccaccaccaattcctccagcaccgccgcctacacctcctccggctccaaacccaccaccgtgaccagaaccaccgccaacacctcctcctccgcctccaccagctccgcctcccccaccaattcctccaccagcacccccaccaactcctccgccggctccaaacccaccaccatgaccggaaccaccaccaatacctcctccaccaccaccaccagctccgcctccaccaccaagtcctcctccagctccgccaccaactcctcctccggctccaaaccctccaccttgtccaccaccaccgcctataccgccaccacttcctctcccaccgccgaaccctccaccaccaccgcgtccaaaccggccacgtccagcacacctccggccccacctacaatcatcgtctctaaacctcgcaggacccaccacagatccatcccccaaaacacattccacacacgaattaagcaaaaccaaagaaagaagcaaacaagtaacgcccttaagttccatctacaaggagagagagagagaaataacaataaaatgtcttctcttgtttgcttgtga

SEQ ID NO: 81598 - protein, 402 aa, Arabidopsis thaliana
  peptide (1)..(402): Ceres Seq. ID no. 12660446
MATAAATTTASAAGTLTRASTYPNTYSNSNPNADASSMPSTNTTTVPQTSSSSTSSTTTATESSSGTTAESSSSTKSATMSGSTTHTTSSATASSTASTSTSSYSTSYSTSSTKTTTMTGSTISTTASAAPTSTASTSTSSYSTSYSTSSTKTTTVTGSTIGTTASAAPTSTSTSTANSSASSTTNPSSGSKPTAMTGTTANTSPSAPTSSPSTTNSSSTAAYTSSGSKPTTVTRTTANTSSSASTSSASPTNSSTSTPTNSSAGSKPTTMTGTTTNTSSTTTTSSASTTKSSSSSATNSSSGSKPSTLSTTTAYTATTSSPTAEPSTTTASKPATSSTPPAPPTIIVSKPRRTHHRSIPQNTFHTRIKQNQRKKQTSNALKFHLQGERERNNNKMSSLVCL

SEQ ID NO: 81599 - protein, 365 aa, Arabidopsis thaliana
  peptide (1)..(365): Ceres Seq. ID no. 12660447
MPSTNTTTVPQTSSSSTSSTTTATESSSGTTAESSSSTKSATMSGSTTHTTSSATASSTASTSTSSYSTSYSTSSTKTTTMTGSTISTTASAAPTSTASTSTSSYSTSYSTSSTKTTTVTGSTIGTTASAAPTSTSTSTANSSASSTTNPSSGSKPTAMTGTTANTSPSAPTSSPSTTNSSSTAAYTSSGSKPTTVTRTTANTSSSASTSSASPTNSSTSTPTNSSAGSKPTTMTGTTTNTSSTTTTSSASTTKSSSSSATNSSSGSKPSTLSTTTAYTATTSSPTAEPSTTTASKPATSSTPPAPPTIIVSKPRRTHHRSIPQNTFHTRIKQNQRKKQTSNALKFHLQGERERNNNKMSSLVCL

SEQ ID NO: 81600 - protein, 323 aa, Arabidopsis thaliana
  peptide (1)..(323): Ceres Seq. ID no. 12660448
MSGSTTHTTSSATASSTASTSTSSYSTSYSTSSTKTTTMTGSTISTTASAAPTSTASTSTSSYSTSYSTSSTKTTTVTGSTIGTTASAAPTSTSTSTANSSASSTTNPSSGSKPTAMTGTTANTSPSAPTSSPSTTNSSSTAAYTSSGSKPTTVTRTTANTSSSASTSSASPTNSSTSTPTNSSAGSKPTTMTGTTTNTSSTTTTSSASTTKSSSSSATNSSSGSKPSTLSTTTAYTATTSSPTAEPSTTTASKPATSSTPPAPPTIIVSKPRRTHHRSIPQNTFHTRIKQNQRKKQTSNALKFHLQGERERNNNKMSSLVCL

SEQ ID NO: 81601 - DNA, 1482 bp, Arabidopsis thaliana
  misc_feature (1)..(1482): Ceres Seq. ID no. 12660455
  misc_feature (1)..(1482): Ortholog of  Ceres SEQ ID NO 14303627 as cited in SEQ ID NO 62070
  misc_feature (1)..(1482): Ortholog of  Ceres SEQ ID NO 13597546 as cited in SEQ ID NO 65017
  misc_feature (1)..(1482): Ortholog of  Ceres SEQ ID NO 15176077 as cited in SEQ ID NO 66728
  misc_feature (1)..(1482): Ortholog of  Ceres SEQ ID NO 13654353 as cited in SEQ ID NO 68318
gaaaagtctatggcggagacaacgagttggatcccagtatggtttcctctgatggtgttgggatgttttggtctgaattggttggtcaggaaggtgaatgtgtggctctatgagtccagccttggggagaacaggcactatctgccaccaggtgatttgggttggcctttcattggcaacatgttgtcttttctcagagctttcaagacttctgaccctgactccttcactcgcactttaatcaaaaggtatggacctaaaggtatatataaagcacacatgttcgggaacccaagtataatagtaacaacatcagacacttgccggcgtgtgctgacagacgatgatgcgttcaagccaggttggccaacatctacaatggaactcattggaaggaagtcattcgttggtatctctttcgaggaacacaagcgtctcaggcgtttgactgctgctccagtcaatggccatgaagccctctctacttatataccgtacattgaagaaaacgttattactgttctggacaagtggaccaaaatgggagagttcgagttcttgactcatctgcgtaagctcacctttaggatcatcatgtacatctttctcagctctgagagtgagaatgtaatggatgcattggaacgagaatatacagctcttaactatggggttcgagcaatggcagtcaatattcctggatttgcttatcatagagcactcaaggcgaggaaaacacttgtagctgcctttcagtccatagtgactgagcgcagaaatcaaaggaagcagaacattttatcaaataagaaagatatgttagacaatcttcttaatgttaaagatgaagatggaaaaactttggatgacgaagagattatcgatgttcttctgatgtatcttaatgccggtcatgaatcctctggccacaccattatgtgggctaccgtttttctacaagaacaccctgaggttctacaaagagcaaaggctgaacaagaaatgatcctgaaaagtaggcctgaaggtcaaaaaggtctatctctaaaagaaacccggaaaatggaattcttatcgcaggttgtcgatgagacacttcgagtcataacattctcactcactgcttttcgagaggcaaagactgacgttgaaatgaatggctatttgatcccaaaaggttggaaggttttgacatggtttagggatgtccacatcgaccctgaagtctttccagatccaagaaaatttgatcctgctagatgggataatggtttcgtaccaaaagctggtgcgttccttccttttggtgctggaagccatctatgcccgggaaatgatctggctaagctcgagatttcaatttttcttcatcatttcctcctcaaatatcaggtgaaacggagcaaccccgaatgtccagtgatgtatctgcctcataccagaccaactgataattgcttggcaagaattagttatcagtaa

SEQ ID NO: 81602 - protein, 493 aa, Arabidopsis thaliana
  peptide (1)..(493): Ceres Seq. ID no. 12660456
EKSMAETTSWIPVWFPLMVLGCFGLNWLVRKVNVWLYESSLGENRHYLPPGDLGWPFIGNMLSFLRAFKTSDPDSFTRTLIKRYGPKGIYKAHMFGNPSIIVTTSDTCRRVLTDDDAFKPGWPTSTMELIGRKSFVGISFEEHKRLRRLTAAPVNGHEALSTYIPYIEENVITVLDKWTKMGEFEFLTHLRKLTFRIIMYIFLSSESENVMDALEREYTALNYGVRAMAVNIPGFAYHRALKARKTLVAAFQSIVTERRNQRKQNILSNKKDMLDNLLNVKDEDGKTLDDEEIIDVLLMYLNAGHESSGHTIMWATVFLQEHPEVLQRAKAEQEMILKSRPEGQKGLSLKETRKMEFLSQVVDETLRVITFSLTAFREAKTDVEMNGYLIPKGWKVLTWFRDVHIDPEVFPDPRKFDPARWDNGFVPKAGAFLPFGAGSHLCPGNDLAKLEISIFLHHFLLKYQVKRSNPECPVMYLPHTRPTDNCLARISYQ

SEQ ID NO: 81603 - protein, 490 aa, Arabidopsis thaliana
  peptide (1)..(490): Ceres Seq. ID no. 12660457
MAETTSWIPVWFPLMVLGCFGLNWLVRKVNVWLYESSLGENRHYLPPGDLGWPFIGNMLSFLRAFKTSDPDSFTRTLIKRYGPKGIYKAHMFGNPSIIVTTSDTCRRVLTDDDAFKPGWPTSTMELIGRKSFVGISFEEHKRLRRLTAAPVNGHEALSTYIPYIEENVITVLDKWTKMGEFEFLTHLRKLTFRIIMYIFLSSESENVMDALEREYTALNYGVRAMAVNIPGFAYHRALKARKTLVAAFQSIVTERRNQRKQNILSNKKDMLDNLLNVKDEDGKTLDDEEIIDVLLMYLNAGHESSGHTIMWATVFLQEHPEVLQRAKAEQEMILKSRPEGQKGLSLKETRKMEFLSQVVDETLRVITFSLTAFREAKTDVEMNGYLIPKGWKVLTWFRDVHIDPEVFPDPRKFDPARWDNGFVPKAGAFLPFGAGSHLCPGNDLAKLEISIFLHHFLLKYQVKRSNPECPVMYLPHTRPTDNCLARISYQ

SEQ ID NO: 81604 - protein, 476 aa, Arabidopsis thaliana
  peptide (1)..(476): Ceres Seq. ID no. 12660458
MVLGCFGLNWLVRKVNVWLYESSLGENRHYLPPGDLGWPFIGNMLSFLRAFKTSDPDSFTRTLIKRYGPKGIYKAHMFGNPSIIVTTSDTCRRVLTDDDAFKPGWPTSTMELIGRKSFVGISFEEHKRLRRLTAAPVNGHEALSTYIPYIEENVITVLDKWTKMGEFEFLTHLRKLTFRIIMYIFLSSESENVMDALEREYTALNYGVRAMAVNIPGFAYHRALKARKTLVAAFQSIVTERRNQRKQNILSNKKDMLDNLLNVKDEDGKTLDDEEIIDVLLMYLNAGHESSGHTIMWATVFLQEHPEVLQRAKAEQEMILKSRPEGQKGLSLKETRKMEFLSQVVDETLRVITFSLTAFREAKTDVEMNGYLIPKGWKVLTWFRDVHIDPEVFPDPRKFDPARWDNGFVPKAGAFLPFGAGSHLCPGNDLAKLEISIFLHHFLLKYQVKRSNPECPVMYLPHTRPTDNCLARISYQ

SEQ ID NO: 81605 - DNA, 483 bp, Arabidopsis thaliana
  misc_feature (1)..(483): Ceres Seq. ID no. 12660459
  misc_feature (1)..(483): Ortholog of  Ceres SEQ ID NO 13599518 as cited in SEQ ID NO 0
atgggagctttggggaagctgatcaacatctctctgtttttcttcttcgcactgatggctatcaatgtaccgcttctcaacggtcaaatactatttcctggaatctacccgaagctcctcaccgatctgaaagactggtacagctctgagttcaacgattacctcttcatagagaagcctcttttcttcgttggactcgtctggcatgagatcatattcctattgcctctctccattgtcaacatctacgccattcttaccagcaagtcgtggtttggtaccacttctttgttgtatggagcttctttcctcacttccatggctgctatacttggagacatgataggttcagagaaggtgactaacaaattgctattggcgtatttgcctttcgtgggtcttgcaattctggcaatgcttcgtggtctggtgacttgttcgaccaaaagatcaactgttttagccaggagaaagcttgcttga

SEQ ID NO: 81606 - protein, 160 aa, Arabidopsis thaliana
  peptide (1)..(160): Ceres Seq. ID no. 12660460
MGALGKLINISLFFFFALMAINVPLLNGQILFPGIYPKLLTDLKDWYSSEFNDYLFIEKPLFFVGLVWHEIIFLLPLSIVNIYAILTSKSWFGTTSLLYGASFLTSMAAILGDMIGSEKVTNKLLLAYLPFVGLAILAMLRGLVTCSTKRSTVLARRKLA

SEQ ID NO: 81607 - protein, 142 aa, Arabidopsis thaliana
  peptide (1)..(142): Ceres Seq. ID no. 12660461
MAINVPLLNGQILFPGIYPKLLTDLKDWYSSEFNDYLFIEKPLFFVGLVWHEIIFLLPLSIVNIYAILTSKSWFGTTSLLYGASFLTSMAAILGDMIGSEKVTNKLLLAYLPFVGLAILAMLRGLVTCSTKRSTVLARRKLA

SEQ ID NO: 81608 - DNA, 1258 bp, Arabidopsis thaliana
  misc_feature (1)..(1258): Ceres Seq. ID no. 12660466
  misc_feature (1)..(1258): Ortholog of  Ceres SEQ ID NO 15175496 as cited in SEQ ID NO 56127
  misc_feature (1)..(1258): Ortholog of  Ceres SEQ ID NO 15175700 as cited in SEQ ID NO 58584
  misc_feature (1)..(1258): Ortholog of  Ceres SEQ ID NO 13598714 as cited in SEQ ID NO 62656
  misc_feature (1)..(1258): Ortholog of  Ceres SEQ ID NO 13596969 as cited in SEQ ID NO 63375
  misc_feature (1)..(1258): Ortholog of  Ceres SEQ ID NO 13597519 as cited in SEQ ID NO 64759
  misc_feature (1)..(1258): Ortholog of  Ceres SEQ ID NO 13597870 as cited in SEQ ID NO 64982
  misc_feature (1)..(1258): Ortholog of  Ceres SEQ ID NO 13656123 as cited in SEQ ID NO 65212
  misc_feature (1)..(1258): Ortholog of  Ceres SEQ ID NO 13595926 as cited in SEQ ID NO 67778
atctccaaagctcgttctcaccttacttggcaaacactcaacgaagaaaggagagagagacggtaatggcgatcaagaacattctcgcccttgtggttcttcttagcgtggttggagtttctgtcgccattccacagttgcttgacctcgactactaccggtctaagtgtcccaaggcagaggaaattgttcgtggtgtcacagtacaatatgtttctcgccagaaaacccttgccgctaaacttctaaggatgcatttccatgattgtttcgtcagaggatgtgatggttccgttcttctgaaatctgcaaagaatgatgcggaaagagacgctgtccccaacctgaccctgaaaggttatgaagtggtggatgcggccaagacagcgctggagaggaagtgtcctaatctcatttcttgcgctgatgttcttgccttggtcgccagagatgccgtggcagtgatcgggggaccatggtggccggttccattgggccgcagggatggacgcatctcgaaattgaacgatgcattgctaaatttaccatctcctttcgccgacataaagacgctgaagaagaactttgccaacaagggtcttaacgctaaagaccttgtggttctctcagggggtcacaccattggaatctctagttgcgctctcgtcaacagtcgtctctacaacttcacaggaaagggcgattctgacccatccatgaaccctagctacgtgagggaattgaagagaaagtgcccgcctacagatttcagaacctcactgaacatggacccaggcagtgcgttgacattcgacactcactacttcaaggtcgtggctcagaagaaagggctcttcacatctgactctacgcttctcgatgacattgagaccaaaaactacgttcagactcaggccattctccctcctgtgttttcttctttcaataaagatttctccgattccatggtcaaacttggtttcgtccaaattcttaccggcaaaaatggtgagatcaggaagagatgcgccttccctaactaatttggatcgatcagaccgggtttcggatgattttgagtctacacgtttttctctgcttattttctttctttttcttttttctttcacggaagtttgagctttggtgttgtcttcttctgtttcttccatgaataattgttttttgttgagtaactttacatttgtattctttacggtgactgtgttttgtaatggaaaaagtttgtttcgaattc

SEQ ID NO: 81609 - protein, 346 aa, Arabidopsis thaliana
  peptide (1)..(346): Ceres Seq. ID no. 12660467
LQSSFSPYLANTQRRKERETVMAIKNILALVVLLSVVGVSVAIPQLLDLDYYRSKCPKAEEIVRGVTVQYVSRQKTLAAKLLRMHFHDCFVRGCDGSVLLKSAKNDAERDAVPNLTLKGYEVVDAAKTALERKCPNLISCADVLALVARDAVAVIGGPWWPVPLGRRDGRISKLNDALLNLPSPFADIKTLKKNFANKGLNAKDLVVLSGGHTIGISSCALVNSRLYNFTGKGDSDPSMNPSYVRELKRKCPPTDFRTSLNMDPGSALTFDTHYFKVVAQKKGLFTSDSTLLDDIETKNYVQTQAILPPVFSSFNKDFSDSMVKLGFVQILTGKNGEIRKRCAFPN

SEQ ID NO: 81610 - protein, 325 aa, Arabidopsis thaliana
  peptide (1)..(325): Ceres Seq. ID no. 12660468
MAIKNILALVVLLSVVGVSVAIPQLLDLDYYRSKCPKAEEIVRGVTVQYVSRQKTLAAKLLRMHFHDCFVRGCDGSVLLKSAKNDAERDAVPNLTLKGYEVVDAAKTALERKCPNLISCADVLALVARDAVAVIGGPWWPVPLGRRDGRISKLNDALLNLPSPFADIKTLKKNFANKGLNAKDLVVLSGGHTIGISSCALVNSRLYNFTGKGDSDPSMNPSYVRELKRKCPPTDFRTSLNMDPGSALTFDTHYFKVVAQKKGLFTSDSTLLDDIETKNYVQTQAILPPVFSSFNKDFSDSMVKLGFVQILTGKNGEIRKRCAFPN

SEQ ID NO: 81611 - protein, 263 aa, Arabidopsis thaliana
  peptide (1)..(263): Ceres Seq. ID no. 12660469
MHFHDCFVRGCDGSVLLKSAKNDAERDAVPNLTLKGYEVVDAAKTALERKCPNLISCADVLALVARDAVAVIGGPWWPVPLGRRDGRISKLNDALLNLPSPFADIKTLKKNFANKGLNAKDLVVLSGGHTIGISSCALVNSRLYNFTGKGDSDPSMNPSYVRELKRKCPPTDFRTSLNMDPGSALTFDTHYFKVVAQKKGLFTSDSTLLDDIETKNYVQTQAILPPVFSSFNKDFSDSMVKLGFVQILTGKNGEIRKRCAFPN

SEQ ID NO: 81612 - DNA, 1083 bp, Arabidopsis thaliana
  misc_feature (1)..(1083): Ceres Seq. ID no. 12660473
  misc_feature (1)..(1083): Ortholog of  Ceres SEQ ID NO 15168537 as cited in SEQ ID NO 57100
  misc_feature (1)..(1083): Ortholog of  Ceres SEQ ID NO 15178681 as cited in SEQ ID NO 63192
  misc_feature (1)..(1083): Ortholog of  Ceres SEQ ID NO 13579918 as cited in SEQ ID NO 64644
  misc_feature (1)..(1083): Ortholog of  Ceres SEQ ID NO 13654122 as cited in SEQ ID NO 68192
atgagaatcacacaaaacgtcaagctcttactcttcttcttcttcttcatctccttcctcttcatcgccgtatccgccggcgagtctaaatgcgagtgttcacacgaagacgacgaggcaaacaaagccggagcaaaaaaatacaagatcgccgcaattccttccgttctggccgccggagttatcggcgttatgtttccgttactaggcaagttcttcccgtcgcttaaaccggagacgactttcttcttcgtgacgaaagccttcgccgccggcgtaatcctcgcaacggggtttatgcatgtgttgcctgaaggttacgagaagctgacgtcaccgtgtctgaaaggagaagcctgggagtttccgttcacaggctttatcgcgatggtcgctgcgattttgactctttccgttgactcttttgccacgtcgtatttccataaagcgcattttaaaacgtctaagaggattggtgacggtgaggaacaagacgctggcggtggcggtggcggtggagacgagctcgggttgcacgtgcatgctcacggtcacacgcacgggattgttggcgtggaatctggtgaatcccaggttcagcttcaccggactcgagttgttgcacaggtgttggaagtgggaataatagtacattcagtggtaataggaatatcactgggagcatcacaaagtccagacactgccaaagctctctttgctgctttaatgtttcatcaatgcttcgagggtcttggtcttggtggttgcatcgcccagggaaatttcaattgtatgtcaattacaataatgtcgatctttttctctgtaacgacgccggtaggaatcgcggttggaatggcaatttcaagctcttatgatgattcgagtccaacggctctgatcgtacagggagtccttaacgctgcatctgcaggcatcctcatctatatgtctctagtggactttctcgcagcagattttatgcaccctaagatgcagtctaacactagacttcaaatcatggctcatatctctcttcttgttggagcaggggttatgtcacttttagctaaatgggcttaa

SEQ ID NO: 81613 - protein, 360 aa, Arabidopsis thaliana
  peptide (1)..(360): Ceres Seq. ID no. 12660474
MRITQNVKLLLFFFFFISFLFIAVSAGESKCECSHEDDEANKAGAKKYKIAAIPSVLAAGVIGVMFPLLGKFFPSLKPETTFFFVTKAFAAGVILATGFMHVLPEGYEKLTSPCLKGEAWEFPFTGFIAMVAAILTLSVDSFATSYFHKAHFKTSKRIGDGEEQDAGGGGGGGDELGLHVHAHGHTHGIVGVESGESQVQLHRTRVVAQVLEVGIIVHSVVIGISLGASQSPDTAKALFAALMFHQCFEGLGLGGCIAQGNFNCMSITIMSIFFSVTTPVGIAVGMAISSSYDDSSPTALIVQGVLNAASAGILIYMSLVDFLAADFMHPKMQSNTRLQIMAHISLLVGAGVMSLLAKWA

SEQ ID NO: 81614 - protein, 296 aa, Arabidopsis thaliana
  peptide (1)..(296): Ceres Seq. ID no. 12660475
MFPLLGKFFPSLKPETTFFFVTKAFAAGVILATGFMHVLPEGYEKLTSPCLKGEAWEFPFTGFIAMVAAILTLSVDSFATSYFHKAHFKTSKRIGDGEEQDAGGGGGGGDELGLHVHAHGHTHGIVGVESGESQVQLHRTRVVAQVLEVGIIVHSVVIGISLGASQSPDTAKALFAALMFHQCFEGLGLGGCIAQGNFNCMSITIMSIFFSVTTPVGIAVGMAISSSYDDSSPTALIVQGVLNAASAGILIYMSLVDFLAADFMHPKMQSNTRLQIMAHISLLVGAGVMSLLAKWA

SEQ ID NO: 81615 - protein, 261 aa, Arabidopsis thaliana
  peptide (1)..(261): Ceres Seq. ID no. 12660476
MHVLPEGYEKLTSPCLKGEAWEFPFTGFIAMVAAILTLSVDSFATSYFHKAHFKTSKRIGDGEEQDAGGGGGGGDELGLHVHAHGHTHGIVGVESGESQVQLHRTRVVAQVLEVGIIVHSVVIGISLGASQSPDTAKALFAALMFHQCFEGLGLGGCIAQGNFNCMSITIMSIFFSVTTPVGIAVGMAISSSYDDSSPTALIVQGVLNAASAGILIYMSLVDFLAADFMHPKMQSNTRLQIMAHISLLVGAGVMSLLAKWA

SEQ ID NO: 81616 - DNA, 740 bp, Arabidopsis thaliana
  misc_feature (1)..(740): Ceres Seq. ID no. 12660485
  misc_feature (1)..(740): Ortholog of  Ceres SEQ ID NO 14315395 as cited in SEQ ID NO 57468
  misc_feature (1)..(740): Ortholog of  Ceres SEQ ID NO 13661770 as cited in SEQ ID NO 61446
aactagaaccatcctctttttcatctatatctgattctgaggttcctgttgttatcagacagaaagattcatgggtttccttgtagccgtcatgaacttttctcctactttggtgcatcaccatatgaaatcgaagccacaatgtcaaaatgaaaagcttcgtcaaggccaaacatcatctttgtttgatcgtcgtggtttcttgaaatgtgttgttggtgcttcttcgttcatggccacaattgagttttctggattacaagctcaggcgtcagaggaaaagttagacgaaggagaaggagttgttggtgctttcaagactttgtttgatcctaatgagagaacaaagtctggcaaagagttaccaaaagcttacttgaaatctgcaagagaggttgtcaaaaccatgagggagtcattgaaagagaaccctaaagacaatgctaagttcagaagaagtgctgatgctgctaaagaatccattcgtgattatctgagcaattggagaggacaaaagactgttgccggagaagaatcatacgtggagctggagaatgtaatccgcgctttggcgaaattttactcaaaggcaggtccttctgcaccacttcctgatgaggttaagactgagattttggatgatcttaacaaggctgaagagtttttgtgacatttttgctgtaacatgtttcacccatgttatacatatcaaagtattgaaagcaatagaagaacgcttg

SEQ ID NO: 81617 - protein, 199 aa, Arabidopsis thaliana
  peptide (1)..(199): Ceres Seq. ID no. 12660486
MGFLVAVMNFSPTLVHHHMKSKPQCQNEKLRQGQTSSLFDRRGFLKCVVGASSFMATIEFSGLQAQASEEKLDEGEGVVGAFKTLFDPNERTKSGKELPKAYLKSAREVVKTMRESLKENPKDNAKFRRSADAAKESIRDYLSNWRGQKTVAGEESYVELENVIRALAKFYSKAGPSAPLPDEVKTEILDDLNKAEEFL

SEQ ID NO: 81618 - protein, 192 aa, Arabidopsis thaliana
  peptide (1)..(192): Ceres Seq. ID no. 12660487
MNFSPTLVHHHMKSKPQCQNEKLRQGQTSSLFDRRGFLKCVVGASSFMATIEFSGLQAQASEEKLDEGEGVVGAFKTLFDPNERTKSGKELPKAYLKSAREVVKTMRESLKENPKDNAKFRRSADAAKESIRDYLSNWRGQKTVAGEESYVELENVIRALAKFYSKAGPSAPLPDEVKTEILDDLNKAEEFL

SEQ ID NO: 81619 - protein, 181 aa, Arabidopsis thaliana
  peptide (1)..(181): Ceres Seq. ID no. 12660488
MKSKPQCQNEKLRQGQTSSLFDRRGFLKCVVGASSFMATIEFSGLQAQASEEKLDEGEGVVGAFKTLFDPNERTKSGKELPKAYLKSAREVVKTMRESLKENPKDNAKFRRSADAAKESIRDYLSNWRGQKTVAGEESYVELENVIRALAKFYSKAGPSAPLPDEVKTEILDDLNKAEEFL

SEQ ID NO: 81620 - DNA, 916 bp, Arabidopsis thaliana
  misc_feature (1)..(916): Ceres Seq. ID no. 12660500
  misc_feature (1)..(916): Ortholog of  Ceres SEQ ID NO 14306264 as cited in SEQ ID NO 1386
  misc_feature (1)..(916): Ortholog of  Ceres SEQ ID NO 13600592 as cited in SEQ ID NO 1398
  misc_feature (1)..(916): Ortholog of  Ceres SEQ ID NO 15179159 as cited in SEQ ID NO 0
ataagaatcagacagaagttgcagagaaaagagaattaattgattggtgtaatggagaaggcagttcatttatccaccaaaaatggacccaaggttccaggagagccaacgaagaccggaacctccatggttgacacggcagcttcagccgtacaaagcttcgctccgattaaccaaatccaccaacatctctgcgcgtttcatttctatgcatatgacatgacccgacaagtggaggcacaccatttctgtggtcacatcaacgaagacatgcgccagtgtctgatctacgacggtcctgatgccaacgctcgtctgatcggtctggagtacattgtgacagagaagctctttatgacattgcctgacgatgagaagaagctttggcacactcacgagtgggaagttaaaggaggcttcttgttcatgcccggtgttcccgaagctattcaacggcaagatctcgaaaaagtcgccaagacttatgggaaagtttaccatttctggcaagtcgatttggggcatcagcttcccattggcttgcctaatatcatgatggctgttactcgagacggacaactttatccggaaatgatcaaggagacggaaaagcaatttggagtatcgatagacaaggagcgagagtcaagggcttatatgaagggtccagaccatgggatccatcccttggcaaatggaggaggcaaaggcctgaagttggagttgcgagaggttgacataaagccggttgagtccgttccaagagtcttcgtttaagttatacttaaatagacaacttaagaagaataaataaataagcgatcgagcttttcttttgtatagccctcctcgaatcatgtgtataagatgtaaaatacacttgaagtagtatattatggtgtcgtctagtggtttt

SEQ ID NO: 81621 - protein, 241 aa, Arabidopsis thaliana
  peptide (1)..(241): Ceres Seq. ID no. 12660501
MEKAVHLSTKNGPKVPGEPTKTGTSMVDTAASAVQSFAPINQIHQHLCAFHFYAYDMTRQVEAHHFCGHINEDMRQCLIYDGPDANARLIGLEYIVTEKLFMTLPDDEKKLWHTHEWEVKGGFLFMPGVPEAIQRQDLEKVAKTYGKVYHFWQVDLGHQLPIGLPNIMMAVTRDGQLYPEMIKETEKQFGVSIDKERESRAYMKGPDHGIHPLANGGGKGLKLELREVDIKPVESVPRVFV

SEQ ID NO: 81622 - protein, 216 aa, Arabidopsis thaliana
  peptide (1)..(216): Ceres Seq. ID no. 12660502
MVDTAASAVQSFAPINQIHQHLCAFHFYAYDMTRQVEAHHFCGHINEDMRQCLIYDGPDANARLIGLEYIVTEKLFMTLPDDEKKLWHTHEWEVKGGFLFMPGVPEAIQRQDLEKVAKTYGKVYHFWQVDLGHQLPIGLPNIMMAVTRDGQLYPEMIKETEKQFGVSIDKERESRAYMKGPDHGIHPLANGGGKGLKLELREVDIKPVESVPRVFV

SEQ ID NO: 81623 - protein, 185 aa, Arabidopsis thaliana
  peptide (1)..(185): Ceres Seq. ID no. 12660503
MTRQVEAHHFCGHINEDMRQCLIYDGPDANARLIGLEYIVTEKLFMTLPDDEKKLWHTHEWEVKGGFLFMPGVPEAIQRQDLEKVAKTYGKVYHFWQVDLGHQLPIGLPNIMMAVTRDGQLYPEMIKETEKQFGVSIDKERESRAYMKGPDHGIHPLANGGGKGLKLELREVDIKPVESVPRVFV

SEQ ID NO: 81624 - DNA, 1368 bp, Arabidopsis thaliana
  misc_feature (1)..(1368): Ceres Seq. ID no. 12660508
  misc_feature (1)..(1368): Ortholog of  Ceres SEQ ID NO 13594345 as cited in SEQ ID NO 58043
  misc_feature (1)..(1368): Ortholog of  Ceres SEQ ID NO 14302832 as cited in SEQ ID NO 64926
  misc_feature (1)..(1368): Ortholog of  Ceres SEQ ID NO 13662880 as cited in SEQ ID NO 65422
  misc_feature (1)..(1368): Ortholog of  Ceres SEQ ID NO 12779098 as cited in SEQ ID NO 67698
  misc_feature (1)..(1368): Ortholog of  Ceres SEQ ID NO 13596180 as cited in SEQ ID NO 67941
  misc_feature (1)..(1368): Ortholog of  Ceres SEQ ID NO 13591190 as cited in SEQ ID NO 68044
  misc_feature (1)..(1368): Ortholog of  Ceres SEQ ID NO 13596089 as cited in SEQ ID NO 68373
atggcgcaaccgcattttctactggtaacgtttccggcgcaaggtcacgtgaacccatctctccgttttgctcgtcggctcatcaaaacaactggcgcacgtgtaactttcgccacgtgtctctctgtcattcaccgctctatgatcccaaaccacaacaacgtcgaaaatctctctttccttactttctccgacggattcgacgacggagtcatctccaacaccgacgacgtccaaaaccggttggtacacttcgaacgtaatggcgataaagctctatcggatttcatcgaagctaatcagaatggtgactctcccgtaagttgcttgatctacacgattcttcccaactgggttccaaaagtggcgcgtagatttcatcttccctctgttcatctctggatccaaccagccttcgctttcgacatttattacaattactctacaggaaacaactccgttttcgagttcccgaatctaccttctctcgaaatccgcgatctgccttctttcctctcaccttccaacacgaacaaagccgcacaagcagtatatcaagaactgatggattttctcaaagaagaatctaacccgaaaattctcgtcaacacattcgattcgctggagccagagttcttaacagctattccgaatatagaaatggtggcagttggtcctttacttcctgcggagattttcactggaagcgaatcaggtaaagatttatcaagagatcatcaaagtagtagttatacactttggttagactcgaaaacagagtcctctgttatttatgtttcttttggaacaatggttgagttgtcgaagaaacagatagaggaactagcgagagcactcatagaagggggaagaccgttcttgtgggttataactgataaactcaacagagaagcgaaaatagaaggagaagaagagacagagattgagaagatagctggttttagacacgagcttgaagaggttgggatgattgtctcgtggtgttcgcagatagaggttttgagacaccgagccataggttgttttttgactcattgtgggtggagctcatcactggagagtttggttctcggcgttccagtggtggcgtttccgatgtggtcggatcagccagcaaatgcgaagcttttggaagaaatatggaagacaggtgtgagggtgagagagaactcggaaggtttagtagagagaggagagataatgcggtgtttggaagcagtgatggaggcgaaatcggtggagctgagggaaaacgcagagaaatggaagcgtttagcgactgaagcgggtagagaaggaggatcttcggacaagaatgtggaagcttttgtgaagagtctgttttga

SEQ ID NO: 81625 - protein, 455 aa, Arabidopsis thaliana
  peptide (1)..(455): Ceres Seq. ID no. 12660509
MAQPHFLLVTFPAQGHVNPSLRFARRLIKTTGARVTFATCLSVIHRSMIPNHNNVENLSFLTFSDGFDDGVISNTDDVQNRLVHFERNGDKALSDFIEANQNGDSPVSCLIYTILPNWVPKVARRFHLPSVHLWIQPAFAFDIYYNYSTGNNSVFEFPNLPSLEIRDLPSFLSPSNTNKAAQAVYQELMDFLKEESNPKILVNTFDSLEPEFLTAIPNIEMVAVGPLLPAEIFTGSESGKDLSRDHQSSSYTLWLDSKTESSVIYVSFGTMVELSKKQIEELARALIEGGRPFLWVITDKLNREAKIEGEEETEIEKIAGFRHELEEVGMIVSWCSQIEVLRHRAIGCFLTHCGWSSSLESLVLGVPVVAFPMWSDQPANAKLLEEIWKTGVRVRENSEGLVERGEIMRCLEAVMEAKSVELRENAEKWKRLATEAGREGGSSDKNVEAFVKSLF

SEQ ID NO: 81626 - protein, 408 aa, Arabidopsis thaliana
  peptide (1)..(408): Ceres Seq. ID no. 12660510
MIPNHNNVENLSFLTFSDGFDDGVISNTDDVQNRLVHFERNGDKALSDFIEANQNGDSPVSCLIYTILPNWVPKVARRFHLPSVHLWIQPAFAFDIYYNYSTGNNSVFEFPNLPSLEIRDLPSFLSPSNTNKAAQAVYQELMDFLKEESNPKILVNTFDSLEPEFLTAIPNIEMVAVGPLLPAEIFTGSESGKDLSRDHQSSSYTLWLDSKTESSVIYVSFGTMVELSKKQIEELARALIEGGRPFLWVITDKLNREAKIEGEEETEIEKIAGFRHELEEVGMIVSWCSQIEVLRHRAIGCFLTHCGWSSSLESLVLGVPVVAFPMWSDQPANAKLLEEIWKTGVRVRENSEGLVERGEIMRCLEAVMEAKSVELRENAEKWKRLATEAGREGGSSDKNVEAFVKSLF

SEQ ID NO: 81627 - protein, 267 aa, Arabidopsis thaliana
  peptide (1)..(267): Ceres Seq. ID no. 12660511
MDFLKEESNPKILVNTFDSLEPEFLTAIPNIEMVAVGPLLPAEIFTGSESGKDLSRDHQSSSYTLWLDSKTESSVIYVSFGTMVELSKKQIEELARALIEGGRPFLWVITDKLNREAKIEGEEETEIEKIAGFRHELEEVGMIVSWCSQIEVLRHRAIGCFLTHCGWSSSLESLVLGVPVVAFPMWSDQPANAKLLEEIWKTGVRVRENSEGLVERGEIMRCLEAVMEAKSVELRENAEKWKRLATEAGREGGSSDKNVEAFVKSLF

SEQ ID NO: 81628 - DNA, 1443 bp, Arabidopsis thaliana
  misc_feature (1)..(1443): Ceres Seq. ID no. 12660539
  misc_feature (1)..(1443): Ortholog of  Ceres SEQ ID NO 14308221 as cited in SEQ ID NO 60363
atgcagatttcttcttcttcttttattaccaaatttaccaatctccatatggtaagatcgactagtgatcatcatcaatggagacataactataacttgaagcagcttttcattccaaacctctctgtttcaaactctcagcaccttcctttgaaccagagtgttgcggccattgtgttcggaggaggatcagattctgagctttatccacttaccaaaacaagatccaaaggagcaatccctattgcagcaaactatagacttattgatgcagtcatcagtaattgcatcaacagtggcatcaccaagatctatgcaatcactcagtttaattccacttctctcaattcacatctctccaaagcttacagtggatttggactcggaaaagacagattcgttgaagtcattgccgcttatcagagcctagaagatcaaggatggtttcagggaactgctgatgcgataagaagatgcttgtgggtatttgaagagtttccagttacagagttcttggttcttcctgggcatcatctatacaaaatggattataagatgctaatcgaagatcatagaagaagcagagcggatataaccattgttggactaagctctgttacagaccatgactttggtttcggtttcatggaagttgattccacaaatgctgtcactagattcactatcaagggtcaacaagatttaatctctgtggcgaacagaacagcgacaagaagtgatggaacgtcttcttgctctgtcccaagcgcaggaatttacgtgatcggtcgagaacagatggtgaagcttctgagagaatgtttaataaaatcgaaagacttggccagcgaaatcattcctggtgcgatctctgaaggaatgaaggtgaaagctcatatgtttgatggatattgggaagatgtgaggagcattggagcttactatagagctaacatggagagtattaagaggtgtagattggatctcaaattctacgacagacaatgtcctctgtacacaatgcctcggtgtttgcctccaagctccatgagtgtagctgtaataaccaacagtattatcggagacgggtgcattctagataaatgtgtcatcagaggatcggtggttggaatgagaacaagaatcgctgatgaagtgattgtagaggattcgatcattgtcggttctgatatttatgagatggaagaagatgtgagaagaaaagggaaggagaagaagatagagattcgaatagggatcggtgaaaagagtcgaataagacgagccattgttgataaaaatgccaggattggtaaaaacgttatgataatcaacagagacaatgttgaagaaggaaaccgagaagctcaaggatacgtaataagagaaggaatcattatcatacttcgaaacgcagtgatcccgaacgactccatcctctga

SEQ ID NO: 81629 - protein, 480 aa, Arabidopsis thaliana
  peptide (1)..(480): Ceres Seq. ID no. 12660540
MQISSSSFITKFTNLHMVRSTSDHHQWRHNYNLKQLFIPNLSVSNSQHLPLNQSVAAIVFGGGSDSELYPLTKTRSKGAIPIAANYRLIDAVISNCINSGITKIYAITQFNSTSLNSHLSKAYSGFGLGKDRFVEVIAAYQSLEDQGWFQGTADAIRRCLWVFEEFPVTEFLVLPGHHLYKMDYKMLIEDHRRSRADITIVGLSSVTDHDFGFGFMEVDSTNAVTRFTIKGQQDLISVANRTATRSDGTSSCSVPSAGIYVIGREQMVKLLRECLIKSKDLASEIIPGAISEGMKVKAHMFDGYWEDVRSIGAYYRANMESIKRCRLDLKFYDRQCPLYTMPRCLPPSSMSVAVITNSIIGDGCILDKCVIRGSVVGMRTRIADEVIVEDSIIVGSDIYEMEEDVRRKGKEKKIEIRIGIGEKSRIRRAIVDKNARIGKNVMIINRDNVEEGNREAQGYVIREGIIIILRNAVIPNDSIL

SEQ ID NO: 81630 - protein, 464 aa, Arabidopsis thaliana
  peptide (1)..(464): Ceres Seq. ID no. 12660541
MVRSTSDHHQWRHNYNLKQLFIPNLSVSNSQHLPLNQSVAAIVFGGGSDSELYPLTKTRSKGAIPIAANYRLIDAVISNCINSGITKIYAITQFNSTSLNSHLSKAYSGFGLGKDRFVEVIAAYQSLEDQGWFQGTADAIRRCLWVFEEFPVTEFLVLPGHHLYKMDYKMLIEDHRRSRADITIVGLSSVTDHDFGFGFMEVDSTNAVTRFTIKGQQDLISVANRTATRSDGTSSCSVPSAGIYVIGREQMVKLLRECLIKSKDLASEIIPGAISEGMKVKAHMFDGYWEDVRSIGAYYRANMESIKRCRLDLKFYDRQCPLYTMPRCLPPSSMSVAVITNSIIGDGCILDKCVIRGSVVGMRTRIADEVIVEDSIIVGSDIYEMEEDVRRKGKEKKIEIRIGIGEKSRIRRAIVDKNARIGKNVMIINRDNVEEGNREAQGYVIREGIIIILRNAVIPNDSIL

SEQ ID NO: 81631 - protein, 299 aa, Arabidopsis thaliana
  peptide (1)..(299): Ceres Seq. ID no. 12660542
MDYKMLIEDHRRSRADITIVGLSSVTDHDFGFGFMEVDSTNAVTRFTIKGQQDLISVANRTATRSDGTSSCSVPSAGIYVIGREQMVKLLRECLIKSKDLASEIIPGAISEGMKVKAHMFDGYWEDVRSIGAYYRANMESIKRCRLDLKFYDRQCPLYTMPRCLPPSSMSVAVITNSIIGDGCILDKCVIRGSVVGMRTRIADEVIVEDSIIVGSDIYEMEEDVRRKGKEKKIEIRIGIGEKSRIRRAIVDKNARIGKNVMIINRDNVEEGNREAQGYVIREGIIIILRNAVIPNDSIL

SEQ ID NO: 81632 - DNA, 2532 bp, Arabidopsis thaliana
  misc_feature (1)..(2532): Ceres Seq. ID no. 12660561
  misc_feature (1)..(2532): Ortholog of  Ceres SEQ ID NO 13654989 as cited in SEQ ID NO 63117
  misc_feature (1)..(2532): Ortholog of  Ceres SEQ ID NO 13584744 as cited in SEQ ID NO 69137
atggaagagtttcgttttctctatttgatatattcagcagcatttgcattgtgtctcgtcgtttctgttcttgctcaagaccaatcaggtttcataagcatcgattgtggaattccaagtggatcatcgtacaaagacgacacaacaggtataaactacgtctcagattcatcctttgtcgaaaccggagtctccaaatcgatccctttcacagctcaaagacagcttcaaaacctgaggagctttcccgaaggttcaagaaactgctatacattgattccaatacaagggaagggcaagaaatatctcataagagctagtttcatgtacggtaactacgatggagaaaatggttcaccggagtttgatctgtttcttggtggcaatatttgggataccgtcttgctcagcaatgggtcgagcattgtttccaaagaagtcgtttacttgagccaatctgagaacatatttgtgtgtttgggaaacaaaggcaaaggaactccatttatctcgactttagagcttaggtttctcgggaacgacaatacgacatatgattctccaaacggtgctctcttcttctctagacgctgggacttacgctctctcatgggttcacctgttagatatgatgatgatgtgtacgacagaatctggatacctcgcaactttggctattgtagagagatcaatacctcactccccgtgacctcagacaataatagttatagtctttcaagtttggtgatgagcacagcgatgactccaataaacacaacaagacccatcacaatgactttggaaaacagtgatccaaatgtcaggtactttgtctacatgcacttcgcagaggttgaagatcttagtctcaaaccgaaccagacaagagagttcgacatcagcattaacggagtgacagttgctgctggattcagccccaagtatcttcagacaaacacgttttttctaaaccctgagagccaatcgaaaattgcgttttcactcgttcgaaccccaaagtccactcttccgccaattgttaacgctctagagatctacgtcgcaaatagtttctcgcagtctctcactaaccaagaggatggtgacgcggttacgagtctaaagacgagttataaagtgaagaagaactggcacggagatccttgtttgcctaatgactacatttgggagggccttaattgcagttatgatagtcttactcctccaagaatcacatcactgaacttatcatcaagcgggttaacgggtcatatatcttcctccttctctaacctcacaatgattcaagagctagacttatcaaacaatggcttaaccggagacattccggagttcctctcaaaactgaagttcttgagggttttaaatctagaaaataacactcttaccggttcagttccatccgagttattagaaagatcaaacaccggatcattctcgctaaggctaggagaaaatccaggactctgtactgagatttcttgcagaaaaagcaacagcaaaaaactcgttatcccgcttgtcgcatcatttgcagcattgttcatcctcttgttattgtctggtgtgttttggagaatcagaaaccggagaaacaatccaatggcgaaatcggagaacaaattactgtttacctttgcagacgttataaagatgacaaataacttcggtcaagtcctcggcaaaggagggtttggaacagtctaccatggcttctatgacaaccttcaagtagctgttaaacttttatcagaaacatcagctcaaggattcaaagagtttcgctctgaggtcgaagttcttgtgagggttcatcatgttaacctcactgcgctgatcggttatttccatgaaggtgaccaaatgggattgatctatgagttcatggctaacggcaacatggcggatcatctcgcgggaaagtatcagcacacattgagctggagacaaaggcttcagattgcacttgatgcagcacaagggcttgagtatcttcactgtggatgcaaacctccaatagtccacagagatgtgaagacttcaaacatattgttgaacgagaaaaacagagcaaagcttgcagatttcggactctcacggagttttcatacagagagtcgttctcacgtatccaccctagtcgctggaactcccggatatctcgatccgctatgctttgagacaaatgggctaaacgagaagagtgacatttacagctttggagttgttctgttggagatgattacaggcaaaaccgtgatcaaagagtcacaaacgaaacgtgttcatgtgagtgattgggtgatatcgatcttgaggtctacgaatgatgtgaacaatgttatagattcaaagatggcgaaagattttgatgtaaactctgtatggaaagttgtggagcttgcattatcctctgtttcgcagaacgtctctgataggccaaacatgccacatattgttagaggattgaatgagtgtcttcaaagagaagagagtaacaagaactattga

SEQ ID NO: 81633 - protein, 843 aa, Arabidopsis thaliana
  peptide (1)..(843): Ceres Seq. ID no. 12660562
MEEFRFLYLIYSAAFALCLVVSVLAQDQSGFISIDCGIPSGSSYKDDTTGINYVSDSSFVETGVSKSIPFTAQRQLQNLRSFPEGSRNCYTLIPIQGKGKKYLIRASFMYGNYDGENGSPEFDLFLGGNIWDTVLLSNGSSIVSKEVVYLSQSENIFVCLGNKGKGTPFISTLELRFLGNDNTTYDSPNGALFFSRRWDLRSLMGSPVRYDDDVYDRIWIPRNFGYCREINTSLPVTSDNNSYSLSSLVMSTAMTPINTTRPITMTLENSDPNVRYFVYMHFAEVEDLSLKPNQTREFDISINGVTVAAGFSPKYLQTNTFFLNPESQSKIAFSLVRTPKSTLPPIVNALEIYVANSFSQSLTNQEDGDAVTSLKTSYKVKKNWHGDPCLPNDYIWEGLNCSYDSLTPPRITSLNLSSSGLTGHISSSFSNLTMIQELDLSNNGLTGDIPEFLSKLKFLRVLNLENNTLTGSVPSELLERSNTGSFSLRLGENPGLCTEISCRKSNSKKLVIPLVASFAALFILLLLSGVFWRIRNRRNNPMAKSENKLLFTFADVIKMTNNFGQVLGKGGFGTVYHGFYDNLQVAVKLLSETSAQGFKEFRSEVEVLVRVHHVNLTALIGYFHEGDQMGLIYEFMANGNMADHLAGKYQHTLSWRQRLQIALDAAQGLEYLHCGCKPPIVHRDVKTSNILLNEKNRAKLADFGLSRSFHTESRSHVSTLVAGTPGYLDPLCFETNGLNEKSDIYSFGVVLLEMITGKTVIKESQTKRVHVSDWVISILRSTNDVNNVIDSKMAKDFDVNSVWKVVELALSSVSQNVSDRPNMPHIVRGLNECLQREESNKNY

SEQ ID NO: 81634 - protein, 735 aa, Arabidopsis thaliana
  peptide (1)..(735): Ceres Seq. ID no. 12660563
MYGNYDGENGSPEFDLFLGGNIWDTVLLSNGSSIVSKEVVYLSQSENIFVCLGNKGKGTPFISTLELRFLGNDNTTYDSPNGALFFSRRWDLRSLMGSPVRYDDDVYDRIWIPRNFGYCREINTSLPVTSDNNSYSLSSLVMSTAMTPINTTRPITMTLENSDPNVRYFVYMHFAEVEDLSLKPNQTREFDISINGVTVAAGFSPKYLQTNTFFLNPESQSKIAFSLVRTPKSTLPPIVNALEIYVANSFSQSLTNQEDGDAVTSLKTSYKVKKNWHGDPCLPNDYIWEGLNCSYDSLTPPRITSLNLSSSGLTGHISSSFSNLTMIQELDLSNNGLTGDIPEFLSKLKFLRVLNLENNTLTGSVPSELLERSNTGSFSLRLGENPGLCTEISCRKSNSKKLVIPLVASFAALFILLLLSGVFWRIRNRRNNPMAKSENKLLFTFADVIKMTNNFGQVLGKGGFGTVYHGFYDNLQVAVKLLSETSAQGFKEFRSEVEVLVRVHHVNLTALIGYFHEGDQMGLIYEFMANGNMADHLAGKYQHTLSWRQRLQIALDAAQGLEYLHCGCKPPIVHRDVKTSNILLNEKNRAKLADFGLSRSFHTESRSHVSTLVAGTPGYLDPLCFETNGLNEKSDIYSFGVVLLEMITGKTVIKESQTKRVHVSDWVISILRSTNDVNNVIDSKMAKDFDVNSVWKVVELALSSVSQNVSDRPNMPHIVRGLNECLQREESNKNY

SEQ ID NO: 81635 - protein, 640 aa, Arabidopsis thaliana
  peptide (1)..(640): Ceres Seq. ID no. 12660564
MGSPVRYDDDVYDRIWIPRNFGYCREINTSLPVTSDNNSYSLSSLVMSTAMTPINTTRPITMTLENSDPNVRYFVYMHFAEVEDLSLKPNQTREFDISINGVTVAAGFSPKYLQTNTFFLNPESQSKIAFSLVRTPKSTLPPIVNALEIYVANSFSQSLTNQEDGDAVTSLKTSYKVKKNWHGDPCLPNDYIWEGLNCSYDSLTPPRITSLNLSSSGLTGHISSSFSNLTMIQELDLSNNGLTGDIPEFLSKLKFLRVLNLENNTLTGSVPSELLERSNTGSFSLRLGENPGLCTEISCRKSNSKKLVIPLVASFAALFILLLLSGVFWRIRNRRNNPMAKSENKLLFTFADVIKMTNNFGQVLGKGGFGTVYHGFYDNLQVAVKLLSETSAQGFKEFRSEVEVLVRVHHVNLTALIGYFHEGDQMGLIYEFMANGNMADHLAGKYQHTLSWRQRLQIALDAAQGLEYLHCGCKPPIVHRDVKTSNILLNEKNRAKLADFGLSRSFHTESRSHVSTLVAGTPGYLDPLCFETNGLNEKSDIYSFGVVLLEMITGKTVIKESQTKRVHVSDWVISILRSTNDVNNVIDSKMAKDFDVNSVWKVVELALSSVSQNVSDRPNMPHIVRGLNECLQREESNKNY

SEQ ID NO: 81636 - DNA, 3942 bp, Arabidopsis thaliana
  misc_feature (1)..(3942): Ceres Seq. ID no. 12660588
  misc_feature (1)..(3942): Ortholog of  Ceres SEQ ID NO 13595870 as cited in SEQ ID NO 62101
  misc_feature (1)..(3942): Ortholog of  Ceres SEQ ID NO 13590241 as cited in SEQ ID NO 63878
aaaaaacgttcgaagaggaaaaaaaaaaaagagggagaagagcaacgaagacggacctgcaaattctgcagtctccactgacactttcgatctttctctctgtccactttcttcaatcctcagttgtttatggaaggagataaccatcagaggtagcatttatccatgcatcccaagcgatcaagtcaaggagatggttcagttactaagccagttagaaccagtgataggcttaggaggaggcccaaattgcatggtcgctcatacttgtactactcttcaccaaacatgttacataatcggaaaagaaacacaaagacaagaacggcagcctctcagatcgcaaagatgctgcacaaaggaaaccgtccagcgagggcatcaaatgccgcgccaattgcatctgatctccggcgttccacgaggaagagaagaatttctgtaaacctggaggactatacagacagttctggagcggaggatgaggatatgatgagtccagcatatcgaactttgaggaggagagttcataaaaacttctcaacttcaaaaagtagaaaggacatggatgctgaattggcaccacgtcgtgagggtctccgtcctcgtcgttcaacaacaattgctaataaacgactgaaaacagaatctggcgctgaccaagatacatcagaagagaaagatggccaagatgaaactgagaatgggaatgaattagatgatgcggatgatggtgaaaatgaggttgaggctgaagacgagggtaatggagaagatgaaggcgatggcgaagatgagggagaagaagatggtgatgatgatgaagagggtgatgaagaacaagagggaaggaagagatatgatctgcgaaaccgtgctgaagtccggagaatgcctacgggagaaatcaacaagcaacaacaacctagatctcctcggagagtattgcatcagggcatgggcaccagggttggaagagatggtaggagaggtgggtctcggcctcacaagcgccatcgctttacaagaacagatgattcagatgattctcttcttgtggacgagttggaccagggccctgcaattccctgggctcgaggtggaaacagatctggagcaccttggctatttgggggtttggacacgtatgggtcaagttcattggggttgaacgttggagcttctggttggggtcaccagagtgatggtttggctgcattaacttctggtgttcagactgctggcccaagctctaaaggaggtgcagatatccagccactgcagattaatgaggatataaattttgatgacattggtgggctgtccgaatacattaatgatttgaaggaaatggttttctttccgttgctgtatccagagttctttgcaagttacagcattactcctcccagaggtgtactgctgtgtggtcctccaggcactggtaaaacactgattgctcgagcattagcatgtgctgcttcaaaagctggacagaaagttagcttttatatgcggaagggtgctgatgttcttagtaagtgggttggcgaggctgagagacagctaaagctactctttgaggaggctcagcgaaaccagccttccataatcttttttgatgaaattgatggtcttgctcctgtaagatctagcaagcaggaacaaatacataattctattgtttcaactttactggcgctgatggatggcctcgattctcgtggtcaagttgttctcattggagcaacaaacagggtagatgcaatagacggagctttacgccgccctggcagattcgatcgggagtttaatttttccttaccaggttgcgaagcacgagccgaaatattggatattcacactcgtaaatggaagcacccacctactagggagctgaaagaggaactggcagctacttgtgtagggtattgtggtgctgatctaaaagctttgtgcactgaagctgcgattcgtgcttttcgtgagaaatatccacaagtttataccagtgatgataaatacgccatagatgttgggttggttaatgttgaaaagagccactttgtagaggcaatgtcagctattactcctgctgcccatagagggtctgttgtgcaatccagaccactctctccggttgtgttgccatgtttacatcgacacctccttgaatccatgagtttaatatcagatatttttccctcgtcagccacgtcatcggagttgacgaagctgtcaatacttacatttggatctgcaattcctcttgtttatcgacctcgacttttgctgcttggtggtgaaggagttggactggatcatcttgggcctgcaattttacatgagctagaaaagttccctattcattctctgggacttccatctctcctttcggatcctggtgcaaagaccccagaagaagcgttagtacatatatttagtgaagctagaagaacaacaccttcaatactttacataccaatgttcaataattggtgggaaaatgctcatgaacagcttagggctgtatttctgactttgttagaagaattgccatcaaatctacccatattattacttgctacatcttatggtgaattgtctgacatggaagagcagtcagtatttgacaatcgatctgtctatactgtggacaaaccatcaagtgaagacaggtctttgttctttgaccgtttgattgaagctgctctctcagtcatttctggcttaaatggcaaacctgatggaccacaaccccttccagaacttcccaaggttccaaaagaacctactggtccaaaacccgcagaagtaaaagccaaggtggaagcagagcagcatgcccttcggcgattgcgtatgtgtctcagagatgtttgcaatagaatactatatgataaaagattcagcgcattccactttccagttactgacgaggatgctccaaactatcgctcaataattcaaattccaatggatacggctactctgctgcagcgtgttgatactgggcagtatctgacatgtacaccgtttttgcaagatgtggatctcattgtgagaaatgccaaggcttacaatggagatgattacgctggagcgagaattgtcagtagagcctatgagcttcgagatgtagtgcatgggatgctgtcacagatggacccagcactgctaacatattgtgataagatcgcagctgaaggtggtccttcactgataccagatgatctgagtggatcaatcctcggtttagctcctgttgtgcagatgggaactgttactagaaccagtgccagacttcgaaatgtgcagccagaggttaatttagatcgagattatgaaggtcttaaaaagcccaagaaaactactgatgctgtcagtatagattcagctgcagacaaatcacagaaccaagattcaggccaagaaatgccatctccggatgcggccaacccacagtcagcagctccttctccaacagatggtgatagagaagaccaaagcgagccaccaagtaaagaggcatctgcagaagatatgagtggtgattcttgcaagggtcctgcggccaagtcggataaagaaatttcaagccgaacagaatctgtaaagggagtattcatggaacgtactgacaactacagcattccgcagatggagaggctttacactcgaatcatgaagggtgttcttgagactctggacaaagggcttcgtgatgatgataataatcctaagcattcaattttgagatttttgtcggaattcgcacagcatcaggcgaatttctgaatctaaattttctcatatcggtcactaggataggtttgctaggagaaagaatgaaaggaacaaaagattttttttggttttttaaaatccggattcttcttttgactgaaaaagttgcaagaacaaaaggtaatagtttatcgg

SEQ ID NO: 81637 - protein, 1210 aa, Arabidopsis thaliana
  peptide (1)..(1210): Ceres Seq. ID no. 12660589
MHPKRSSQGDGSVTKPVRTSDRLRRRPKLHGRSYLYYSSPNMLHNRKRNTKTRTAASQIAKMLHKGNRPARASNAAPIASDLRRSTRKRRISVNLEDYTDSSGAEDEDMMSPAYRTLRRRVHKNFSTSKSRKDMDAELAPRREGLRPRRSTTIANKRLKTESGADQDTSEEKDGQDETENGNELDDADDGENEVEAEDEGNGEDEGDGEDEGEEDGDDDEEGDEEQEGRKRYDLRNRAEVRRMPTGEINKQQQPRSPRRVLHQGMGTRVGRDGRRGGSRPHKRHRFTRTDDSDDSLLVDELDQGPAIPWARGGNRSGAPWLFGGLDTYGSSSLGLNVGASGWGHQSDGLAALTSGVQTAGPSSKGGADIQPLQINEDINFDDIGGLSEYINDLKEMVFFPLLYPEFFASYSITPPRGVLLCGPPGTGKTLIARALACAASKAGQKVSFYMRKGADVLSKWVGEAERQLKLLFEEAQRNQPSIIFFDEIDGLAPVRSSKQEQIHNSIVSTLLALMDGLDSRGQVVLIGATNRVDAIDGALRRPGRFDREFNFSLPGCEARAEILDIHTRKWKHPPTRELKEELAATCVGYCGADLKALCTEAAIRAFREKYPQVYTSDDKYAIDVGLVNVEKSHFVEAMSAITPAAHRGSVVQSRPLSPVVLPCLHRHLLESMSLISDIFPSSATSSELTKLSILTFGSAIPLVYRPRLLLLGGEGVGLDHLGPAILHELEKFPIHSLGLPSLLSDPGAKTPEEALVHIFSEARRTTPSILYIPMFNNWWENAHEQLRAVFLTLLEELPSNLPILLLATSYGELSDMEEQSVFDNRSVYTVDKPSSEDRSLFFDRLIEAALSVISGLNGKPDGPQPLPELPKVPKEPTGPKPAEVKAKVEAEQHALRRLRMCLRDVCNRILYDKRFSAFHFPVTDEDAPNYRSIIQIPMDTATLLQRVDTGQYLTCTPFLQDVDLIVRNAKAYNGDDYAGARIVSRAYELRDVVHGMLSQMDPALLTYCDKIAAEGGPSLIPDDLSGSILGLAPVVQMGTVTRTSARLRNVQPEVNLDRDYEGLKKPKKTTDAVSIDSAADKSQNQDSGQEMPSPDAANPQSAAPSPTDGDREDQSEPPSKEASAEDMSGDSCKGPAAKSDKEISSRTESVKGVFMERTDNYSIPQMERLYTRIMKGVLETLDKGLRDDDNNPKHSILRFLSEFAQHQANF

SEQ ID NO: 81638 - protein, 1169 aa, Arabidopsis thaliana
  peptide (1)..(1169): Ceres Seq. ID no. 12660590
MLHNRKRNTKTRTAASQIAKMLHKGNRPARASNAAPIASDLRRSTRKRRISVNLEDYTDSSGAEDEDMMSPAYRTLRRRVHKNFSTSKSRKDMDAELAPRREGLRPRRSTTIANKRLKTESGADQDTSEEKDGQDETENGNELDDADDGENEVEAEDEGNGEDEGDGEDEGEEDGDDDEEGDEEQEGRKRYDLRNRAEVRRMPTGEINKQQQPRSPRRVLHQGMGTRVGRDGRRGGSRPHKRHRFTRTDDSDDSLLVDELDQGPAIPWARGGNRSGAPWLFGGLDTYGSSSLGLNVGASGWGHQSDGLAALTSGVQTAGPSSKGGADIQPLQINEDINFDDIGGLSEYINDLKEMVFFPLLYPEFFASYSITPPRGVLLCGPPGTGKTLIARALACAASKAGQKVSFYMRKGADVLSKWVGEAERQLKLLFEEAQRNQPSIIFFDEIDGLAPVRSSKQEQIHNSIVSTLLALMDGLDSRGQVVLIGATNRVDAIDGALRRPGRFDREFNFSLPGCEARAEILDIHTRKWKHPPTRELKEELAATCVGYCGADLKALCTEAAIRAFREKYPQVYTSDDKYAIDVGLVNVEKSHFVEAMSAITPAAHRGSVVQSRPLSPVVLPCLHRHLLESMSLISDIFPSSATSSELTKLSILTFGSAIPLVYRPRLLLLGGEGVGLDHLGPAILHELEKFPIHSLGLPSLLSDPGAKTPEEALVHIFSEARRTTPSILYIPMFNNWWENAHEQLRAVFLTLLEELPSNLPILLLATSYGELSDMEEQSVFDNRSVYTVDKPSSEDRSLFFDRLIEAALSVISGLNGKPDGPQPLPELPKVPKEPTGPKPAEVKAKVEAEQHALRRLRMCLRDVCNRILYDKRFSAFHFPVTDEDAPNYRSIIQIPMDTATLLQRVDTGQYLTCTPFLQDVDLIVRNAKAYNGDDYAGARIVSRAYELRDVVHGMLSQMDPALLTYCDKIAAEGGPSLIPDDLSGSILGLAPVVQMGTVTRTSARLRNVQPEVNLDRDYEGLKKPKKTTDAVSIDSAADKSQNQDSGQEMPSPDAANPQSAAPSPTDGDREDQSEPPSKEASAEDMSGDSCKGPAAKSDKEISSRTESVKGVFMERTDNYSIPQMERLYTRIMKGVLETLDKGLRDDDNNPKHSILRFLSEFAQHQANF

SEQ ID NO: 81639 - protein, 1149 aa, Arabidopsis thaliana
  peptide (1)..(1149): Ceres Seq. ID no. 12660591
MLHKGNRPARASNAAPIASDLRRSTRKRRISVNLEDYTDSSGAEDEDMMSPAYRTLRRRVHKNFSTSKSRKDMDAELAPRREGLRPRRSTTIANKRLKTESGADQDTSEEKDGQDETENGNELDDADDGENEVEAEDEGNGEDEGDGEDEGEEDGDDDEEGDEEQEGRKRYDLRNRAEVRRMPTGEINKQQQPRSPRRVLHQGMGTRVGRDGRRGGSRPHKRHRFTRTDDSDDSLLVDELDQGPAIPWARGGNRSGAPWLFGGLDTYGSSSLGLNVGASGWGHQSDGLAALTSGVQTAGPSSKGGADIQPLQINEDINFDDIGGLSEYINDLKEMVFFPLLYPEFFASYSITPPRGVLLCGPPGTGKTLIARALACAASKAGQKVSFYMRKGADVLSKWVGEAERQLKLLFEEAQRNQPSIIFFDEIDGLAPVRSSKQEQIHNSIVSTLLALMDGLDSRGQVVLIGATNRVDAIDGALRRPGRFDREFNFSLPGCEARAEILDIHTRKWKHPPTRELKEELAATCVGYCGADLKALCTEAAIRAFREKYPQVYTSDDKYAIDVGLVNVEKSHFVEAMSAITPAAHRGSVVQSRPLSPVVLPCLHRHLLESMSLISDIFPSSATSSELTKLSILTFGSAIPLVYRPRLLLLGGEGVGLDHLGPAILHELEKFPIHSLGLPSLLSDPGAKTPEEALVHIFSEARRTTPSILYIPMFNNWWENAHEQLRAVFLTLLEELPSNLPILLLATSYGELSDMEEQSVFDNRSVYTVDKPSSEDRSLFFDRLIEAALSVISGLNGKPDGPQPLPELPKVPKEPTGPKPAEVKAKVEAEQHALRRLRMCLRDVCNRILYDKRFSAFHFPVTDEDAPNYRSIIQIPMDTATLLQRVDTGQYLTCTPFLQDVDLIVRNAKAYNGDDYAGARIVSRAYELRDVVHGMLSQMDPALLTYCDKIAAEGGPSLIPDDLSGSILGLAPVVQMGTVTRTSARLRNVQPEVNLDRDYEGLKKPKKTTDAVSIDSAADKSQNQDSGQEMPSPDAANPQSAAPSPTDGDREDQSEPPSKEASAEDMSGDSCKGPAAKSDKEISSRTESVKGVFMERTDNYSIPQMERLYTRIMKGVLETLDKGLRDDDNNPKHSILRFLSEFAQHQANF

SEQ ID NO: 81640 - DNA, 1038 bp, Arabidopsis thaliana
  misc_feature (1)..(1038): Ceres Seq. ID no. 12660608
  misc_feature (1)..(1038): Ortholog of  Ceres SEQ ID NO 14316124 as cited in SEQ ID NO 50904
  misc_feature (1)..(1038): Ortholog of  Ceres SEQ ID NO 13585382 as cited in SEQ ID NO 63889
atggcatcatccaccggcgagaaaggtctcatcgtgagcttcggcgagatgctcattgacttcgtccctaccgtatccggcgtctccctctccgaatcccccggatttctcaaagctcccggcggtgctccggccaacgtcgccatcgctgtttcacgtcttggaggtcgtgccgccttcgttgggaagctgggagacgatgatttcggtcatatgctcgccggaatcttgagaaagaacggtgtcgacgatcaggggatcaatttcgacgaaggggcgagaactgcactcgcttttgtcactttgcgttctgacggagaacgagagtttatgttttaccggaatcccagcgccgatatgcttctccggccagatgaactgaatcttgaacttatcagatccgcgaaagtgttccactatggatcaataagtttgataacagagccatgtagatcagctcacatgaaggcaatggaagtggcgaaagaagctggagctcttctttcctacgatccaaacctcagggaacctctttggccatcacctgaagaagctaggacacagatcatgagtatctgggacaaggctgacatcattaaggtcagtgacgtggagcttgaattcttgaccgaaaacaaaaccatggatgataagacagcaatgtctctatggcatcccaaccttaagctcttgcttgttactctcggcgaaaagggatgtacttatttcacaaagaaattccatggatcggtagaaacattccatgtggacgccgtggatactaccggagctggagattcgtttgttggtgcacttctacaacagattgttgatgaccagtccgtactcgaggatgaagcgaggttgagaaaagtgctgagatttgcaaacgcttgtggagccatcacaacaactaaaaaaggagccattccagctcttcctacagacattgaagctctcagttttcttaaagaccaaaagaaacgtcaaaccaatcttaaattctcaaaatggtgttgtacggcttctccttgttaa

SEQ ID NO: 81641 - protein, 345 aa, Arabidopsis thaliana
  peptide (1)..(345): Ceres Seq. ID no. 12660609
MASSTGEKGLIVSFGEMLIDFVPTVSGVSLSESPGFLKAPGGAPANVAIAVSRLGGRAAFVGKLGDDDFGHMLAGILRKNGVDDQGINFDEGARTALAFVTLRSDGEREFMFYRNPSADMLLRPDELNLELIRSAKVFHYGSISLITEPCRSAHMKAMEVAKEAGALLSYDPNLREPLWPSPEEARTQIMSIWDKADIIKVSDVELEFLTENKTMDDKTAMSLWHPNLKLLLVTLGEKGCTYFTKKFHGSVETFHVDAVDTTGAGDSFVGALLQQIVDDQSVLEDEARLRKVLRFANACGAITTTKKGAIPALPTDIEALSFLKDQKKRQTNLKFSKWCCTASPC

SEQ ID NO: 81642 - protein, 329 aa, Arabidopsis thaliana
  peptide (1)..(329): Ceres Seq. ID no. 12660610
MLIDFVPTVSGVSLSESPGFLKAPGGAPANVAIAVSRLGGRAAFVGKLGDDDFGHMLAGILRKNGVDDQGINFDEGARTALAFVTLRSDGEREFMFYRNPSADMLLRPDELNLELIRSAKVFHYGSISLITEPCRSAHMKAMEVAKEAGALLSYDPNLREPLWPSPEEARTQIMSIWDKADIIKVSDVELEFLTENKTMDDKTAMSLWHPNLKLLLVTLGEKGCTYFTKKFHGSVETFHVDAVDTTGAGDSFVGALLQQIVDDQSVLEDEARLRKVLRFANACGAITTTKKGAIPALPTDIEALSFLKDQKKRQTNLKFSKWCCTASPC

SEQ ID NO: 81643 - protein, 274 aa, Arabidopsis thaliana
  peptide (1)..(274): Ceres Seq. ID no. 12660611
MLAGILRKNGVDDQGINFDEGARTALAFVTLRSDGEREFMFYRNPSADMLLRPDELNLELIRSAKVFHYGSISLITEPCRSAHMKAMEVAKEAGALLSYDPNLREPLWPSPEEARTQIMSIWDKADIIKVSDVELEFLTENKTMDDKTAMSLWHPNLKLLLVTLGEKGCTYFTKKFHGSVETFHVDAVDTTGAGDSFVGALLQQIVDDQSVLEDEARLRKVLRFANACGAITTTKKGAIPALPTDIEALSFLKDQKKRQTNLKFSKWCCTASPC

SEQ ID NO: 81644 - DNA, 1021 bp, Arabidopsis thaliana
  misc_feature (1)..(1021): Ceres Seq. ID no. 12660612
  misc_feature (1)..(1021): Ortholog of  Ceres SEQ ID NO 14316124 as cited in SEQ ID NO 50904
  misc_feature (1)..(1021): Ortholog of  Ceres SEQ ID NO 13585382 as cited in SEQ ID NO 63889
atgacgtcatccaacggcgataataaaggtctcgtcgttagcttcggcgagatgctcattgacttcgtgcccacggaatccggcgtctccctctctgaatcctctggatttctcaaagctcctggtggtgctccagcaaacgtcgctatcgctgtttcccgtctcggaggtcgcgccgccttcgtcggaaaactcggggacgatgagtttggccatatgcttgccggaatcttgagaaagaacgatgtcgacgatcaggggatcaatttcgataaaggagcaagaaccgcactcgcttttgtgactctgcgttctgacggagaacgagagtttatgttttaccggaatcccagcgccgatatgcttctccggccagatgaactcaacctcgaactaatcagatccgcgaaagtgtttcactatggatcaataagtttgattacagagccatgtagatcagctcacatgaaggcgatggaggtggcgaaagaagctggagctcttctttcctacgatccaaacctcagggaacctctgtggccatcccctgaagaagctaggaaacagatcatgagtatctgggacaaggctgacattattaaggtcagtgacgtcgagcttgagttcttgacaggaaacaaaacgattgatgatgagacagctatgtctctgtggcatcctaatttgaagctcttgcttgttacacttggcgaaaatggatgtcgttactacactaaggatttccatggatctgttgaaactttccatgttgacgctgtggatactactggagctggtgattcttttgttggcgcgcttctaaaccagattgttgatgatcaatctgtactcgaggaggaagagagattgagaaaagtgctgagatttgcaaacgcttgtggagcaatcacgacgactaaaaagggagccattccagctcttcctacagattgtgaagctctcagttttcttaagatacaagtagaatagtaaaacttctcttcgagtccagaattctcct

SEQ ID NO: 81645 - protein, 329 aa, Arabidopsis thaliana
  peptide (1)..(329): Ceres Seq. ID no. 12660613
MTSSNGDNKGLVVSFGEMLIDFVPTESGVSLSESSGFLKAPGGAPANVAIAVSRLGGRAAFVGKLGDDEFGHMLAGILRKNDVDDQGINFDKGARTALAFVTLRSDGEREFMFYRNPSADMLLRPDELNLELIRSAKVFHYGSISLITEPCRSAHMKAMEVAKEAGALLSYDPNLREPLWPSPEEARKQIMSIWDKADIIKVSDVELEFLTGNKTIDDETAMSLWHPNLKLLLVTLGENGCRYYTKDFHGSVETFHVDAVDTTGAGDSFVGALLNQIVDDQSVLEEEERLRKVLRFANACGAITTTKKGAIPALPTDCEALSFLKIQVE

SEQ ID NO: 81646 - protein, 312 aa, Arabidopsis thaliana
  peptide (1)..(312): Ceres Seq. ID no. 12660614
MLIDFVPTESGVSLSESSGFLKAPGGAPANVAIAVSRLGGRAAFVGKLGDDEFGHMLAGILRKNDVDDQGINFDKGARTALAFVTLRSDGEREFMFYRNPSADMLLRPDELNLELIRSAKVFHYGSISLITEPCRSAHMKAMEVAKEAGALLSYDPNLREPLWPSPEEARKQIMSIWDKADIIKVSDVELEFLTGNKTIDDETAMSLWHPNLKLLLVTLGENGCRYYTKDFHGSVETFHVDAVDTTGAGDSFVGALLNQIVDDQSVLEEEERLRKVLRFANACGAITTTKKGAIPALPTDCEALSFLKIQVE

SEQ ID NO: 81647 - protein, 257 aa, Arabidopsis thaliana
  peptide (1)..(257): Ceres Seq. ID no. 12660615
MLAGILRKNDVDDQGINFDKGARTALAFVTLRSDGEREFMFYRNPSADMLLRPDELNLELIRSAKVFHYGSISLITEPCRSAHMKAMEVAKEAGALLSYDPNLREPLWPSPEEARKQIMSIWDKADIIKVSDVELEFLTGNKTIDDETAMSLWHPNLKLLLVTLGENGCRYYTKDFHGSVETFHVDAVDTTGAGDSFVGALLNQIVDDQSVLEEEERLRKVLRFANACGAITTTKKGAIPALPTDCEALSFLKIQVE

SEQ ID NO: 81648 - DNA, 1555 bp, Arabidopsis thaliana
  misc_feature (1)..(1555): Ceres Seq. ID no. 12660622
  misc_feature (1)..(1555): Ortholog of  Ceres SEQ ID NO 14301874 as cited in SEQ ID NO 66215
aaagaactgaactgaaacagagccgacaaaagcaaccgagagaaagaaagcgaacaagggttgttgtctgagacgacgaaagctatgggtctagaggatgctggagatttggttctccacatcgtcttatccaaaatcggccctgaaaacaccgcgagagtggcttgtgtcagtaaacgccttaaggtctccgcctccgaggaatctctctggtctatcttctgctccaatgatcttaatatctctactcctctcgatccccatggagatcctgctccttccttcaagagagcatatcaattgtggagggagtcatttagaatgtatccttggaatctggttaaaagagttagactttgttgggacaacctcaaacaatggttgaccttaaacttccctgaagcaaaggcaacactgaggaaaggtgtcacagaagatgatcttcaagaattcgagacttctctcaaagtgaaacttcctttgcccacaaggcttctctaccgtttcgttgatggtcaagagctttcttcccccaatgggcttgatggctctttggggcttataggtggctattccgcttattctcatgacgttaatgtctacttgctacctcttaaggaagtgatgagggagacaaaggaaagtttcatgcgcgacctcggtttctcgagtagattagaccttattgttatggctgcatccgtagttgccagtctgaaaatatttttattagactgcacaaccggacagctttttactgggacaagtaaccgccaattgcttccttgtgtacccgatgctttggttagatcggttcatgataccaacggcgatcagcaacaggatgccatgctgctttggttggaagaacatggccggcggttacaaaccggcactataaatgtccgtcaacagaacaatgtcaagagtatcagtttgttcccggagattcctcccttgtgttctgtctccgtaactaatggtgtgcaggtacgtgcttcgtctgtttttatcccggaaatatcgaaccttcgggatcagccaccggcatactggtatgcatattcaatccggatgtctctcatgccagaaggatgcatcttgaatgggacacatcatagctcttgccaactgtattggagacattgggttatccgagctgataatgaagtgatagataatgttaatggagaagctgtcataggaaagtacccgctcttacaagccggggaggaagagtttgtgtatgagagttgttccagttttccgacaactgctggatccattgatggctctttcacctttgtacctggaagtttgagagatccaaaagggagtcaattcgaagtcaaagtcgtagagtttcctctggagttaccggactacatcttctgaactctttctggcacaaggttcgttactctttcaagataatttgttgtatcgtttgctttgtccgtacagcatgcaatgtcctaataaaataaaggtgttggatcaactggtttacaagttcatgagaacagattattcttaacagttttacataaatagc

SEQ ID NO: 81649 - protein, 436 aa, Arabidopsis thaliana
  peptide (1)..(436): Ceres Seq. ID no. 12660623
MGLEDAGDLVLHIVLSKIGPENTARVACVSKRLKVSASEESLWSIFCSNDLNISTPLDPHGDPAPSFKRAYQLWRESFRMYPWNLVKRVRLCWDNLKQWLTLNFPEAKATLRKGVTEDDLQEFETSLKVKLPLPTRLLYRFVDGQELSSPNGLDGSLGLIGGYSAYSHDVNVYLLPLKEVMRETKESFMRDLGFSSRLDLIVMAASVVASLKIFLLDCTTGQLFTGTSNRQLLPCVPDALVRSVHDTNGDQQQDAMLLWLEEHGRRLQTGTINVRQQNNVKSISLFPEIPPLCSVSVTNGVQVRASSVFIPEISNLRDQPPAYWYAYSIRMSLMPEGCILNGTHHSSCQLYWRHWVIRADNEVIDNVNGEAVIGKYPLLQAGEEEFVYESCSSFPTTAGSIDGSFTFVPGSLRDPKGSQFEVKVVEFPLELPDYIF

SEQ ID NO: 81650 - protein, 357 aa, Arabidopsis thaliana
  peptide (1)..(357): Ceres Seq. ID no. 12660624
MYPWNLVKRVRLCWDNLKQWLTLNFPEAKATLRKGVTEDDLQEFETSLKVKLPLPTRLLYRFVDGQELSSPNGLDGSLGLIGGYSAYSHDVNVYLLPLKEVMRETKESFMRDLGFSSRLDLIVMAASVVASLKIFLLDCTTGQLFTGTSNRQLLPCVPDALVRSVHDTNGDQQQDAMLLWLEEHGRRLQTGTINVRQQNNVKSISLFPEIPPLCSVSVTNGVQVRASSVFIPEISNLRDQPPAYWYAYSIRMSLMPEGCILNGTHHSSCQLYWRHWVIRADNEVIDNVNGEAVIGKYPLLQAGEEEFVYESCSSFPTTAGSIDGSFTFVPGSLRDPKGSQFEVKVVEFPLELPDYIF

SEQ ID NO: 81651 - protein, 256 aa, Arabidopsis thaliana
  peptide (1)..(256): Ceres Seq. ID no. 12660625
MRETKESFMRDLGFSSRLDLIVMAASVVASLKIFLLDCTTGQLFTGTSNRQLLPCVPDALVRSVHDTNGDQQQDAMLLWLEEHGRRLQTGTINVRQQNNVKSISLFPEIPPLCSVSVTNGVQVRASSVFIPEISNLRDQPPAYWYAYSIRMSLMPEGCILNGTHHSSCQLYWRHWVIRADNEVIDNVNGEAVIGKYPLLQAGEEEFVYESCSSFPTTAGSIDGSFTFVPGSLRDPKGSQFEVKVVEFPLELPDYIF

SEQ ID NO: 81652 - DNA, 621 bp, Arabidopsis thaliana
  misc_feature (1)..(621): Ceres Seq. ID no. 12660636
  misc_feature (1)..(621): Ortholog of  Ceres SEQ ID NO 15168557 as cited in SEQ ID NO 58119
  misc_feature (1)..(621): Ortholog of  Ceres SEQ ID NO 14316469 as cited in SEQ ID NO 59125
atggcttccatcacgaattatgtccgatacatggctcacaagctcgagtactctctcactctcagccttaagaaacatactagagagaagctcagtgaccgggaactctttggtgtagtcatgaagaatctattctatggaagaataagctacttacactcggacaaaggaaaagagatggccccaaccatgggaacaaatgaaagcacgctacttgtccgtaagctaccagttgttgatacaaggtacattttcgtaggggatgctgttgtcttgaaggacccgaatgaaacaaataagtatatagtcagaagactagcagctttagagggatctgaaatggtatcaagtgatgagaaagatgagccttttgttctcgaaaaggatcagtgctgggtcgttgctgagaatcaagagatgaaatctaaagaagcatatgatagtcgaacatttggtccaatttcaatggcggacatagtgggaagagctatatattgtctgaggacagcagtggatcatggtccagtaagcaacagtgaatttgccatggacgaggattccccaatcctggcggtagaacttgacgtggatgaattggctaaaggccacaaggcgtcataa

SEQ ID NO: 81653 - protein, 206 aa, Arabidopsis thaliana; identical to SEQ ID NO: 40177
  peptide (1)..(206): Ceres Seq. ID no. 12660637

SEQ ID NO: 81654 - protein, 196 aa, Arabidopsis thaliana; identical to SEQ ID NO: 40178
  peptide (1)..(196): Ceres Seq. ID no. 12660638

SEQ ID NO: 81655 - protein, 166 aa, Arabidopsis thaliana
  peptide (1)..(166): Ceres Seq. ID no. 12660639
MKNLFYGRISYLHSDKGKEMAPTMGTNESTLLVRKLPVVDTRYIFVGDAVVLKDPNETNKYIVRRLAALEGSEMVSSDEKDEPFVLEKDQCWVVAENQEMKSKEAYDSRTFGPISMADIVGRAIYCLRTAVDHGPVSNSEFAMDEDSPILAVELDVDELAKGHKAS

SEQ ID NO: 81656 - DNA, 1948 bp, Arabidopsis thaliana
  misc_feature (1)..(1948): Ceres Seq. ID no. 12660693
  misc_feature (1)..(1948): Ortholog of  Ceres SEQ ID NO 15170350 as cited in SEQ ID NO 57810
atttcaagaagattgaagacgaaggagaagctgagagagaacgacgaagcagattcaaaatcaactctctttcttcttcattcttttttcctgggtttttctgaatgtatcaccacgctttttccctaaaatttcactccttctctcctcactatgcgttatccctctccaatttctccacccaaagccctaatcctctcctcccgccattcgctagagtccctcatgtgaccagctctgtttgcctccgctgccggagcagcgccgctgatgtatctccggttatatacgccgatggctcctcctccatctgttctttcggggaaactggagatgtcgcggtggtcgagaaacctatagatgtctcaaccttgggtaatctctgcgtcgacattgttctcagtgttcacgaattgccccctccttctcgtggagaacgcaaggccctcatggacgaactctctatgtctcccccagataagaaatactgggaagcaggtggcaactgtaacatggctatagcagctgctagattggggcttcattgtgttgctattggtcacgttggggatgaaatctatggtgagtttcttcttgatgtgcttcatgaggaaggaataggtacggttgcattgaatggaggaacaaatgaaaaagataccagctcattctgtgaaactctcatttgctgggttcttgtggatcctttgcagaggcatgggttttgcagtcgagctgatttcaaggaggaacctgctttcagttggatcactgacctatctgatgaagtaaagatggcaatcagacagtcaaaagttcttttctgcaatggttatgactttgacgatttcagccctagttttattatgtcaacgatagattacgctgccaaagttgggacagctatcttcttcgatcctggaccacggggaaagagtctgtccaagggaactcctgatgagcgtagagcacttgctcatttcttaagaatgagtgatgttcttcttctaacatctgaggaggtggaggctctaactggcatcaggaaccctgttaaagcaggacaagaaattctgaggaacggaaagggaacgaaatgggtgattgtaaagatgggcccaaagggttcaattctagtgacgaaatctagtgtctcagtggcacctgcgtttaaggtggaagtggttgacactgttggatgtggagacagttttgtggctgcaattgcattaggttatatacgcaacatgccgcttgttaataccttaacaattgcaaatgcggttggagcagcaactgcaatgggctgtggagcaggtagaaatgttgcaaaaaggcatcaggtggtggatctgatgaaggcctcgaaactcaatgatgaagagaagtttttcgaacaactcctggctgaaaattcagagtcatctagaatcaatcttctttcaaaagggatgataaaggatgggaggagcaacaagcagctgatagaaacaatctcaatggaaaaagtggtttctgaattgcttgcagaacttgaacttgggaggtgttgtgtgaaggcttcatcttgaatctttgaaacaaactcgcctgacacacatattttctttggcggcgtgattttggagacctttgatggctctcaaggatttgcatagagacttgtaaaccagaagataacatcgggtaatgatggagattttttgtttcagctgaatcttattagtggatgaagaaatttcaggtaaatgattggttggcaatatttttttctttgggagatatgaaagagaaggtgatcttacaacattagtgataaatagttcacataaagagaagtttggcactattttctgtttgtcttcatattgttaaagtcgttaagatgcgatagtttggtcgggattttgtggaagttatgttagtaccaaacttgaagatttacttc

SEQ ID NO: 81657 - protein, 488 aa, Arabidopsis thaliana
  peptide (1)..(488): Ceres Seq. ID no. 12660694
MYHHAFSLKFHSFSPHYALSLSNFSTQSPNPLLPPFARVPHVTSSVCLRCRSSAADVSPVIYADGSSSICSFGETGDVAVVEKPIDVSTLGNLCVDIVLSVHELPPPSRGERKALMDELSMSPPDKKYWEAGGNCNMAIAAARLGLHCVAIGHVGDEIYGEFLLDVLHEEGIGTVALNGGTNEKDTSSFCETLICWVLVDPLQRHGFCSRADFKEEPAFSWITDLSDEVKMAIRQSKVLFCNGYDFDDFSPSFIMSTIDYAAKVGTAIFFDPGPRGKSLSKGTPDERRALAHFLRMSDVLLLTSEEVEALTGIRNPVKAGQEILRNGKGTKWVIVKMGPKGSILVTKSSVSVAPAFKVEVVDTVGCGDSFVAAIALGYIRNMPLVNTLTIANAVGAATAMGCGAGRNVAKRHQVVDLMKASKLNDEEKFFEQLLAENSESSRINLLSKGMIKDGRSNKQLIETISMEKVVSELLAELELGRCCVKASS

SEQ ID NO: 81658 - protein, 373 aa, Arabidopsis thaliana
  peptide (1)..(373): Ceres Seq. ID no. 12660695
MDELSMSPPDKKYWEAGGNCNMAIAAARLGLHCVAIGHVGDEIYGEFLLDVLHEEGIGTVALNGGTNEKDTSSFCETLICWVLVDPLQRHGFCSRADFKEEPAFSWITDLSDEVKMAIRQSKVLFCNGYDFDDFSPSFIMSTIDYAAKVGTAIFFDPGPRGKSLSKGTPDERRALAHFLRMSDVLLLTSEEVEALTGIRNPVKAGQEILRNGKGTKWVIVKMGPKGSILVTKSSVSVAPAFKVEVVDTVGCGDSFVAAIALGYIRNMPLVNTLTIANAVGAATAMGCGAGRNVAKRHQVVDLMKASKLNDEEKFFEQLLAENSESSRINLLSKGMIKDGRSNKQLIETISMEKVVSELLAELELGRCCVKASS

SEQ ID NO: 81659 - protein, 368 aa, Arabidopsis thaliana
  peptide (1)..(368): Ceres Seq. ID no. 12660696
MSPPDKKYWEAGGNCNMAIAAARLGLHCVAIGHVGDEIYGEFLLDVLHEEGIGTVALNGGTNEKDTSSFCETLICWVLVDPLQRHGFCSRADFKEEPAFSWITDLSDEVKMAIRQSKVLFCNGYDFDDFSPSFIMSTIDYAAKVGTAIFFDPGPRGKSLSKGTPDERRALAHFLRMSDVLLLTSEEVEALTGIRNPVKAGQEILRNGKGTKWVIVKMGPKGSILVTKSSVSVAPAFKVEVVDTVGCGDSFVAAIALGYIRNMPLVNTLTIANAVGAATAMGCGAGRNVAKRHQVVDLMKASKLNDEEKFFEQLLAENSESSRINLLSKGMIKDGRSNKQLIETISMEKVVSELLAELELGRCCVKASS

SEQ ID NO: 81660 - DNA, 1398 bp, Arabidopsis thaliana
  misc_feature (1)..(1398): Ceres Seq. ID no. 12660704
  misc_feature (1)..(1398): Ortholog of  Ceres SEQ ID NO 14311001 as cited in SEQ ID NO 53717
  misc_feature (1)..(1398): Ortholog of  Ceres SEQ ID NO 14314945 as cited in SEQ ID NO 58031
  misc_feature (1)..(1398): Ortholog of  Ceres SEQ ID NO 13595833 as cited in SEQ ID NO 59877
  misc_feature (1)..(1398): Ortholog of  Ceres SEQ ID NO 13654452 as cited in SEQ ID NO 65792
  misc_feature (1)..(1398): Ortholog of  Ceres SEQ ID NO 13573778 as cited in SEQ ID NO 0
tttgatagagagagagagagagagagagagagagaaagagcttcgtcttcttcatctccatcattatctccattgacattgttctcaattgcgaataataatcataattattcacacaaccaaagcattcatctctcagattctcttaaaaaaatggagaaatcagatcctccaccagtcccaaagcccggcgccactattatcccctcctccgatccaattcctaatgccgatccgattccatcttcttccttccaccgccgatctcgctccgacgatatgtccatgttcatgttcatggatcccctctcctccgccgcaccaccttcctccgacgaccttccctccgacgacgatctcttctcttctttcatcgatgtcgatagcctcacctctaatcccaatccctttcaaaatccttccctctcctccaactccgtttccggcgctgctaatcctcctcctcctccttcctctcgtcctcgccaccgtcacagcaattccgttgacgctggatgcgccatgtatgccggtgatatcatggacgctaagaaagctatgcctcctgaaaaactctctgagctttggaacatcgatcccaaacgcgccaaaaggattctagcgaatcgacaatctgcagctcgatccaaagagagaaaagctcgatacattcaagaacttgagcgcaaagttcaatctcttcaaaccgaagctaccactctctctgctcagcttactctctaccagagagacacaaatggactagcaaacgaaaacacagagctgaaacttaggttgcaagcaatggaacaacaagctcagcttcgtaatgctttaaacgaagcgttgaggaaagaagttgaaaggatgaagatggagacaggagaaatctctggtaattcagattcgtttgatatgggaatgcagcagattcagtattcttcctcaactttcatggctattccaccatatcatggctcaatgaacctccatgatatgcagatgcattctagtttcaatcctatggagatgtccaattctcaaagcgtgtcggactttctacagaacggccgaatgcaagggctggagattagtagcaatagctcaagcttagtcaaatctgaaggaccttctctctctgctagtgagagtagctctgcctattgacgacaagattatgatgaggctcatttttctgttaataggtttttttttttttcaattcatttgattcacttttgattatttattctttcttttttttgaggtgccattgtgcaagaaaggacgtacgtatacatttgtgttggttatgtgtcgtgagtttcgttgtttgctattcccattgtttgttcttcaaggaacaaaggagactaataaatttcatttttcttttgt

SEQ ID NO: 81661 - protein, 388 aa, Arabidopsis thaliana
  peptide (1)..(388): Ceres Seq. ID no. 12660705
FDRERERERERERASSSSSPSLSPLTLFSIANNNHNYSHNQSIHLSDSLKKMEKSDPPPVPKPGATIIPSSDPIPNADPIPSSSFHRRSRSDDMSMFMFMDPLSSAAPPSSDDLPSDDDLFSSFIDVDSLTSNPNPFQNPSLSSNSVSGAANPPPPPSSRPRHRHSNSVDAGCAMYAGDIMDAKKAMPPEKLSELWNIDPKRAKRILANRQSAARSKERKARYIQELERKVQSLQTEATTLSAQLTLYQRDTNGLANENTELKLRLQAMEQQAQLRNALNEALRKEVERMKMETGEISGNSDSFDMGMQQIQYSSSTFMAIPPYHGSMNLHDMQMHSSFNPMEMSNSQSVSDFLQNGRMQGLEISSNSSSLVKSEGPSLSASESSSAY

SEQ ID NO: 81662 - protein, 337 aa, Arabidopsis thaliana
  peptide (1)..(337): Ceres Seq. ID no. 12660706
MEKSDPPPVPKPGATIIPSSDPIPNADPIPSSSFHRRSRSDDMSMFMFMDPLSSAAPPSSDDLPSDDDLFSSFIDVDSLTSNPNPFQNPSLSSNSVSGAANPPPPPSSRPRHRHSNSVDAGCAMYAGDIMDAKKAMPPEKLSELWNIDPKRAKRILANRQSAARSKERKARYIQELERKVQSLQTEATTLSAQLTLYQRDTNGLANENTELKLRLQAMEQQAQLRNALNEALRKEVERMKMETGEISGNSDSFDMGMQQIQYSSSTFMAIPPYHGSMNLHDMQMHSSFNPMEMSNSQSVSDFLQNGRMQGLEISSNSSSLVKSEGPSLSASESSSAY

SEQ ID NO: 81663 - protein, 295 aa, Arabidopsis thaliana
  peptide (1)..(295): Ceres Seq. ID no. 12660707
MSMFMFMDPLSSAAPPSSDDLPSDDDLFSSFIDVDSLTSNPNPFQNPSLSSNSVSGAANPPPPPSSRPRHRHSNSVDAGCAMYAGDIMDAKKAMPPEKLSELWNIDPKRAKRILANRQSAARSKERKARYIQELERKVQSLQTEATTLSAQLTLYQRDTNGLANENTELKLRLQAMEQQAQLRNALNEALRKEVERMKMETGEISGNSDSFDMGMQQIQYSSSTFMAIPPYHGSMNLHDMQMHSSFNPMEMSNSQSVSDFLQNGRMQGLEISSNSSSLVKSEGPSLSASESSSAY

SEQ ID NO: 81664 - DNA, 2014 bp, Arabidopsis thaliana
  misc_feature (1)..(2014): Ceres Seq. ID no. 12660719
  misc_feature (1)..(2014): Ortholog of  Ceres SEQ ID NO 13598865 as cited in SEQ ID NO 0
atccaatcatatggctgaagccggtgacgagaatctttacgccgccgccagagacatcgccagagctctcggcaaggatccaagtgccgccggagatatcttacagattctctccggttatggcgcttccggaaaccgcggcggagatcctcgacccaccccatcccgcggcggctcaaacgtcaactttgaccgagccctcacctctttagagagacagatctccagctacatcgtggaagatcgaccgatctggtctgatcccgttgactcgcgcaccttcctcgactctgttgatgagctacttgcgattgccggagacttgagatccatggccggagataaatccgtcgccgtctgtcaatcccgtgccgatgagctgattcaacaggtgatgtttaggcttcaagaagagtttggatttgtaatggaccgagcccctgactcgtttgactcggacgatgagttccccggcgaagaagacaacgacacaagcgacggggtaatcgttgctcgtccaatcactgattacaaaatcgtgatcgaggcgttacaatctagcgttattggcgatctaaacgcgatcgctgtgcgcatggtcgctggtggatttgcaaaagagtgttcaagagtgtacagcagtcgacgaagagagtttctagaggagagtttgtcgaggttacatctcagaggactaagtatggaggaagtgcaagagagtccatggcaagatcttgaagacgaaatcgaccgttggattaaagccgtaacgctgatattccacgttttcttcccgagcgagcgtcttctctgcgatcgcgttttctctgatcttcctgtttcctctgtaaccgatctttctttcatggaagtttgtcgcggaaccacaacacagcttctgaatttcgcagacgcgatcgctttaggaagccgtttacctgaacgtttgtttaaggttgtggatttatacgaagcgatgcaagaccttattcctaagatggaaacgctattttctgatcgatattgttcgccgctaaggcatgaggcgctcgcgattcataaacggttaggagaagcgattagagggatatttatggagctggagaatttaatccgacgtgaccctcccaaaacagcgtttcctggcggtgggattcacccgatcacgcggtacgtgatgaattatctgcgtgcggcgtgtaaatcgcggcaatcgttggagcagatacttgaccagacaggaaatgaaaccggatcagatacgagaccgttgtctgtgcaaatcatatgggttttggagttgttggagagtaacttggaaggcaagaaaagaacttatcgtgatccgtctttgtgtttcttgttcatgatgaacaatgacaagtatattcttgataaggctaaggataacgagctaggtttagtcctaggagaagattggattgtgaagcacgcagcgaaactgaggcaataccattctaattaccgaaggagctcatggaaccaagtggtgggattgcttaggaccgatggtccgtatcccaagttagtagagaacctaagattgttcaaatcacagttcgatgaggtgtgtaaggtgcaatctcaatgggttgttagtgatgggcaattgagggaggagttaagaagctctgttgccggaattgtatctccggcgtactcgaatttcatcagaagattgaaggagtcaccggagattaatgggaggcgtggagagccgtttattccgtatactgttgaagatgtggagtttataatcaaacggttgttcaaggaaagctcaagttgattaaattagatatgaaaagaaattaaaaaattcttattaattgaatttttttgtaaaattgtgaatcattctgtgtttttttatctttcttgggtgaataatgttcatggatcggtggaatcaccttttcgacattgatttgttcatgtattgcttttttgatgtaagaaatttccttaaggttaaaatataattcgtttgggt

SEQ ID NO: 81665 - protein, 602 aa, Arabidopsis thaliana
  peptide (1)..(602): Ceres Seq. ID no. 12660720
SNHMAEAGDENLYAAARDIARALGKDPSAAGDILQILSGYGASGNRGGDPRPTPSRGGSNVNFDRALTSLERQISSYIVEDRPIWSDPVDSRTFLDSVDELLAIAGDLRSMAGDKSVAVCQSRADELIQQVMFRLQEEFGFVMDRAPDSFDSDDEFPGEEDNDTSDGVIVARPITDYKIVIEALQSSVIGDLNAIAVRMVAGGFAKECSRVYSSRRREFLEESLSRLHLRGLSMEEVQESPWQDLEDEIDRWIKAVTLIFHVFFPSERLLCDRVFSDLPVSSVTDLSFMEVCRGTTTQLLNFADAIALGSRLPERLFKVVDLYEAMQDLIPKMETLFSDRYCSPLRHEALAIHKRLGEAIRGIFMELENLIRRDPPKTAFPGGGIHPITRYVMNYLRAACKSRQSLEQILDQTGNETGSDTRPLSVQIIWVLELLESNLEGKKRTYRDPSLCFLFMMNNDKYILDKAKDNELGLVLGEDWIVKHAAKLRQYHSNYRRSSWNQVVGLLRTDGPYPKLVENLRLFKSQFDEVCKVQSQWVVSDGQLREELRSSVAGIVSPAYSNFIRRLKESPEINGRRGEPFIPYTVEDVEFIIKRLFKESSS

SEQ ID NO: 81666 - protein, 599 aa, Arabidopsis thaliana
  peptide (1)..(599): Ceres Seq. ID no. 12660721
MAEAGDENLYAAARDIARALGKDPSAAGDILQILSGYGASGNRGGDPRPTPSRGGSNVNFDRALTSLERQISSYIVEDRPIWSDPVDSRTFLDSVDELLAIAGDLRSMAGDKSVAVCQSRADELIQQVMFRLQEEFGFVMDRAPDSFDSDDEFPGEEDNDTSDGVIVARPITDYKIVIEALQSSVIGDLNAIAVRMVAGGFAKECSRVYSSRRREFLEESLSRLHLRGLSMEEVQESPWQDLEDEIDRWIKAVTLIFHVFFPSERLLCDRVFSDLPVSSVTDLSFMEVCRGTTTQLLNFADAIALGSRLPERLFKVVDLYEAMQDLIPKMETLFSDRYCSPLRHEALAIHKRLGEAIRGIFMELENLIRRDPPKTAFPGGGIHPITRYVMNYLRAACKSRQSLEQILDQTGNETGSDTRPLSVQIIWVLELLESNLEGKKRTYRDPSLCFLFMMNNDKYILDKAKDNELGLVLGEDWIVKHAAKLRQYHSNYRRSSWNQVVGLLRTDGPYPKLVENLRLFKSQFDEVCKVQSQWVVSDGQLREELRSSVAGIVSPAYSNFIRRLKESPEINGRRGEPFIPYTVEDVEFIIKRLFKESSS

SEQ ID NO: 81667 - protein, 492 aa, Arabidopsis thaliana
  peptide (1)..(492): Ceres Seq. ID no. 12660722
MAGDKSVAVCQSRADELIQQVMFRLQEEFGFVMDRAPDSFDSDDEFPGEEDNDTSDGVIVARPITDYKIVIEALQSSVIGDLNAIAVRMVAGGFAKECSRVYSSRRREFLEESLSRLHLRGLSMEEVQESPWQDLEDEIDRWIKAVTLIFHVFFPSERLLCDRVFSDLPVSSVTDLSFMEVCRGTTTQLLNFADAIALGSRLPERLFKVVDLYEAMQDLIPKMETLFSDRYCSPLRHEALAIHKRLGEAIRGIFMELENLIRRDPPKTAFPGGGIHPITRYVMNYLRAACKSRQSLEQILDQTGNETGSDTRPLSVQIIWVLELLESNLEGKKRTYRDPSLCFLFMMNNDKYILDKAKDNELGLVLGEDWIVKHAAKLRQYHSNYRRSSWNQVVGLLRTDGPYPKLVENLRLFKSQFDEVCKVQSQWVVSDGQLREELRSSVAGIVSPAYSNFIRRLKESPEINGRRGEPFIPYTVEDVEFIIKRLFKESSS

SEQ ID NO: 81668 - DNA, 1407 bp, Arabidopsis thaliana
  misc_feature (1)..(1407): Ceres Seq. ID no. 12660756
  misc_feature (1)..(1407): Ortholog of  Ceres SEQ ID NO 13594380 as cited in SEQ ID NO 58039
atggctgttggttcgatgaatgtcgaagaaggcactaaagcttttcctgcgaagctgacaggtcaagtctttctttgctgtgtcattgctgctgttggtggtctcatgtttggttacgacatcggaatctcaggaggtgtaacgagtatggacactttcttgttagattttttcccacacgtgtacgagaagaaacacagagtacacgaaaacaactactgcaaattcgatgaccagctcttgcagttgttcacttcctcactctacttggctggaatcttcgctagctttatttcttcctatgtttctagggcttttggaagaaaacccacaatcatgctcgcctccatcttcttcctcgtcggtgctatcctcaacttatctgcccaagaactcggcatgttgatcggtggtcgtattcttctcggctttggtatcggtttcggtaaccagaccgttccattgttcatctcagagattgctccggcgagatacagaggaggactaaacgtcatgttccagtttctcatcaccattggaatcttagcagcaagttatgtgaactacttaacttccacgttgaaaaacggctggagatattctctcggtggtgctgctgtccccgctttaatcctcttgataggatccttctttatccacgagactccggctagtctcatcgagcgcggtaaagacgaaaaggggaagcaagtcctgaggaagatcagaggcattgaagatattgagctcgagttcaatgagatcaaatacgcaacagaggtagcgacaaaggtgaaaagcccattcaaagaactcttcaccaagagtgagaacagaccaccattggtgtgtggaacgttacttcagttctttcaacagttcaccggtatcaacgtggttatgttctacgctccagttttgttccagacgatgggtagtggtgacaacgcttctctgatctctactgttgtcaccaatggtgtgaacgcaatcgctacagttatctctcttttagtggttgatttcgccggtagaaggtgtcttctgatggaaggagctctccagatgaccgctacacagatgacaattggaggcattctcttagctcacttgaagctagttggtcctattactggccatgccatctaccctcttgaagtgagaaatgctggttacttctgtgcggtggcgatgaacatggtctgcactttcatcattggacagttcttcttgtctgctctctgcagattcagatcattattgttcttcttcttcggaataatgaacattatcatgggactatttgtcgtgttttttcttcccgaaaccaaaggtgttcctattgaggaaatggccgagaagcgttggaaaacgcacccgcgttggaagaaatatttcaaagactag

SEQ ID NO: 81669 - protein, 468 aa, Arabidopsis thaliana
  peptide (1)..(468): Ceres Seq. ID no. 12660757
MAVGSMNVEEGTKAFPAKLTGQVFLCCVIAAVGGLMFGYDIGISGGVTSMDTFLLDFFPHVYEKKHRVHENNYCKFDDQLLQLFTSSLYLAGIFASFISSYVSRAFGRKPTIMLASIFFLVGAILNLSAQELGMLIGGRILLGFGIGFGNQTVPLFISEIAPARYRGGLNVMFQFLITIGILAASYVNYLTSTLKNGWRYSLGGAAVPALILLIGSFFIHETPASLIERGKDEKGKQVLRKIRGIEDIELEFNEIKYATEVATKVKSPFKELFTKSENRPPLVCGTLLQFFQQFTGINVVMFYAPVLFQTMGSGDNASLISTVVTNGVNAIATVISLLVVDFAGRRCLLMEGALQMTATQMTIGGILLAHLKLVGPITGHAIYPLEVRNAGYFCAVAMNMVCTFIIGQFFLSALCRFRSLLFFFFGIMNIIMGLFVVFFLPETKGVPIEEMAEKRWKTHPRWKKYFKD

SEQ ID NO: 81670 - protein, 463 aa, Arabidopsis thaliana
  peptide (1)..(463): Ceres Seq. ID no. 12660758
MNVEEGTKAFPAKLTGQVFLCCVIAAVGGLMFGYDIGISGGVTSMDTFLLDFFPHVYEKKHRVHENNYCKFDDQLLQLFTSSLYLAGIFASFISSYVSRAFGRKPTIMLASIFFLVGAILNLSAQELGMLIGGRILLGFGIGFGNQTVPLFISEIAPARYRGGLNVMFQFLITIGILAASYVNYLTSTLKNGWRYSLGGAAVPALILLIGSFFIHETPASLIERGKDEKGKQVLRKIRGIEDIELEFNEIKYATEVATKVKSPFKELFTKSENRPPLVCGTLLQFFQQFTGINVVMFYAPVLFQTMGSGDNASLISTVVTNGVNAIATVISLLVVDFAGRRCLLMEGALQMTATQMTIGGILLAHLKLVGPITGHAIYPLEVRNAGYFCAVAMNMVCTFIIGQFFLSALCRFRSLLFFFFGIMNIIMGLFVVFFLPETKGVPIEEMAEKRWKTHPRWKKYFKD

SEQ ID NO: 81671 - protein, 433 aa, Arabidopsis thaliana
  peptide (1)..(433): Ceres Seq. ID no. 12660759
MFGYDIGISGGVTSMDTFLLDFFPHVYEKKHRVHENNYCKFDDQLLQLFTSSLYLAGIFASFISSYVSRAFGRKPTIMLASIFFLVGAILNLSAQELGMLIGGRILLGFGIGFGNQTVPLFISEIAPARYRGGLNVMFQFLITIGILAASYVNYLTSTLKNGWRYSLGGAAVPALILLIGSFFIHETPASLIERGKDEKGKQVLRKIRGIEDIELEFNEIKYATEVATKVKSPFKELFTKSENRPPLVCGTLLQFFQQFTGINVVMFYAPVLFQTMGSGDNASLISTVVTNGVNAIATVISLLVVDFAGRRCLLMEGALQMTATQMTIGGILLAHLKLVGPITGHAIYPLEVRNAGYFCAVAMNMVCTFIIGQFFLSALCRFRSLLFFFFGIMNIIMGLFVVFFLPETKGVPIEEMAEKRWKTHPRWKKYFKD

SEQ ID NO: 81672 - DNA, 1462 bp, Arabidopsis thaliana
  misc_feature (1)..(1462): Ceres Seq. ID no. 12660760
  misc_feature (1)..(1462): Ortholog of  Ceres SEQ ID NO 14315892 as cited in SEQ ID NO 57776
  misc_feature (1)..(1462): Ortholog of  Ceres SEQ ID NO 13662173 as cited in SEQ ID NO 62002
gaaattcattttactccggtgggtcgtcaggtgcagagagttctggaatatccattgcgcttggagaatcgttcgccgatgtcttactcaagaaggtcaagatactctccttcactatctccttatgacaagcgtcgtggaaggtctgtgtcaaggtcattgtctagaagcccgacgaggagtgtctcaagcgatgctgagaatcctggtaacagtttatatgtaactggattgtctcaccgggttactgaaagagatctggaggatcatttcgctaaagaaggaaaggtaactgatgttcaccttgtcctggacccatggactagagaatctcgcggatttggttttatctctatgaaaagtgttggtgatgctaaccgttgcatcagatctctagatcactctgttctgcagggccgcgtcatcactgttgagaagtttctgtggcagcaggtctgctgtttgtagcagcagtgcttcaccaaatagcaaacgttgcaacagttcaaacacatcaagtttcagacatttagggcaagacgtcgtagaggacgtactccaactccaggaaagtacttggggctgagaactgctcgaggacgacataagtctcctagctactctccccgcaggtctgttagctgctctcgtagtcgtagtcgaagctactcatctgatcggggcagatcttattctccaagctatgggagaagaggaaggtcatcctcgtactcacccttctatcgacgacgcagattctactctccttcgagatctccttcacctgatgatcgttacaacaggagacgcgacagatcatactcaccttactacaggcggagggaccggtccagatcctactcacgtaactgtagagcacgggacagatcaccttactacatgcggaggtacaggtccagatccaggtcatactcgcctcgctacagagcacgtgaccgatcatgctcaccctactacaggggaagagaccggtcttattcaccccactaccaagggagagacagatcctactcacctgaaagtcgttactacagaaggcacaggtcggtatcgggaagcgtaagccctggagggagaagcatgtcacgtagcatatccccaaggaagggaaggaaagagagcagaagcaagtctcggaggcacgacaggcaatcttcaatgtgtcattcgaggagcgcaagatcaagcacctccagatccgtcagcccataacagtctctacttacttgaagttgacatcaatcactcacgtctgttgttgtattaagcattttgggacttgtctattccttgtatttggaattgatgacagtacgtatgttatgttggtttggtgttaggatactttattacttctgtggaaatgttgctttggcgacgagtcgtgagagaaatggaatctcttctttgttacaaaaaatctattttcatgtctttctac

SEQ ID NO: 81673 - protein, 155 aa, Arabidopsis thaliana
  peptide (1)..(155): Ceres Seq. ID no. 12660761
EIHFTPVGRQVQRVLEYPLRLENRSPMSYSRRSRYSPSLSPYDKRRGRSVSRSLSRSPTRSVSSDAENPGNSLYVTGLSHRVTERDLEDHFAKEGKVTDVHLVLDPWTRESRGFGFISMKSVGDANRCIRSLDHSVLQGRVITVEKFLWQQVCCL

SEQ ID NO: 81674 - protein, 129 aa, Arabidopsis thaliana
  peptide (1)..(129): Ceres Seq. ID no. 12660762
MSYSRRSRYSPSLSPYDKRRGRSVSRSLSRSPTRSVSSDAENPGNSLYVTGLSHRVTERDLEDHFAKEGKVTDVHLVLDPWTRESRGFGFISMKSVGDANRCIRSLDHSVLQGRVITVEKFLWQQVCCL

SEQ ID NO: 81675 - protein, 126 aa, Arabidopsis thaliana
  peptide (1)..(126): Ceres Seq. ID no. 12660763
MGEEEGHPRTHPSIDDADSTLLRDLLHLMIVTTGDATDHTHLTTGGGTGPDPTHVTVEHGTDHLTTCGGTGPDPGHTRLATEHVTDHAHPTTGEETGLIHPTTKGETDPTHLKVVTTEGTGRYREA

SEQ ID NO: 81676 - DNA, 1159 bp, Arabidopsis thaliana
  misc_feature (1)..(1159): Ceres Seq. ID no. 12660767
  misc_feature (1)..(1159): Ortholog of  Ceres SEQ ID NO 15171450 as cited in SEQ ID NO 51602
aaaattctctctttctctcttcttcgaaattcttcctcctctttttctgcagaaactatccaaaaatctcttcgttttcacaatttctcattattaaaaaaaaaactttaaattcttcttcttcaagaaaaaatggcggtggatcttttatcggaaaattctaatatgagtccaagaatctcattttcacgtgacttttgtcaatcagacgcaataccaatcgagaaacgtcccttaagatcatcaaactcgaaaccatcaagcctcaattcaagcatagatttcgatttctgcattcccggcggcgtaaattccggcgaaagcttcgatcaaggttcttggtccgccgatgaactcttctctaacggcaaaatcttaccaacggaaatcaagaaaaaaccagaaccgggtaaaaaagaaccagaaccaaaaccggttaaatctaaaccggattcaagaaaacagaggaaacaaccaaacgaagaacaacaagaagacgacgtgataatcacgacggaggagaaaaccaatacgaagtcgttttgggggtttaagagaagcagtagtttaaactgtggaagtacttatggacggagtttatgtccgttaccattactaaaccggagtaattcaaccggttcaacgtcgagtaaacagaaacagagcagctcaaggaaacataacgagcatgttaagttacaacaatcttcatcgttgtcttcttcttcttctgcttcgtcttctttgagtaataatggtttttcgaaaccaccattgaagaaaagctatggaggttatagttatggtagccatggtggtggtgggattagagtgagtccggttataaacgttgttccttctgggaatttgtttggttttggttcaatgttttctggtaatggaagagacaagaacaagaaaagataaaaaaaatgtaagaatagatatgtttctggttttactgttttattcttctgatttgttcttcttcttgttctctgaactctgaagattttctgacagtgtgttttgtggatcccatgccagtattattttttagactattgtggtgtaattgtgttttgtttgatttgttagtttgtgttctattcatgtttaaatctagattttttttttaataagaggctgctaatttcag

SEQ ID NO: 81677 - protein, 264 aa, Arabidopsis thaliana; identical to SEQ ID NO: 28939
  peptide (1)..(264): Ceres Seq. ID no. 12660768

SEQ ID NO: 81678 - protein, 253 aa, Arabidopsis thaliana; identical to SEQ ID NO: 28940
  peptide (1)..(253): Ceres Seq. ID no. 12660769

SEQ ID NO: 81679 - DNA, 1127 bp, Arabidopsis thaliana
  misc_feature (1)..(1127): Ceres Seq. ID no. 12660774
  misc_feature (1)..(1127): Ortholog of  Ceres SEQ ID NO 12615365 as cited in SEQ ID NO 63027
  misc_feature (1)..(1127): Ortholog of  Ceres SEQ ID NO 12783179 as cited in SEQ ID NO 0
tttctcctaccgtcgaactaaatcctagggcacaggtgaaatcgccgagtgacgtctagccaccgcaccgcctccttctccggttatctcgctactaatcagactattccacagctatgtcacaggtagacaacagaaattcatcagcagccaagcgtgctagaactgacggggggcgtagagaagatgattggatctgcccaagttgtggcaatgtcaacttttcattcaggacaacttgcaatatgcgtaattgcactcagcctagacctgcagatcataatggaaagtctgctcccaaacctatgcaacatcaacaaggtttctcatcacccggggcatacttaggatctgggggtccccctccagtatatatgggcgggtcaccatatggatctcctctctttaatggatcgtctatgcctccttatgacgtcccattttctgggggttcgccttaccattttaactataatagccgaatgcctgccggagctcattacagaccattacatatgtctggaccaccaccataccatggcggatctatgatgggaagtggtggtatgtatggaatgcctccaccaatagacaggtatggccttggtatggcaatgggtcctggttctgccgctgccatgatgccaagaccaaggttttacccagatgaaaaatcacaaaagagagattcaactcgcgataatgattggacatgtccgaattgtggtaatgtaaacttctcattcagaactgtatgtaacatgaggaagtgcaacactccaaagcctggttctcagcagggtggaagctcagataaaatatccaaacaaaatgcaccggaagggagctggaagtgtgataactgtggaaatataaactacccattcaggagcaaatgcaacaggcaaaactgtggagctgataagcctggggatcggtcgaatggatctccgtcccgtgcaccagaagagaacgatcaggtttgtaagatgtatctatgtggtcacaactgtttgttaataaaatgtttgcctctgaaactcgtaaatgtaacaacctgtgtagattttatgccttgtgaaagcagaggttatatgtttatgaaaaaattgactccgactacgttt

SEQ ID NO: 81680 - protein, 337 aa, Arabidopsis thaliana
  peptide (1)..(337): Ceres Seq. ID no. 12660775
MSQVDNRNSSAAKRARTDGGRREDDWICPSCGNVNFSFRTTCNMRNCTQPRPADHNGKSAPKPMQHQQGFSSPGAYLGSGGPPPVYMGGSPYGSPLFNGSSMPPYDVPFSGGSPYHFNYNSRMPAGAHYRPLHMSGPPPYHGGSMMGSGGMYGMPPPIDRYGLGMAMGPGSAAAMMPRPRFYPDEKSQKRDSTRDNDWTCPNCGNVNFSFRTVCNMRKCNTPKPGSQQGGSSDKISKQNAPEGSWKCDNCGNINYPFRSKCNRQNCGADKPGDRSNGSPSRAPEENDQVCKMYLCGHNCLLIKCLPLKLVNVTTCVDFMPCESRGYMFMKKLTPTTF

SEQ ID NO: 81681 - protein, 294 aa, Arabidopsis thaliana; identical to SEQ ID NO: 39148
  peptide (1)..(294): Ceres Seq. ID no. 12660776

SEQ ID NO: 81682 - protein, 274 aa, Arabidopsis thaliana; identical to SEQ ID NO: 39149
  peptide (1)..(274): Ceres Seq. ID no. 12660777

SEQ ID NO: 81683 - DNA, 3330 bp, Arabidopsis thaliana
  misc_feature (1)..(3330): Ceres Seq. ID no. 12660788
  misc_feature (1)..(3330): Ortholog of  Ceres SEQ ID NO 13584744 as cited in SEQ ID NO 69137
aattaacaaagttggagtctttgttcacttcactgtctctcatcacacgctttccttctttatctcgtgaccactttcaaagccgaaaagaacttggtatttttgcattgaattatagagatttaagagccatcgatgtgtgtgtgatcttcaatgggtttatgcttagctcaattggctgtaacatgtttgttcctagtaccttttgttctgtctcaagttacagagtttgtaagtatagattgtggttgctcaagtaactacacagacccaagaactggactaggatgggtttcagattcagagatcatcaaacagggcaagccagtaactttggccaataccaattggaactcgatgcaataccgtaggagaagagatttcccaactgacaataagaagtattgttacagactcagtaccaaagagagaaggcgatacattgtcagaactacatttctttatggtggtttgggtagtgaggaagcctacccaaagtttcaactttacttggatgcaacgaaatgggctactgtgacgattcaggaggtctctagggtttatgttgaggagttgatcgtaagggcaacttcaagttatgtggatgtttgtgtatgctgtgctatcaccggttctcctttcatgtccactcttgagcttcgcccgttgaacctttcgatgtatgccactgactacgaggataatttcttcttgaaggttgctgccagagtgaattttggtgctccgaacatggatgccttgaggtacccagatgatccatatgacagaatctgggagtcagatattaacaaacggccaaactatcttgttggtgtggctcctggaacgacaagaatcaatacgtcaaagactataaatacgttgactagagagtatccgcctatgaaagtcatgcaaacagcagtagttggcacacaaggactgatcagctatagattgaacctggaagacttccctgccaatgctcgtgcgtatgcttattttgctgaaattgaagaacttggtgctaacgagacccggaaatttaagttggtgcagccatactttcctgactatagtaatgcagtggtgaacattgccgagaatgccaatgggagctatactctctatgaacctagctatatgaatgtgactttggattttgttttgacgttctcatttgggaagactaaggattctacgcaagggccactcctaaatgcaattgaaattagcaagtatctaccaatatccgtgaaaactgataggagtgacgtgtctgttcttgatgcaattcgttcgatgtcccctgatagcgattgggccagtgaaggaggagacccttgtatcccagttctttggtcgtgggtaaactgtagctcaacttcaccaccaagagtcacgaaaattgctctatcaaggaaaaatctgaggggtgagattccgcctgggatcaattatatggaggcattgacagagttgtgagcggttcaatgctgcatttgagatatcatcttgtattagtctctctgtcattcttttgttgagtaaacttgttctttgataggtggcttgacgataatgaattgaccggaactcttccagacatgagcaaacttgtcaacctgaaaatcatgcatctagaaaacaaccaacttagtggttcactcccaccataccttgctcatctgcctaacctacaagaactgtctatagaaaataactcctttaaaggaaaaattccttcagcgctattaaaggggaaagttttgttcaaatataataataatcctgagcttcagaacgaggcacagcgaaagcacttttggcagatactggggatatcaatagccgctgtcgcaattctgttgctactagttggaggaagtcttgttttactttgtgcccttcgtaagaccaaaagagctgataaaggtgattccacagagactaagaaaaaaggtttagtagcttactcagcagtgcggggcggacacttattagatgaaggtgtagcatatttcatatcacttcctgtgctcgaagaggcaaccgataatttttccaagaaagttggaagaggaagttttgggtctgtctactatggtaggatgaaagatgggaaagaagttgcagttaagataactgcagatccttctagccacttgaacagacaatttgtgactgaggttgctctattatcgagaattcaccacaggaacttggttcctttgattggatattgtgaagaagcagatcggcgtattttggtttacgaatatatgcataatggaagcttgggagatcacttgcatggttcaagcgactacaagccactagactggctaactcggctacaaattgcacaagatgctgccaaaggtttgtagcacaatctcaagattaaatctttagtgtggctataatatgaatccattggacagacaaaacttcagattattacaggtcttgaatacttgcatactggctgcaatcctagtattattcatagggatgtgaaatcaagtaatattctcctggacattaacatgagagccaaagtatctgactttggactctcgagacagacagaggaagacttaactcatgtatccagtgtcgcaaaaggaactgttggataccttgatccagagtattatgctagtcagcagctgactgagaagagcgatgtctacagttttggcgttgttctttttgaattactctctggaaagaagccagtctcagcagaagattttggtcctgaactgaatatagttcactgggcaagatcgctgatccgtaaaggagacgtgtgcgggatcatagatccatgtatagcaagcaacgtgaagatcgagtcagtctggagagttgcagaggtcgcaaaccaatgtgttgagcagcgtggacataacaggccaaggatgcaggaagtaatagtggcaatacaagacgcgatcaggatcgagagaggaaacgaaaatggactgaagtcatcgagttcaagcagctcaaaggcacaatcatctcgtaaaaccttgcttactagcttcctcgagctagagagccctgacatctcaagaaacagcctagctccagctgctaggtgagtcctcttaaagctcgagctctcatgtttaccctttggacttaccatcgtcacatagatgaatacattatatacgtattaaaatgtgtgtatgtgatgtagtgtcaaatttaatctgtatctctttacacacttctgacatgacattgtgtagatgttttagttgatgatagcacaaaaccataatttaattattgaaggtaacaacataatatgct

SEQ ID NO: 81684 - protein, 443 aa, Arabidopsis thaliana
  peptide (1)..(443): Ceres Seq. ID no. 12660789
MGLCLAQLAVTCLFLVPFVLSQVTEFVSIDCGCSSNYTDPRTGLGWVSDSEIIKQGKPVTLANTNWNSMQYRRRRDFPTDNKKYCYRLSTKERRRYIVRTTFLYGGLGSEEAYPKFQLYLDATKWATVTIQEVSRVYVEELIVRATSSYVDVCVCCAITGSPFMSTLELRPLNLSMYATDYEDNFFLKVAARVNFGAPNMDALRYPDDPYDRIWESDINKRPNYLVGVAPGTTRINTSKTINTLTREYPPMKVMQTAVVGTQGLISYRLNLEDFPANARAYAYFAEIEELGANETRKFKLVQPYFPDYSNAVVNIAENANGSYTLYEPSYMNVTLDFVLTFSFGKTKDSTQGPLLNAIEISKYLPISVKTDRSDVSVLDAIRSMSPDSDWASEGGDPCIPVLWSWVNCSSTSPPRVTKIALSRKNLRGEIPPGINYMEALTEL

SEQ ID NO: 81685 - protein, 375 aa, Arabidopsis thaliana
  peptide (1)..(375): Ceres Seq. ID no. 12660790
MQYRRRRDFPTDNKKYCYRLSTKERRRYIVRTTFLYGGLGSEEAYPKFQLYLDATKWATVTIQEVSRVYVEELIVRATSSYVDVCVCCAITGSPFMSTLELRPLNLSMYATDYEDNFFLKVAARVNFGAPNMDALRYPDDPYDRIWESDINKRPNYLVGVAPGTTRINTSKTINTLTREYPPMKVMQTAVVGTQGLISYRLNLEDFPANARAYAYFAEIEELGANETRKFKLVQPYFPDYSNAVVNIAENANGSYTLYEPSYMNVTLDFVLTFSFGKTKDSTQGPLLNAIEISKYLPISVKTDRSDVSVLDAIRSMSPDSDWASEGGDPCIPVLWSWVNCSSTSPPRVTKIALSRKNLRGEIPPGINYMEALTEL

SEQ ID NO: 81686 - protein, 280 aa, Arabidopsis thaliana
  peptide (1)..(280): Ceres Seq. ID no. 12660791
MSTLELRPLNLSMYATDYEDNFFLKVAARVNFGAPNMDALRYPDDPYDRIWESDINKRPNYLVGVAPGTTRINTSKTINTLTREYPPMKVMQTAVVGTQGLISYRLNLEDFPANARAYAYFAEIEELGANETRKFKLVQPYFPDYSNAVVNIAENANGSYTLYEPSYMNVTLDFVLTFSFGKTKDSTQGPLLNAIEISKYLPISVKTDRSDVSVLDAIRSMSPDSDWASEGGDPCIPVLWSWVNCSSTSPPRVTKIALSRKNLRGEIPPGINYMEALTEL

SEQ ID NO: 81687 - DNA, 2046 bp, Arabidopsis thaliana
  misc_feature (1)..(2046): Ceres Seq. ID no. 12660824
  misc_feature (1)..(2046): Ortholog of  Ceres SEQ ID NO 15180188 as cited in SEQ ID NO 0
aaacatacatttatgatttaacgcaaacccaaaaagagccttcaccttttttctcttcgtcttcttcaccatcttgtggggaaaaacaaaacttctccggccatggatcctggcgacccaacttcaataatcttttcaaagatcagaactttcgaacttgagaacgcttccagagtcattgactattttctcttgcaagacatggaacaaagagatttgattcgaattgcttttggtcctgactctctcatacagactttctgtcagaaagctaaagtcgatttaggtttttcctcgaacggtttctcgagacccatcaatatccatggccagtcattgtcctcgtcttctcccagaaatgggttcttagagttctcgagaaaccctagtaaccctttgtcttcttcgttaactttgaacacactcagagataataagcctaacttcaattctagtccttttcgtgaaagttcatcactttttgcctcttcttccggcgatgagcagcagcaacaacaattcagtaacaactttctgttcacaaacgacgaggacccatttgccaattctcacaagaggagtttctctgctaacgatgcttgttttgagtcagaggaaccatggtttggaggaggaaatggttgtcatcaatttccacaaggcggtttagttgatggttttggttcctctggtgtctttggatcgccgagtgagatggattacatgcttgaggggatgatgaggatgaagttagctcagcaaaagagcatggttgctgctcagtttatggcggcttgtggctctccaatgttgcatagacacggatcaggacattttggagaagaatgtggtaactattttagtcaaggaaggcatgaaagagaggattcagtctctaaacagatttacttgacatttccatctgaaagctccttcactgatgaagacgtctcaacctatttcagagattttggacttgtggatgatgtgaggattccatatcagcagcaaaggatgtatgggtttgtaacttttgctaaggctgaaactgtgagaaccatattagctcgtggaaaccctcatttcatatgtgactcacgtgtgctcgttaaaccatacaaggagaaaggaaaaatccttcaaaagaggcagcagcaacaactacacgagttgttggagagagggaactattcaccttcttcaagtccgtctggaaaggactcgagggaactatatgaatgtcgcttaggaccaaggatgttttcaaagaagacacaggagatgttgcgaagaaaaaccgagcaagctgatttacaacatgccatagaagtagaactccaaagatgaaggttcttgaatctgcaactacctgacatggagaataaatatattcaccatcaccaccagcgtagtccttctattggttctccctctcatttcccacctcgattcaatcatagtcttctctttcaatcaggaaacaacaacgaagaaatcatggaaggcgacagtgatagaagtgagaaagatcttcaacaagtagcaaccagcaacgaagaacgtggttacaataacggtttctacaaagggcaagagacgagtctggagaatactctccctgatagcttgtttggttctccaaaaaaatctggcgaaacctaccaaaccgagtctgataccgagcataataataaggaagcctcatcaaatcagttagcgtagcaatgggcagaaagaagcatgtgtatgaatgaaaagaaaggtgtagaagactgataaaagaatgaagtagaagagaagaattgtctatatatagtaaaagctaagaggtcacatggaacacaagagagaaggttaaagagaacagttttaggattataatatcatctacaataataggattttaccactaatctcagcaacatatgaatacagatcaacacagtaactgtaactcacaagtaggtttctttttggtaatttctttttaccttatcggatacaacacagttaccatggttgtatgaaatgcatgtgttttttctt

SEQ ID NO: 81688 - protein, 414 aa, Arabidopsis thaliana
  peptide (1)..(414): Ceres Seq. ID no. 12660825
MDPGDPTSIIFSKIRTFELENASRVIDYFLLQDMEQRDLIRIAFGPDSLIQTFCQKAKVDLGFSSNGFSRPINIHGQSLSSSSPRNGFLEFSRNPSNPLSSSLTLNTLRDNKPNFNSSPFRESSSLFASSSGDEQQQQQFSNNFLFTNDEDPFANSHKRSFSANDACFESEEPWFGGGNGCHQFPQGGLVDGFGSSGVFGSPSEMDYMLEGMMRMKLAQQKSMVAAQFMAACGSPMLHRHGSGHFGEECGNYFSQGRHEREDSVSKQIYLTFPSESSFTDEDVSTYFRDFGLVDDVRIPYQQQRMYGFVTFAKAETVRTILARGNPHFICDSRVLVKPYKEKGKILQKRQQQQLHELLERGNYSPSSSPSGKDSRELYECRLGPRMFSKKTQEMLRRKTEQADLQHAIEVELQR

SEQ ID NO: 81689 - protein, 381 aa, Arabidopsis thaliana
  peptide (1)..(381): Ceres Seq. ID no. 12660826
MEQRDLIRIAFGPDSLIQTFCQKAKVDLGFSSNGFSRPINIHGQSLSSSSPRNGFLEFSRNPSNPLSSSLTLNTLRDNKPNFNSSPFRESSSLFASSSGDEQQQQQFSNNFLFTNDEDPFANSHKRSFSANDACFESEEPWFGGGNGCHQFPQGGLVDGFGSSGVFGSPSEMDYMLEGMMRMKLAQQKSMVAAQFMAACGSPMLHRHGSGHFGEECGNYFSQGRHEREDSVSKQIYLTFPSESSFTDEDVSTYFRDFGLVDDVRIPYQQQRMYGFVTFAKAETVRTILARGNPHFICDSRVLVKPYKEKGKILQKRQQQQLHELLERGNYSPSSSPSGKDSRELYECRLGPRMFSKKTQEMLRRKTEQADLQHAIEVELQR

SEQ ID NO: 81690 - protein, 210 aa, Arabidopsis thaliana
  peptide (1)..(210): Ceres Seq. ID no. 12660827
MDYMLEGMMRMKLAQQKSMVAAQFMAACGSPMLHRHGSGHFGEECGNYFSQGRHEREDSVSKQIYLTFPSESSFTDEDVSTYFRDFGLVDDVRIPYQQQRMYGFVTFAKAETVRTILARGNPHFICDSRVLVKPYKEKGKILQKRQQQQLHELLERGNYSPSSSPSGKDSRELYECRLGPRMFSKKTQEMLRRKTEQADLQHAIEVELQR

SEQ ID NO: 81691 - DNA, 988 bp, Arabidopsis thaliana
  misc_feature (1)..(988): Ceres Seq. ID no. 12660828
  misc_feature (1)..(988): Ortholog of  Ceres SEQ ID NO 12610385 as cited in SEQ ID NO 55938
  misc_feature (1)..(988): Ortholog of  Ceres SEQ ID NO 13661939 as cited in SEQ ID NO 61170
aatttcatttccatttcgattcgattcctcctttgtgtgggaggcctttgttcggtcaacttatgtgttctgtttttgtctcttttttattgattagggaccgatctatcaaggcttcaagggcaaacagaaatggaccacgacaagacaggatgccaaagcccacctgaaggtcccaagctatgtactaacaactgcggtttctttggaagcgctgccacaatgaacatgtgttctaagtgtcacaaggatatgttgttccaacaggagcagggcgctaagtttgcatctgcagtgtctggaacatcgtcatccagcaacatcataaaggaaacctttaccgctgcgttggtcgatattgaaaccaaatccgttgagccgatgactgtttctgtacagccatcctctgtccaagtcgttgcagaggtagtagcaccagaagaagctgcgaaaccaaagggaccaagccgatgtactacttgcaataagcgggttggcctgactggattcaaatgtcgctgtgggagcctcttctgcggaacacaccgctatgcagacgtacatgactgctccttcaattaccatgctgctgcgcaagaggcgatagctaaggcaaacccggttgtgaaagcagagaagcttgacaaaatctgaaaatctaagtaaacttctctggtttcatcaggtggcctggtgtttccttctcctgtctgtgtctggttcaagtattctcatgttaaaaaggttttatataaggtcgaatgaaagcgtgcttgatctttagcgtcttccatctctctgtggtgtggaactttctattatctgtgtttgcaagcagagaaacgtgctcttaaaaaaaatgctttgtgtgtttatctttctactatttttgagcactgtgttattgtttcctgtttggtctgtatcatattgagattgtctctgtagctacatgaagcttatttaaaaaggcctgtgtttgtccttc

SEQ ID NO: 81692 - protein, 173 aa, Arabidopsis thaliana
  peptide (1)..(173): Ceres Seq. ID no. 12660829
MDHDKTGCQSPPEGPKLCTNNCGFFGSAATMNMCSKCHKDMLFQQEQGAKFASAVSGTSSSSNIIKETFTAALVDIETKSVEPMTVSVQPSSVQVVAEVVAPEEAAKPKGPSRCTTCNKRVGLTGFKCRCGSLFCGTHRYADVHDCSFNYHAAAQEAIAKANPVVKAEKLDKI

SEQ ID NO: 81693 - protein, 143 aa, Arabidopsis thaliana
  peptide (1)..(143): Ceres Seq. ID no. 12660830
MNMCSKCHKDMLFQQEQGAKFASAVSGTSSSSNIIKETFTAALVDIETKSVEPMTVSVQPSSVQVVAEVVAPEEAAKPKGPSRCTTCNKRVGLTGFKCRCGSLFCGTHRYADVHDCSFNYHAAAQEAIAKANPVVKAEKLDKI

SEQ ID NO: 81694 - protein, 141 aa, Arabidopsis thaliana
  peptide (1)..(141): Ceres Seq. ID no. 12660831
MCSKCHKDMLFQQEQGAKFASAVSGTSSSSNIIKETFTAALVDIETKSVEPMTVSVQPSSVQVVAEVVAPEEAAKPKGPSRCTTCNKRVGLTGFKCRCGSLFCGTHRYADVHDCSFNYHAAAQEAIAKANPVVKAEKLDKI

SEQ ID NO: 81695 - DNA, 535 bp, Arabidopsis thaliana
  misc_feature (1)..(535): Ceres Seq. ID no. 12660847
  misc_feature (1)..(535): Ortholog of  Ceres SEQ ID NO 15177246 as cited in SEQ ID NO 57731
acttccttctcttgaagccggaaaccttaaggttttatatctgggaaaaaactcgcatccgcttcaatgactaagggaacgggaagtttcggaaagagaagaaacaagagtcacacactctgtgtcagatgtggccgtcgcagtttccacatccagaagagtcgttgctctgcttgtgcttatcccgccgctcgcaagaggacttacaactggagtgtgaaggcaatccgtagaaagactactggaactggaaggatgaggtatcttcgcaatgtgcctcgcaggttcaagaccggtttcagagagggtaccgaagccaagccaaggaacaagggagttgcttcatcagcttaaacttgtttttgagcatcaagggagagagaattctgagtttgttgttcacaagattactactcttaagtgtctgattatgactatctttttgtgtggtctttgcgtttttaaagttttggacatggatggatttcaatttgcaagtcttttaattctctttattctaatcattatggttcct

SEQ ID NO: 81696 - protein, 95 aa, Arabidopsis thaliana; identical to SEQ ID NO: 42325
  peptide (1)..(95): Ceres Seq. ID no. 12660848

SEQ ID NO: 81697 - protein, 88 aa, Arabidopsis thaliana; identical to SEQ ID NO: 42326
  peptide (1)..(88): Ceres Seq. ID no. 12660849

SEQ ID NO: 81698 - DNA, 615 bp, Arabidopsis thaliana
  misc_feature (1)..(615): Ceres Seq. ID no. 12660870
  misc_feature (1)..(615): Ortholog of  Ceres SEQ ID NO 13598124 as cited in SEQ ID NO 61531
attctctgtttcgtgttccacttcacgattgagagaacactttcctaagtttatcaagaacatttcttttcaatttctcgattctttctggctcattctctcatctctgtttcatatctaaattattgattgagaattcgacttgtggaaatggcaacagttgcatcaaatctcgcttgtatcggaaaagtaacgatgtctagagctagttcaatggtaggatggaggttgcagataaattgcagaaagaaagagaaaggaagagatcagagtcattatccttacaaagtcattgaaatcactcctcctcctaaatctctcggcattcgttgccttcctcataaccttcaatgtggagagaacgtgatgatcgaagggcaaacgtacacaatctctgctgtgactcaccggtatcagctccggaaaggcaaatacgagccgagtgagaggcggctcgatgttctctctgctgctagatacgttttaaacctttacttcgacaatttgctccaaaactcctgacaacttttatttagctaaaaagtttggtctagaggattttcattgtatccatgaatgcttgtgaatttgttaagcaatgatttgtacttctct

SEQ ID NO: 81699 - protein, 123 aa, Arabidopsis thaliana
  peptide (1)..(123): Ceres Seq. ID no. 12660871
MATVASNLACIGKVTMSRASSMVGWRLQINCRKKEKGRDQSHYPYKVIEITPPPKSLGIRCLPHNLQCGENVMIEGQTYTISAVTHRYQLRKGKYEPSERRLDVLSAARYVLNLYFDNLLQNS

SEQ ID NO: 81700 - protein, 108 aa, Arabidopsis thaliana
  peptide (1)..(108): Ceres Seq. ID no. 12660872
MSRASSMVGWRLQINCRKKEKGRDQSHYPYKVIEITPPPKSLGIRCLPHNLQCGENVMIEGQTYTISAVTHRYQLRKGKYEPSERRLDVLSAARYVLNLYFDNLLQNS

SEQ ID NO: 81701 - protein, 102 aa, Arabidopsis thaliana
  peptide (1)..(102): Ceres Seq. ID no. 12660873
MVGWRLQINCRKKEKGRDQSHYPYKVIEITPPPKSLGIRCLPHNLQCGENVMIEGQTYTISAVTHRYQLRKGKYEPSERRLDVLSAARYVLNLYFDNLLQNS

SEQ ID NO: 81702 - DNA, 1062 bp, Arabidopsis thaliana
  misc_feature (1)..(1062): Ceres Seq. ID no. 12660874
  misc_feature (1)..(1062): Ortholog of  Ceres SEQ ID NO 13593889 as cited in SEQ ID NO 53305
  misc_feature (1)..(1062): Ortholog of  Ceres SEQ ID NO 13581959 as cited in SEQ ID NO 56156
atgggatctgttactgggttttactcaaatgaagtgtttgaattagatcctaaatgggttgttgatcctcaacatctctttgttggtcccaagattggtgaaggtgctcatgccaaaatctatgaaggaaagtataagaacaaaacagttgctattaagattgttaaaagaggagaatctcccgaagagattgcgaaaagagagagcagatttgcaagagaggtctctatgttgtctagagttcaacacaaaaatttggtcaagttcattggagcttgcaaagaaccaatcatggttatagtcaccgagcttttactcggtggtacattgcgtaaataccttgttagcttgcgtccagggagtttggacatacgtgtagctgttggatatgcccttgacattgctcgggcgatggaatgcttacactctcatggagtcatccatcgcgatctcaaaccagagagcttgatcttaactgcggattacaagactgttaaactagcagattttggtttagctagagaagaatcattaaccgagatgatgaccgcagaaactggtacatatcgttggatggctcccgagctttacagtacggtcacgttgaggcatggtgagaaaaaacactataaccataaggtagatgcatacagcttcgccattgtcttgtgggagcttatccacaacaaattaccttttgaaggcatgtcaaatctccaagccgcttacgctgctgcattcaagaacgtgaggccaagcgcagacgatttaccaaaggatttagcaatgattgtaacatcttgctggaaagaggatccaaacgatcgaccaaacttcacagagattattcaaatgcttctacgttgcctctccacaatctcatcaactgagcttgttcctccggccattaaacgtgttttctcgtcggaaaacacggtcttgccaccagaatcgccgggaacttgctcattgatgactgttagagacaaagatcagattcctaccgatgcaaactcggcgcagaatgaagttagaggaagcttcttcttcttctgctgctaa

SEQ ID NO: 81703 - protein, 353 aa, Arabidopsis thaliana
  peptide (1)..(353): Ceres Seq. ID no. 12660875
MGSVTGFYSNEVFELDPKWVVDPQHLFVGPKIGEGAHAKIYEGKYKNKTVAIKIVKRGESPEEIAKRESRFAREVSMLSRVQHKNLVKFIGACKEPIMVIVTELLLGGTLRKYLVSLRPGSLDIRVAVGYALDIARAMECLHSHGVIHRDLKPESLILTADYKTVKLADFGLAREESLTEMMTAETGTYRWMAPELYSTVTLRHGEKKHYNHKVDAYSFAIVLWELIHNKLPFEGMSNLQAAYAAAFKNVRPSADDLPKDLAMIVTSCWKEDPNDRPNFTEIIQMLLRCLSTISSTELVPPAIKRVFSSENTVLPPESPGTCSLMTVRDKDQIPTDANSAQNEVRGSFFFFCC

SEQ ID NO: 81704 - protein, 277 aa, Arabidopsis thaliana
  peptide (1)..(277): Ceres Seq. ID no. 12660876
MLSRVQHKNLVKFIGACKEPIMVIVTELLLGGTLRKYLVSLRPGSLDIRVAVGYALDIARAMECLHSHGVIHRDLKPESLILTADYKTVKLADFGLAREESLTEMMTAETGTYRWMAPELYSTVTLRHGEKKHYNHKVDAYSFAIVLWELIHNKLPFEGMSNLQAAYAAAFKNVRPSADDLPKDLAMIVTSCWKEDPNDRPNFTEIIQMLLRCLSTISSTELVPPAIKRVFSSENTVLPPESPGTCSLMTVRDKDQIPTDANSAQNEVRGSFFFFCC

SEQ ID NO: 81705 - protein, 256 aa, Arabidopsis thaliana
  peptide (1)..(256): Ceres Seq. ID no. 12660877
MVIVTELLLGGTLRKYLVSLRPGSLDIRVAVGYALDIARAMECLHSHGVIHRDLKPESLILTADYKTVKLADFGLAREESLTEMMTAETGTYRWMAPELYSTVTLRHGEKKHYNHKVDAYSFAIVLWELIHNKLPFEGMSNLQAAYAAAFKNVRPSADDLPKDLAMIVTSCWKEDPNDRPNFTEIIQMLLRCLSTISSTELVPPAIKRVFSSENTVLPPESPGTCSLMTVRDKDQIPTDANSAQNEVRGSFFFFCC

SEQ ID NO: 81706 - DNA, 813 bp, Arabidopsis thaliana
  misc_feature (1)..(813): Ceres Seq. ID no. 12660878
  misc_feature (1)..(813): Ortholog of  Ceres SEQ ID NO 14311463 as cited in SEQ ID NO 51400
atgtcgtcaccagacattgtcggaattttggaaaacacgaaggaacttgatcggttaaggaaagaccaagaagaagttttggttgagatcaataagatgcataaaaagcttcaagcttctcctgagatagttgagaagcctggtgatatttcattagcaaagcttaagaatttgtacattcaagcgaaagagctctcagaaaatgaagtaaccgtatcgaacattttgcttactcagttggatttgctgcttccatatggaccaacagggcagcaaagaagaaagttaggcgaaggtaatgatcagaagaggaagaggatgaaagttgattcagatgtaataagactttctccttccatgagaaatcaaatcgaagcatatgcaagtcttaagggtgaacaggttgctgcaagagttactgcagagagtgctgataaggatgaatggtttgtggttaaagttattcacttcgatagagaaacaaaagaagttgaagtacttgatgaagaaccaggagatgatgaagaaggaagcggtcagaggacctataagttgccaatgttatgcattttaccattcccaaagcgaaacgatccttcgaacacccaagagtttccaccgggtaaacacgtcttagctgtatatcccgggacaacagcactctacaaagcaactgtagtaagtaccccacgaaagaggaagtctgacgagtatttgcttgaattcgacgatgatgaggaagatggagcattgcctcaaagaacagtacctttccacaaagtggtagctttaccagaaggtcatcgccagtga

SEQ ID NO: 81707 - protein, 270 aa, Arabidopsis thaliana
  peptide (1)..(270): Ceres Seq. ID no. 12660879
MSSPDIVGILENTKELDRLRKDQEEVLVEINKMHKKLQASPEIVEKPGDISLAKLKNLYIQAKELSENEVTVSNILLTQLDLLLPYGPTGQQRRKLGEGNDQKRKRMKVDSDVIRLSPSMRNQIEAYASLKGEQVAARVTAESADKDEWFVVKVIHFDRETKEVEVLDEEPGDDEEGSGQRTYKLPMLCILPFPKRNDPSNTQEFPPGKHVLAVYPGTTALYKATVVSTPRKRKSDEYLLEFDDDEEDGALPQRTVPFHKVVALPEGHRQ

SEQ ID NO: 81708 - protein, 238 aa, Arabidopsis thaliana
  peptide (1)..(238): Ceres Seq. ID no. 12660880
MHKKLQASPEIVEKPGDISLAKLKNLYIQAKELSENEVTVSNILLTQLDLLLPYGPTGQQRRKLGEGNDQKRKRMKVDSDVIRLSPSMRNQIEAYASLKGEQVAARVTAESADKDEWFVVKVIHFDRETKEVEVLDEEPGDDEEGSGQRTYKLPMLCILPFPKRNDPSNTQEFPPGKHVLAVYPGTTALYKATVVSTPRKRKSDEYLLEFDDDEEDGALPQRTVPFHKVVALPEGHRQ

SEQ ID NO: 81709 - protein, 164 aa, Arabidopsis thaliana
  peptide (1)..(164): Ceres Seq. ID no. 12660881
MKVDSDVIRLSPSMRNQIEAYASLKGEQVAARVTAESADKDEWFVVKVIHFDRETKEVEVLDEEPGDDEEGSGQRTYKLPMLCILPFPKRNDPSNTQEFPPGKHVLAVYPGTTALYKATVVSTPRKRKSDEYLLEFDDDEEDGALPQRTVPFHKVVALPEGHRQ

SEQ ID NO: 81710 - DNA, 912 bp, Arabidopsis thaliana
  misc_feature (1)..(912): Ceres Seq. ID no. 12660901
  misc_feature (1)..(912): Ortholog of  Ceres SEQ ID NO 14314775 as cited in SEQ ID NO 56844
atgcatggcaacggaaagcagtgtcaagcttctatttgcgacggtgcaacagatcaggacaagaccgttataagcaagataatgcaacggttccgtccgatcgcaccaaaaccagctgtcggcgaatcttcagacgatacaaatagtgatagattccttggaagaaacagaagatcgaaacgaaagtatgttagggttcgggacaagaaaaatagtagtggtagtaataataagaaggatattactggtaaaaagaatggttgcgatagagggaacataaagaccgatcttgataaaaagatagacggtgatgatagaaccgatatcgtcacgcttcagctgctgccagagaaggatagagatataggaaacaatggagataaagctggtgagttttgttcggatctgagtgatatggatccaaaaaagagcttgtataattcgatcatagggctatcgtcatcttttgatcggaaggtggtggagtcgtggttgacggtggagtgtgtgagtgacacgtgtactgacttgggatggtatcacatcctggagcagctaggccgcatggatcaggcagaggagagagtgatgaggatgttagaggttgacacgtgtccatggttagtgtcggatgggtcaaaccgggtctgttgggtaaaccgggcctaccggaggatgatgggagctcccgacgtggatgttatcagggtgtggctggtggtggccatggaccttatggaggagatagcatgcatggtggagttatacggtgcggtgacgtgcagggttagggttaggtacgagccgtccacgtggaggaagatgacggtgccgtgtgatgtatggaggataagatcaggtgggtttgcttggagattggatgttgaatcagctctaaggcttggcatgtga

SEQ ID NO: 81711 - protein, 303 aa, Arabidopsis thaliana
  peptide (1)..(303): Ceres Seq. ID no. 12660902
MHGNGKQCQASICDGATDQDKTVISKIMQRFRPIAPKPAVGESSDDTNSDRFLGRNRRSKRKYVRVRDKKNSSGSNNKKDITGKKNGCDRGNIKTDLDKKIDGDDRTDIVTLQLLPEKDRDIGNNGDKAGEFCSDLSDMDPKKSLYNSIIGLSSSFDRKVVESWLTVECVSDTCTDLGWYHILEQLGRMDQAEERVMRMLEVDTCPWLVSDGSNRVCWVNRAYRRMMGAPDVDVIRVWLVVAMDLMEEIACMVELYGAVTCRVRVRYEPSTWRKMTVPCDVWRIRSGGFAWRLDVESALRLGM

SEQ ID NO: 81712 - protein, 276 aa, Arabidopsis thaliana
  peptide (1)..(276): Ceres Seq. ID no. 12660903
MQRFRPIAPKPAVGESSDDTNSDRFLGRNRRSKRKYVRVRDKKNSSGSNNKKDITGKKNGCDRGNIKTDLDKKIDGDDRTDIVTLQLLPEKDRDIGNNGDKAGEFCSDLSDMDPKKSLYNSIIGLSSSFDRKVVESWLTVECVSDTCTDLGWYHILEQLGRMDQAEERVMRMLEVDTCPWLVSDGSNRVCWVNRAYRRMMGAPDVDVIRVWLVVAMDLMEEIACMVELYGAVTCRVRVRYEPSTWRKMTVPCDVWRIRSGGFAWRLDVESALRLGM

SEQ ID NO: 81713 - protein, 165 aa, Arabidopsis thaliana
  peptide (1)..(165): Ceres Seq. ID no. 12660904
MDPKKSLYNSIIGLSSSFDRKVVESWLTVECVSDTCTDLGWYHILEQLGRMDQAEERVMRMLEVDTCPWLVSDGSNRVCWVNRAYRRMMGAPDVDVIRVWLVVAMDLMEEIACMVELYGAVTCRVRVRYEPSTWRKMTVPCDVWRIRSGGFAWRLDVESALRLGM

SEQ ID NO: 81714 - DNA, 696 bp, Arabidopsis thaliana
  misc_feature (1)..(696): Ceres Seq. ID no. 12660930
  misc_feature (1)..(696): Ortholog of  Ceres SEQ ID NO 15175857 as cited in SEQ ID NO 59046
atgccttcgatgccagaggaaccaatcctaacaccaacaccagatcgattctgtatgttcccaatccaatacccacagatttgggagatgtacaagaaagccgaagcatccttctggacagccgaagaagtcgatctctctcaagacaatcgcgactgggaaaactcactaaccaacgacgaacgtcacttcattaaacacgtcctcgccttcttcgccgcatcagacggaatcgttctcgagaatctctcaactagattcatgtccgatgttcagatctcagaagctcgtgccttctacggattccaaatcgcgattgagaatattcactccgagattcttcttagaactaagtttgatgaagatcgtttgaaagcgattgtttgtgatgctgttgagattgagagagagtttgtttgtgacgcgctttcttgtgccttggttgggatgaatcgtgagttgatgagtcagtacattgagttcgttgctgataggttgttggctgcgcttgggtgtggtaaggtgtatggtgtgactaatccttttgattggatggaattgatttcgcttcagggtaagaccaacttttttgagaagagagttggtgagtatcagaaagcttctgttatgtctagtgttcatggaaacgctgcgtttaatgatgatcatgtcttcaagcttgacgaggatttttag

SEQ ID NO: 81715 - protein, 231 aa, Arabidopsis thaliana
  peptide (1)..(231): Ceres Seq. ID no. 12660931
MPSMPEEPILTPTPDRFCMFPIQYPQIWEMYKKAEASFWTAEEVDLSQDNRDWENSLTNDERHFIKHVLAFFAASDGIVLENLSTRFMSDVQISEARAFYGFQIAIENIHSEILLRTKFDEDRLKAIVCDAVEIEREFVCDALSCALVGMNRELMSQYIEFVADRLLAALGCGKVYGVTNPFDWMELISLQGKTNFFEKRVGEYQKASVMSSVHGNAAFNDDHVFKLDEDF

SEQ ID NO: 81716 - protein, 228 aa, Arabidopsis thaliana
  peptide (1)..(228): Ceres Seq. ID no. 12660932
MPEEPILTPTPDRFCMFPIQYPQIWEMYKKAEASFWTAEEVDLSQDNRDWENSLTNDERHFIKHVLAFFAASDGIVLENLSTRFMSDVQISEARAFYGFQIAIENIHSEILLRTKFDEDRLKAIVCDAVEIEREFVCDALSCALVGMNRELMSQYIEFVADRLLAALGCGKVYGVTNPFDWMELISLQGKTNFFEKRVGEYQKASVMSSVHGNAAFNDDHVFKLDEDF

SEQ ID NO: 81717 - protein, 213 aa, Arabidopsis thaliana
  peptide (1)..(213): Ceres Seq. ID no. 12660933
MFPIQYPQIWEMYKKAEASFWTAEEVDLSQDNRDWENSLTNDERHFIKHVLAFFAASDGIVLENLSTRFMSDVQISEARAFYGFQIAIENIHSEILLRTKFDEDRLKAIVCDAVEIEREFVCDALSCALVGMNRELMSQYIEFVADRLLAALGCGKVYGVTNPFDWMELISLQGKTNFFEKRVGEYQKASVMSSVHGNAAFNDDHVFKLDEDF

SEQ ID NO: 81718 - DNA, 1077 bp, Arabidopsis thaliana
  misc_feature (1)..(1077): Ceres Seq. ID no. 12660961
  misc_feature (1)..(1077): Ortholog of  Ceres SEQ ID NO 13582332 as cited in SEQ ID NO 59890
atgttgctgcttaaggaagaagatgaaggaagacgaagaactagtgttcctacacaactcatgaaactaaatagaagccaatggtggattcttgttttcataagcatcttctttctcatctctgctcaagccatttctgttcttcttggtcggttttattacaatgaaggtggaaacagtaaatggatctctactcttgttcaaactggtggctttcccattctttatctccctctttctctccttcctgcttcacaatcttcttcttcttcttcttcttcttcttctttcaagactctggtttggatttatctttctcttggttttgctattggtttagataattttttatactctgttggacttttgtatctctctgcttcaacttattcgattctatgtgcttcacagttagctttcaatggtgtcttctattattacatcaattctcagaaaatcacttgtttgattttcttctcagtgttgtttctctctatctctgctgtgttggtttctcttgacgatgattcaaatagcccatcaggagattctaagtggagttacttgattgggtgtttctgtgcagtttttgcttctcttatctattctcttcagctctctcttatgcagttttctttcgagaaggttctcaagagtgagactctctctatggttctcgagatgcaaatctatacgtcgcttgtggcttcttgtgtagcggttatcggattgttcgcaagcggggaatggatgttgttgagtgtggagatggaagagtttcaggaaggtcaagtcatttatgttttgactttggtcggggcagcggtttcgtgtcaattgggttgtgtaggagccgtgtcgcttatatttctggtgtcttcgctgttttcaaaccttattagtacgctctcactcattgttacgcctctcgcggccattgcggtgttccatgacaagctgactgaggttaagatggtggcgatgcccatcgccttcacaggattcacgttttatatctaccagaactatcttgatgacttgaaagtacaaagagcacgagaagctcaggccgaatga

SEQ ID NO: 81719 - protein, 358 aa, Arabidopsis thaliana
  peptide (1)..(358): Ceres Seq. ID no. 12660962
MLLLKEEDEGRRRTSVPTQLMKLNRSQWWILVFISIFFLISAQAISVLLGRFYYNEGGNSKWISTLVQTGGFPILYLPLSLLPASQSSSSSSSSSSFKTLVWIYLSLGFAIGLDNFLYSVGLLYLSASTYSILCASQLAFNGVFYYYINSQKITCLIFFSVLFLSISAVLVSLDDDSNSPSGDSKWSYLIGCFCAVFASLIYSLQLSLMQFSFEKVLKSETLSMVLEMQIYTSLVASCVAVIGLFASGEWMLLSVEMEEFQEGQVIYVLTLVGAAVSCQLGCVGAVSLIFLVSSLFSNLISTLSLIVTPLAAIAVFHDKLTEVKMVAMPIAFTGFTFYIYQNYLDDLKVQRAREAQAE

SEQ ID NO: 81720 - protein, 338 aa, Arabidopsis thaliana
  peptide (1)..(338): Ceres Seq. ID no. 12660963
MKLNRSQWWILVFISIFFLISAQAISVLLGRFYYNEGGNSKWISTLVQTGGFPILYLPLSLLPASQSSSSSSSSSSFKTLVWIYLSLGFAIGLDNFLYSVGLLYLSASTYSILCASQLAFNGVFYYYINSQKITCLIFFSVLFLSISAVLVSLDDDSNSPSGDSKWSYLIGCFCAVFASLIYSLQLSLMQFSFEKVLKSETLSMVLEMQIYTSLVASCVAVIGLFASGEWMLLSVEMEEFQEGQVIYVLTLVGAAVSCQLGCVGAVSLIFLVSSLFSNLISTLSLIVTPLAAIAVFHDKLTEVKMVAMPIAFTGFTFYIYQNYLDDLKVQRAREAQAE

SEQ ID NO: 81721 - DNA, 2886 bp, Arabidopsis thaliana
  misc_feature (1)..(2886): Ceres Seq. ID no. 12660988
  misc_feature (1)..(2886): Ortholog of  Ceres SEQ ID NO 13600310 as cited in SEQ ID NO 5086
atgaaaaatcgaatcaaaaaaggatccagcatgattggtgtttatggaagatcagacggatcaagcagcattcagtcttctaatggatccgaaagtcgtgaaagtatagatgacaataagcaaggtcatcaaagtttagtagagtggttaaatgagacacttccttatttgaatttaccatgggaagcttcagaggaagaattgagagcatgtttggtggatggtactgtcttgtgcaatctcttaaatcagcttagtcccggttcgatgcgaatgggaggaagcttcgagcctggttgtgtaaatattgagcggtttttggcagctatggatgaaatgacattgcccagatttgagtctcttaaggcgcttaaagctagtttctctgatgatggatatgataagaatacactttctgcaagaagaagatggagtttgcctgcggaccattcaaagggagttgatagcaactttaatgatggaggatcacagtttatagaagcatctgagattaatacatctcatcacagcttacaaaatacttctacacgatcgttgtttgacatgctggataggcttcttgatgagagctcgcagaagatgaatgtgtctcatgtttatgtatctatcttgagaggcattgtgcaagttgttgagcaacggatctcaaatcaagctgagaacctaaaaaaccaaaatatactctttagggttcgtgaagaaaaatatagatcaagaataaatgttttagaaactttggcatctggaacaacagatgagaatgaggtcagaagaaaaagatgtgctccaaatagaaaaggaaaagagcgtagtaatgctgaactttctaagttgaagcaagaacttgaaattgtgaaagagacacatgaaaaacagtttttggaactaaaactaaatgctcaaaaagctaaagttgagttggagaggcaagtaaagaattcagagttacgtgtagtagaagcaaaagaactcgagaagttatgtgaaactaaaactaaaagatgggagaagaaagaacaaacatataagaggtttataaaccaccagacagaggctttgcaggagttgaaagctacttctatgtctttaaaacatgatgtattaaagataggagagaactacttcctggatctaacttactatggtataaagctcagaggagtggctcatgcagcaaaaaattaccagataataattgaagagaatcgaagactttacaatgaagtgcaagaattaaaaggaaatattagagtatattgccggataagaccattccttcaaggacaaaacaagaaacaaacatcaatagagtacacaggtgagaatggtgaactggtggttgcaaatcccttaaagcaaggcaaagatacgtatcgtttattcaaattcaacaaagtctttggccctgaatcaactcaagaggaagttttcttagatactcgacctatgattcgatccattcttgatggctacaatgtatgtatatttgcttatggccagacgggttctggaaagacttatacgatgagtggaccaagcataacttcagaagaagatcggggtgttaactatcgagctttgaatgacttgttccacttaactcaaagtagacaaaactcagtgatgtatgaagttggtgttcaaatggttgagatttacaatgagcaagttcgtgacctactttctcaggatgttcctgatgcaagcatgcattctgtaagatcaactgaagatgttcttgaactgatgaatattgggttgatgaatagaactgttggcgccacaacccttaatgaaaagagtagtagatcacacagtgttctttcggttcatgtacgcggtgttgatgttaaaacggaatccgtcttgcgtggtagtttgcatttggttgatcttgctggaagtgagagagttggtcgctctgaagtaaccggagagagactcaaagaagctcaacatataaacaaatcattgtctgctctcggagatgttatattcgctctagcacataagaatcctcatgtaccttatagaaacagcaagctaacacaagtcctccagaattctttaggagggcaagcgaaaactcttatgtttgttcaaattaatcctgatgaagattcatatgctgagactgtaagtactttgaaatttgcggaaagagtttctggtgtcgagttaggtgcagctagaagctataaggaaggaagagatgttagacaactcatggaacaggtatcgaacttgaaagatatgattgccaagaaagacgaagaacttcaaaagtttcaaaacataaatggtatccaaaaacgtggattaagcaaactaagaattgtctctcctcctagaaggcattctttaggaggagctttaacaaattctccaagaagaagacaaggacctggtttacttggaagaacaacttcagatatacatcgacatcaaaatgaatctcgatcatcgtctaagttttctggtggggctaaagacaataatatatttgaggatactgaactcttaggttttgaagaatcaaataatgaggaaagattgagtgatatctcagatagttgtctttcaatgggaacagaaactgatggctcgattagtagcggtgcaatggagttgacactcttccctgaaacctcaaatcctcctgaaatgtttgaacaatctgaacaaaatgacaaagctcatgttggagttggaccatcaaagccactgaaacatacaccaaaaccagacataagtaaaccttctcgtctgtcgatttccactacctcatctaaggctttaacaagttctaaaagaccggtcactggcatttcatcttcagtaaaacctcttaacagaaagagataa

SEQ ID NO: 81722 - protein, 961 aa, Arabidopsis thaliana
  peptide (1)..(961): Ceres Seq. ID no. 12660989
MKNRIKKGSSMIGVYGRSDGSSSIQSSNGSESRESIDDNKQGHQSLVEWLNETLPYLNLPWEASEEELRACLVDGTVLCNLLNQLSPGSMRMGGSFEPGCVNIERFLAAMDEMTLPRFESLKALKASFSDDGYDKNTLSARRRWSLPADHSKGVDSNFNDGGSQFIEASEINTSHHSLQNTSTRSLFDMLDRLLDESSQKMNVSHVYVSILRGIVQVVEQRISNQAENLKNQNILFRVREEKYRSRINVLETLASGTTDENEVRRKRCAPNRKGKERSNAELSKLKQELEIVKETHEKQFLELKLNAQKAKVELERQVKNSELRVVEAKELEKLCETKTKRWEKKEQTYKRFINHQTEALQELKATSMSLKHDVLKIGENYFLDLTYYGIKLRGVAHAAKNYQIIIEENRRLYNEVQELKGNIRVYCRIRPFLQGQNKKQTSIEYTGENGELVVANPLKQGKDTYRLFKFNKVFGPESTQEEVFLDTRPMIRSILDGYNVCIFAYGQTGSGKTYTMSGPSITSEEDRGVNYRALNDLFHLTQSRQNSVMYEVGVQMVEIYNEQVRDLLSQDVPDASMHSVRSTEDVLELMNIGLMNRTVGATTLNEKSSRSHSVLSVHVRGVDVKTESVLRGSLHLVDLAGSERVGRSEVTGERLKEAQHINKSLSALGDVIFALAHKNPHVPYRNSKLTQVLQNSLGGQAKTLMFVQINPDEDSYAETVSTLKFAERVSGVELGAARSYKEGRDVRQLMEQVSNLKDMIAKKDEELQKFQNINGIQKRGLSKLRIVSPPRRHSLGGALTNSPRRRQGPGLLGRTTSDIHRHQNESRSSSKFSGGAKDNNIFEDTELLGFEESNNEERLSDISDSCLSMGTETDGSISSGAMELTLFPETSNPPEMFEQSEQNDKAHVGVGPSKPLKHTPKPDISKPSRLSISTTSSKALTSSKRPVTGISSSVKPLNRKR

SEQ ID NO: 81723 - protein, 951 aa, Arabidopsis thaliana
  peptide (1)..(951): Ceres Seq. ID no. 12660990
MIGVYGRSDGSSSIQSSNGSESRESIDDNKQGHQSLVEWLNETLPYLNLPWEASEEELRACLVDGTVLCNLLNQLSPGSMRMGGSFEPGCVNIERFLAAMDEMTLPRFESLKALKASFSDDGYDKNTLSARRRWSLPADHSKGVDSNFNDGGSQFIEASEINTSHHSLQNTSTRSLFDMLDRLLDESSQKMNVSHVYVSILRGIVQVVEQRISNQAENLKNQNILFRVREEKYRSRINVLETLASGTTDENEVRRKRCAPNRKGKERSNAELSKLKQELEIVKETHEKQFLELKLNAQKAKVELERQVKNSELRVVEAKELEKLCETKTKRWEKKEQTYKRFINHQTEALQELKATSMSLKHDVLKIGENYFLDLTYYGIKLRGVAHAAKNYQIIIEENRRLYNEVQELKGNIRVYCRIRPFLQGQNKKQTSIEYTGENGELVVANPLKQGKDTYRLFKFNKVFGPESTQEEVFLDTRPMIRSILDGYNVCIFAYGQTGSGKTYTMSGPSITSEEDRGVNYRALNDLFHLTQSRQNSVMYEVGVQMVEIYNEQVRDLLSQDVPDASMHSVRSTEDVLELMNIGLMNRTVGATTLNEKSSRSHSVLSVHVRGVDVKTESVLRGSLHLVDLAGSERVGRSEVTGERLKEAQHINKSLSALGDVIFALAHKNPHVPYRNSKLTQVLQNSLGGQAKTLMFVQINPDEDSYAETVSTLKFAERVSGVELGAARSYKEGRDVRQLMEQVSNLKDMIAKKDEELQKFQNINGIQKRGLSKLRIVSPPRRHSLGGALTNSPRRRQGPGLLGRTTSDIHRHQNESRSSSKFSGGAKDNNIFEDTELLGFEESNNEERLSDISDSCLSMGTETDGSISSGAMELTLFPETSNPPEMFEQSEQNDKAHVGVGPSKPLKHTPKPDISKPSRLSISTTSSKALTSSKRPVTGISSSVKPLNRKR

SEQ ID NO: 81724 - protein, 872 aa, Arabidopsis thaliana
  peptide (1)..(872): Ceres Seq. ID no. 12660991
MRMGGSFEPGCVNIERFLAAMDEMTLPRFESLKALKASFSDDGYDKNTLSARRRWSLPADHSKGVDSNFNDGGSQFIEASEINTSHHSLQNTSTRSLFDMLDRLLDESSQKMNVSHVYVSILRGIVQVVEQRISNQAENLKNQNILFRVREEKYRSRINVLETLASGTTDENEVRRKRCAPNRKGKERSNAELSKLKQELEIVKETHEKQFLELKLNAQKAKVELERQVKNSELRVVEAKELEKLCETKTKRWEKKEQTYKRFINHQTEALQELKATSMSLKHDVLKIGENYFLDLTYYGIKLRGVAHAAKNYQIIIEENRRLYNEVQELKGNIRVYCRIRPFLQGQNKKQTSIEYTGENGELVVANPLKQGKDTYRLFKFNKVFGPESTQEEVFLDTRPMIRSILDGYNVCIFAYGQTGSGKTYTMSGPSITSEEDRGVNYRALNDLFHLTQSRQNSVMYEVGVQMVEIYNEQVRDLLSQDVPDASMHSVRSTEDVLELMNIGLMNRTVGATTLNEKSSRSHSVLSVHVRGVDVKTESVLRGSLHLVDLAGSERVGRSEVTGERLKEAQHINKSLSALGDVIFALAHKNPHVPYRNSKLTQVLQNSLGGQAKTLMFVQINPDEDSYAETVSTLKFAERVSGVELGAARSYKEGRDVRQLMEQVSNLKDMIAKKDEELQKFQNINGIQKRGLSKLRIVSPPRRHSLGGALTNSPRRRQGPGLLGRTTSDIHRHQNESRSSSKFSGGAKDNNIFEDTELLGFEESNNEERLSDISDSCLSMGTETDGSISSGAMELTLFPETSNPPEMFEQSEQNDKAHVGVGPSKPLKHTPKPDISKPSRLSISTTSSKALTSSKRPVTGISSSVKPLNRKR

SEQ ID NO: 81725 - DNA, 1575 bp, Arabidopsis thaliana
  misc_feature (1)..(1575): Ceres Seq. ID no. 12661011
  misc_feature (1)..(1575): Ortholog of  Ceres SEQ ID NO 13504578 as cited in SEQ ID NO 59850
atgaagctgaataaccagaaagatccagcagagaagctaatgtgggaacggactttatccggatccggttcaccgacccgacccgtatccaaacttatggtaacgctcctcctcctcgtctccgccacttacgttgtctacacactaaagcttatctcaaactcacgtgcttgtcaagtggagccattctccgccgttgttcgtcgtctcaacgacattgtcaactcatctcaaccgttgattctcttccacacaaatcaaacggctgtaatcaaatcatacgcctctccaccaccttcaccaccaccaccacctccgccaccgcaaaccggtttccaacacgtggttttcggtatcgccgcgtcggcaagactatggaaacagagaaaagagtacatcaagatttggtacaaaccaaaccaaatgcgtagttatgtctggttagaaaaaccagttactgaagaagacgaagaagacgaaattagcctcccgccggtgaaaatctccggcgatacatcgaagtttccgtataaaaacaaacaaggacacagatcggcgattagaatttcaagaatcgttacggagacacttaaattaggactcaaagatgtgagatggttcgttatgggagacgatgatacagtctttgtcgccgagaatctaatcagagttttgagaaaatacgatcataatcaaatgtattacatcggcagtttatcggagagtcatcttcagaacatttatttctcttatggaatggcttatggcggtggaggatttgctataagttatccattagcggtggctttgagcaaaatgcaagatcggtgtattaaaaggtatccggcgttgtacggttccgatgatcggatgcaagcttgcatggctgaactcggtgttccactcactaaagaactcggttttcaccagtacgatgtgtatggcaatctctttggattactagcggctcacccggtggctccactggttacgcttcatcacctcgacgtggtcgaaccgattttcccaaacatgacacgtgttgatgccttgaagcatctacaagtcccggcaaagctagactctgctggacttatgcaacagtcgatatgctatgacaaacgccgcaaatggactgtttccgtctcttggggattcgcggttcagattttccgcggaatcttttcggctcgagagattgaaatgccgtcgagaactttcttaaattggtatcgacgggcggattacacggcatacgctttcaacacccgacccgtgagtcgtcatccgtgccagaaaccgtttgtgttctatatgacatcaaccagagttcatcgggtgacaaatatgacagtgagccgttatgaaatccaccgcgtggctcatcccgagtgtcggtggaagatggctaatcccagcgacattaagacagtcattgtttacaagaaaccggaccctcatctttgggacaggtctcctagaagaaattgttgtagggtgaaatcaaagaagaacaatactttggagattagtgttgcagtttgcaaagaaggtgaagtggttgaagtcgtgtaa

SEQ ID NO: 81726 - protein, 524 aa, Arabidopsis thaliana
  peptide (1)..(524): Ceres Seq. ID no. 12661012
MKLNNQKDPAEKLMWERTLSGSGSPTRPVSKLMVTLLLLVSATYVVYTLKLISNSRACQVEPFSAVVRRLNDIVNSSQPLILFHTNQTAVIKSYASPPPSPPPPPPPPQTGFQHVVFGIAASARLWKQRKEYIKIWYKPNQMRSYVWLEKPVTEEDEEDEISLPPVKISGDTSKFPYKNKQGHRSAIRISRIVTETLKLGLKDVRWFVMGDDDTVFVAENLIRVLRKYDHNQMYYIGSLSESHLQNIYFSYGMAYGGGGFAISYPLAVALSKMQDRCIKRYPALYGSDDRMQACMAELGVPLTKELGFHQYDVYGNLFGLLAAHPVAPLVTLHHLDVVEPIFPNMTRVDALKHLQVPAKLDSAGLMQQSICYDKRRKWTVSVSWGFAVQIFRGIFSAREIEMPSRTFLNWYRRADYTAYAFNTRPVSRHPCQKPFVFYMTSTRVHRVTNMTVSRYEIHRVAHPECRWKMANPSDIKTVIVYKKPDPHLWDRSPRRNCCRVKSKKNNTLEISVAVCKEGEVVEVV

SEQ ID NO: 81727 - protein, 511 aa, Arabidopsis thaliana
  peptide (1)..(511): Ceres Seq. ID no. 12661013
MWERTLSGSGSPTRPVSKLMVTLLLLVSATYVVYTLKLISNSRACQVEPFSAVVRRLNDIVNSSQPLILFHTNQTAVIKSYASPPPSPPPPPPPPQTGFQHVVFGIAASARLWKQRKEYIKIWYKPNQMRSYVWLEKPVTEEDEEDEISLPPVKISGDTSKFPYKNKQGHRSAIRISRIVTETLKLGLKDVRWFVMGDDDTVFVAENLIRVLRKYDHNQMYYIGSLSESHLQNIYFSYGMAYGGGGFAISYPLAVALSKMQDRCIKRYPALYGSDDRMQACMAELGVPLTKELGFHQYDVYGNLFGLLAAHPVAPLVTLHHLDVVEPIFPNMTRVDALKHLQVPAKLDSAGLMQQSICYDKRRKWTVSVSWGFAVQIFRGIFSAREIEMPSRTFLNWYRRADYTAYAFNTRPVSRHPCQKPFVFYMTSTRVHRVTNMTVSRYEIHRVAHPECRWKMANPSDIKTVIVYKKPDPHLWDRSPRRNCCRVKSKKNNTLEISVAVCKEGEVVEVV

SEQ ID NO: 81728 - protein, 492 aa, Arabidopsis thaliana
  peptide (1)..(492): Ceres Seq. ID no. 12661014
MVTLLLLVSATYVVYTLKLISNSRACQVEPFSAVVRRLNDIVNSSQPLILFHTNQTAVIKSYASPPPSPPPPPPPPQTGFQHVVFGIAASARLWKQRKEYIKIWYKPNQMRSYVWLEKPVTEEDEEDEISLPPVKISGDTSKFPYKNKQGHRSAIRISRIVTETLKLGLKDVRWFVMGDDDTVFVAENLIRVLRKYDHNQMYYIGSLSESHLQNIYFSYGMAYGGGGFAISYPLAVALSKMQDRCIKRYPALYGSDDRMQACMAELGVPLTKELGFHQYDVYGNLFGLLAAHPVAPLVTLHHLDVVEPIFPNMTRVDALKHLQVPAKLDSAGLMQQSICYDKRRKWTVSVSWGFAVQIFRGIFSAREIEMPSRTFLNWYRRADYTAYAFNTRPVSRHPCQKPFVFYMTSTRVHRVTNMTVSRYEIHRVAHPECRWKMANPSDIKTVIVYKKPDPHLWDRSPRRNCCRVKSKKNNTLEISVAVCKEGEVVEVV

SEQ ID NO: 81729 - DNA, 1350 bp, Arabidopsis thaliana
  misc_feature (1)..(1350): Ceres Seq. ID no. 12661103
  misc_feature (1)..(1350): Ortholog of  Ceres SEQ ID NO 14311870 as cited in SEQ ID NO 51574
  misc_feature (1)..(1350): Ortholog of  Ceres SEQ ID NO 15174583 as cited in SEQ ID NO 53693
  misc_feature (1)..(1350): Ortholog of  Ceres SEQ ID NO 13581563 as cited in SEQ ID NO 58942
  misc_feature (1)..(1350): Ortholog of  Ceres SEQ ID NO 13658707 as cited in SEQ ID NO 66286
  misc_feature (1)..(1350): Ortholog of  Ceres SEQ ID NO 13654528 as cited in SEQ ID NO 68080
atgaagatttctcaagctccgatctctgttttcgtactcttcttgctctccactgttttgcctcaccatctctcactgggagctccgattacatgctctggtatagttccaatgaaacacagaaacgagatgctatcaatttcggattttggagctgtcggtgacggcaagaccttgaacaccaaagcattcaattcagctattgatcggatacgaaactccaataacagtaacgaaggaactcttctttatgtgcctcgtggtgtgtatttgactcaaagcttcaatcttacgagtcacatgactttatacctcgccgatggtgctgttattaaagccgttcaggatacggagaaatggcctttgaccgatcctttgccgtcttatggaagaggacgggagcatcctggacgaagatatatcagctttattcacggagacggactcaacgacgttgttattacaggcagaaatgggacgattgatggccaaggagaaccttggtggaacatgtggagacatggaactctaaagtttaccagacctggtctcatcgaattcaacaactcaacaaacatcctcgtctctcatgttgttcttcagaactcccctttctggacacttcatccggtttattgcagtaatgttgttgttcatcatgttactatcctcgctccaactgattcgtacaacaccgatggaattgatccagattcaagctctaacgtctgtatagaagactcctacatatctactggtgacgaccttgttgcggtgaagagcggttgggacgagtatggcattgcatacaaccgtccaagccgtgacatcaccatccgccgcatcactggatcttccccatttgctggaatagccatcggaagcgaaacttctggcggaatccaaaatgtaacagttgaaaacatcactctctacaattctggtatcggcatccacatcaagacaaacattggccgaggaggaagcatacaggggataacaatctccggggtttacctagaaaaagtccggaccgggattaagatctctggcgacaccggagatcatccagacgataaattcaacacatccgctcttcccatagtaagaggcataacgatcaagaacgtatggggcatcaaagtcgagcgtgctggcatggttcagggattaaaagattcacctttcaccaatctctgcttctccaatgttacactgaccggaacaaaaaggtctccaatatggaaatgctcagatgtcgtaggagccgctgacaaggtcaaccccacaccttgccctgaactaagcgcaaccacacaacaaggtggttcctgtgaaaaccaatcctaa

SEQ ID NO: 81730 - protein, 449 aa, Arabidopsis thaliana
  peptide (1)..(449): Ceres Seq. ID no. 12661104
MKISQAPISVFVLFLLSTVLPHHLSLGAPITCSGIVPMKHRNEMLSISDFGAVGDGKTLNTKAFNSAIDRIRNSNNSNEGTLLYVPRGVYLTQSFNLTSHMTLYLADGAVIKAVQDTEKWPLTDPLPSYGRGREHPGRRYISFIHGDGLNDVVITGRNGTIDGQGEPWWNMWRHGTLKFTRPGLIEFNNSTNILVSHVVLQNSPFWTLHPVYCSNVVVHHVTILAPTDSYNTDGIDPDSSSNVCIEDSYISTGDDLVAVKSGWDEYGIAYNRPSRDITIRRITGSSPFAGIAIGSETSGGIQNVTVENITLYNSGIGIHIKTNIGRGGSIQGITISGVYLEKVRTGIKISGDTGDHPDDKFNTSALPIVRGITIKNVWGIKVERAGMVQGLKDSPFTNLCFSNVTLTGTKRSPIWKCSDVVGAADKVNPTPCPELSATTQQGGSCENQS

SEQ ID NO: 81731 - protein, 412 aa, Arabidopsis thaliana
  peptide (1)..(412): Ceres Seq. ID no. 12661105
MKHRNEMLSISDFGAVGDGKTLNTKAFNSAIDRIRNSNNSNEGTLLYVPRGVYLTQSFNLTSHMTLYLADGAVIKAVQDTEKWPLTDPLPSYGRGREHPGRRYISFIHGDGLNDVVITGRNGTIDGQGEPWWNMWRHGTLKFTRPGLIEFNNSTNILVSHVVLQNSPFWTLHPVYCSNVVVHHVTILAPTDSYNTDGIDPDSSSNVCIEDSYISTGDDLVAVKSGWDEYGIAYNRPSRDITIRRITGSSPFAGIAIGSETSGGIQNVTVENITLYNSGIGIHIKTNIGRGGSIQGITISGVYLEKVRTGIKISGDTGDHPDDKFNTSALPIVRGITIKNVWGIKVERAGMVQGLKDSPFTNLCFSNVTLTGTKRSPIWKCSDVVGAADKVNPTPCPELSATTQQGGSCENQS

SEQ ID NO: 81732 - protein, 406 aa, Arabidopsis thaliana
  peptide (1)..(406): Ceres Seq. ID no. 12661106
MLSISDFGAVGDGKTLNTKAFNSAIDRIRNSNNSNEGTLLYVPRGVYLTQSFNLTSHMTLYLADGAVIKAVQDTEKWPLTDPLPSYGRGREHPGRRYISFIHGDGLNDVVITGRNGTIDGQGEPWWNMWRHGTLKFTRPGLIEFNNSTNILVSHVVLQNSPFWTLHPVYCSNVVVHHVTILAPTDSYNTDGIDPDSSSNVCIEDSYISTGDDLVAVKSGWDEYGIAYNRPSRDITIRRITGSSPFAGIAIGSETSGGIQNVTVENITLYNSGIGIHIKTNIGRGGSIQGITISGVYLEKVRTGIKISGDTGDHPDDKFNTSALPIVRGITIKNVWGIKVERAGMVQGLKDSPFTNLCFSNVTLTGTKRSPIWKCSDVVGAADKVNPTPCPELSATTQQGGSCENQS

SEQ ID NO: 81733 - DNA, 1521 bp, Arabidopsis thaliana
  misc_feature (1)..(1521): Ceres Seq. ID no. 12661114
  misc_feature (1)..(1521): Ortholog of  Ceres SEQ ID NO 15226175 as cited in SEQ ID NO 0
atgatcttttgtcttctggtccttattctaattcttggcatctcttggactgtttctgtatgtagtgatgaagtggttaagagtcttagaggaagcattggatcaccgtggtcactaaggagaagaaagcgagttcttcaacctaaacaatggaatgcttttttcacagaggaagggcgactcagtgatggaggtgtcaaatttctgaagaaagttcgtagtgggggtgtacatccaagcatcagaccagaagtttggccgttccttcttggagtgtatgacttaaagagcaacaaagaagaaagagactccattcgacagctgaaactgacggaatatgaaaacctgcggagacagtgtcgcgagattcatgaacgctatgaaaatgtctgcgactcaaaggagacagctcagagcagcaacactgaagacagtcaggttcttgaatcccatgatattgaggaagtcgagagttccacaagaaccatcaccgtagatgaatcagagaagttgaattctgaatcgattatgcaggatgagaactgtgaaaagagcgatgtcaccacagaagatgctgctggtaatgattcagactcaaccaatcctgaagaaaccgagacttcaccttttctagctaacgaagaagtagaaagccacaatactgttaaccaagaaaaagaaatttcgtctccatcatcaaagccaaaatctcaggcagcggacgaggatttcatgtcaacttggcagagaattatccgcctagatgctgtgagagcaaatgacgaatgggtgccctactcaccaactcaagctgctgtttctgagacaaaagcccggggaatagccattcaggttggtctcaatgactatgaccacttggaaccctgccggatatttcacgcagcccgcctggtcgggatccttgaagcctacgcagtctatgatccagaaattggttactgtcaaggaatgagcgacttactatctcctttaatcgcagtgatggaagacgacgtcttagcattctggtgctttgttggcttcatgagtaaagcacggcataatttccggttagacgaggttggaatcaggcggcaactctcaatggtatcgaaaatcataaaattcaaagacattcacttgtaccgacacttggagaaccttgaagcagaagactgcttctttgtataccgtatggttgtagttctgttcagacgagaactaacctttgagcagacgttgtgtctctgggaagtaatgtgggcggatcaagctgcaatacgaactgggattgcgaaggcgacatgggggagaatccggttacgagcaccaccgacagaagatttgttgctttacgcgatagctgcaagcgtgctgcagaggaggaagacgataatagagaaatacagtgggatggatgagataatgaaggaatgtaacagcatggctggtcatcttgatgtttggaaacttctagacgatgctcatgacttagtcgtcaatcttcacgacaagatctaa

SEQ ID NO: 81734 - protein, 506 aa, Arabidopsis thaliana
  peptide (1)..(506): Ceres Seq. ID no. 12661115
MIFCLLVLILILGISWTVSVCSDEVVKSLRGSIGSPWSLRRRKRVLQPKQWNAFFTEEGRLSDGGVKFLKKVRSGGVHPSIRPEVWPFLLGVYDLKSNKEERDSIRQLKLTEYENLRRQCREIHERYENVCDSKETAQSSNTEDSQVLESHDIEEVESSTRTITVDESEKLNSESIMQDENCEKSDVTTEDAAGNDSDSTNPEETETSPFLANEEVESHNTVNQEKEISSPSSKPKSQAADEDFMSTWQRIIRLDAVRANDEWVPYSPTQAAVSETKARGIAIQVGLNDYDHLEPCRIFHAARLVGILEAYAVYDPEIGYCQGMSDLLSPLIAVMEDDVLAFWCFVGFMSKARHNFRLDEVGIRRQLSMVSKIIKFKDIHLYRHLENLEAEDCFFVYRMVVVLFRRELTFEQTLCLWEVMWADQAAIRTGIAKATWGRIRLRAPPTEDLLLYAIAASVLQRRKTIIEKYSGMDEIMKECNSMAGHLDVWKLLDDAHDLVVNLHDKI

SEQ ID NO: 81735 - protein, 330 aa, Arabidopsis thaliana
  peptide (1)..(330): Ceres Seq. ID no. 12661116
MQDENCEKSDVTTEDAAGNDSDSTNPEETETSPFLANEEVESHNTVNQEKEISSPSSKPKSQAADEDFMSTWQRIIRLDAVRANDEWVPYSPTQAAVSETKARGIAIQVGLNDYDHLEPCRIFHAARLVGILEAYAVYDPEIGYCQGMSDLLSPLIAVMEDDVLAFWCFVGFMSKARHNFRLDEVGIRRQLSMVSKIIKFKDIHLYRHLENLEAEDCFFVYRMVVVLFRRELTFEQTLCLWEVMWADQAAIRTGIAKATWGRIRLRAPPTEDLLLYAIAASVLQRRKTIIEKYSGMDEIMKECNSMAGHLDVWKLLDDAHDLVVNLHDKI

SEQ ID NO: 81736 - protein, 262 aa, Arabidopsis thaliana
  peptide (1)..(262): Ceres Seq. ID no. 12661117
MSTWQRIIRLDAVRANDEWVPYSPTQAAVSETKARGIAIQVGLNDYDHLEPCRIFHAARLVGILEAYAVYDPEIGYCQGMSDLLSPLIAVMEDDVLAFWCFVGFMSKARHNFRLDEVGIRRQLSMVSKIIKFKDIHLYRHLENLEAEDCFFVYRMVVVLFRRELTFEQTLCLWEVMWADQAAIRTGIAKATWGRIRLRAPPTEDLLLYAIAASVLQRRKTIIEKYSGMDEIMKECNSMAGHLDVWKLLDDAHDLVVNLHDKI

SEQ ID NO: 81737 - DNA, 1239 bp, Arabidopsis thaliana
  misc_feature (1)..(1239): Ceres Seq. ID no. 12661132
  misc_feature (1)..(1239): Ortholog of  Ceres SEQ ID NO 13596108 as cited in SEQ ID NO 68591
atggaagctagactctccgaaactcttggcctcccatctccaaatcttaatcactgccattttcccaacgagttcaattctctcttcactcatttctccgatctcacctccgtccaaagccctatcgtcagaaaccctaaactcaaaaccaaatcctctcaaaaacccccaaaattttcagcaaatttcagaagatccgacccaccatttgcatcaacatcaatctcggatccaacccacgaaaaacccggacccgaattcctgaaatggatcaaacccgcatcacgaagcagtccaagaattcaaacactcatcaaacaactctccgtctgggaacgtgccatcatcggtgcaggagccggtggactcgccggagctttcacatacgttactcttctcccacttgacgcaatcaaaaccaagcttcaaaccaaaggcgcttctcaggtttatagtaacacatttgatgctatagtgaaaacctttcaagctaaaggtatattaggtttctatagtggtgtctccgccgtgattgttggctctacgttttcctccgccgtgtatttcggtacttgtgagtttggtaagtctctgctctctaagttccctgattttccgacggttttaatcccgcctactgctggtgctatgggaaacataatctcttcagctataatggttcctaaagagctcattacacagagaatgcaagctggagctagtgggagatcttatcaagttttacttaagatacttgagaaagatggaatcttggggctttacgccggttattcggctacattgttgaggaatttacccgctggtgtactcagttattcgtcgtttgagtatctgaaagccgcggttttggagaaaacgaagcagagccatcttgagcctttgcagagtgtttgttgcggtgcgttggctggtgcgatatcggcttcgataactacgccgttagatgttgtgaagactaggctgatgacacagattcatgtggaggctgtggataaactcggtggtgctatgtatactggtgttgctgggacagtgaagcagatattgacagaggaaggttgggttggttttacccgcggcatgggacctcgagttgttcacagcgcttgtttctctgcgatcggttattttgcctttgagactgctaggcttacaatcttgaatgaatatttgaaaaggaaagaagagtctgaagctaacgttgctgctgattcttga

SEQ ID NO: 81738 - protein, 412 aa, Arabidopsis thaliana
  peptide (1)..(412): Ceres Seq. ID no. 12661133
MEARLSETLGLPSPNLNHCHFPNEFNSLFTHFSDLTSVQSPIVRNPKLKTKSSQKPPKFSANFRRSDPPFASTSISDPTHEKPGPEFLKWIKPASRSSPRIQTLIKQLSVWERAIIGAGAGGLAGAFTYVTLLPLDAIKTKLQTKGASQVYSNTFDAIVKTFQAKGILGFYSGVSAVIVGSTFSSAVYFGTCEFGKSLLSKFPDFPTVLIPPTAGAMGNIISSAIMVPKELITQRMQAGASGRSYQVLLKILEKDGILGLYAGYSATLLRNLPAGVLSYSSFEYLKAAVLEKTKQSHLEPLQSVCCGALAGAISASITTPLDVVKTRLMTQIHVEAVDKLGGAMYTGVAGTVKQILTEEGWVGFTRGMGPRVVHSACFSAIGYFAFETARLTILNEYLKRKEESEANVAADS

SEQ ID NO: 81739 - DNA, 1524 bp, Arabidopsis thaliana
  misc_feature (1)..(1524): Ceres Seq. ID no. 12661138
  misc_feature (1)..(1524): Ortholog of  Ceres SEQ ID NO 13600220 as cited in SEQ ID NO 0
atgagaactatatatctttctttgctagtgtttattattgtcttggctttgaatgaagttatggccaagaaacactcctcaacacctaaattaagaagaagtgattttccagaagattttatttttggagctgcaacgtcagcttaccaagtcgaaggagctgcccatgaagatggtagaggtccaagtatttgggatacattctctgagaaatatccggagaagataaaagatggtagcaatggatctattgcaagtgattcttaccatctttacaaggaagatgtgggtttactacatcaaattggtttcgatgcctatagattctccatctcgtggtcgaggatcttgccacgtgagaatctaaaaggaggaatcaaccaagctggtattgactattacaacaacttgatcaatgagcttttgtctaaaggaattaagccattcgccaccattttccattgggacacaccgcaaagccttgaagatgcttatggagggttccttggcgcggagattgtgaatgatttccgtgattatgcggatatttgtttcaagaattttggagatcgagtgaagcattggatgacattgaacgagccattaacagttgtgcaacaaggatatgttgctggtgtaatggctccaggaaggtgttcaaaattcacaaaccctaactgcaccgcgggaaatggagctaccgagccttatattgttggtcacaacctcattcttgcacatggagaagcagtcaaagtatacagagaaaaatataaggcatctcaaaaaggtcaagttggtatcgccttaaacgcgggttggaacttaccttattcagaatcagctgaagataggttagctgcggcaagagctatggccttcacattcgactatttcatggagccgcttgtaaccggtaaatacccgattgacatggtcaactacgtaaaaggcggtcgcttacctacatttactgcaaaacaatctaaaatgttgaagggatcatatgatttcattggcagaaattattactcatcttcttacgctaaggatgttccttgctcaagcgaaaacgttacattattctctgatccttgtgctagcgtcacaggtgaaagagaaggagtgcctatcggtccaaaggcagcatcagattggcttttgatatatccaaaaggaattcgtgatctccttctctatgcaaaatacaagttcaaggatcctgtcatgtacataaccgaaaatggtagagatgaagctagtaccggtaaaatcgaccttaaagatagtgagaggatcgattactacgctcaacatttgaagatggttcaagacgctatatcaattggagccaatgttaagggattctttgcatggtctttgctagataactttgaatgggcaacgggctacgcagtccgatttggactagtttacgtagatttcaacggtggacgtaagagatatcccaaaaaatcggcaaaatggtttaaaaagttattaaatgaaaagaaaaagaattga

SEQ ID NO: 81740 - protein, 507 aa, Arabidopsis thaliana
  peptide (1)..(507): Ceres Seq. ID no. 12661139
MRTIYLSLLVFIIVLALNEVMAKKHSSTPKLRRSDFPEDFIFGAATSAYQVEGAAHEDGRGPSIWDTFSEKYPEKIKDGSNGSIASDSYHLYKEDVGLLHQIGFDAYRFSISWSRILPRENLKGGINQAGIDYYNNLINELLSKGIKPFATIFHWDTPQSLEDAYGGFLGAEIVNDFRDYADICFKNFGDRVKHWMTLNEPLTVVQQGYVAGVMAPGRCSKFTNPNCTAGNGATEPYIVGHNLILAHGEAVKVYREKYKASQKGQVGIALNAGWNLPYSESAEDRLAAARAMAFTFDYFMEPLVTGKYPIDMVNYVKGGRLPTFTAKQSKMLKGSYDFIGRNYYSSSYAKDVPCSSENVTLFSDPCASVTGEREGVPIGPKAASDWLLIYPKGIRDLLLYAKYKFKDPVMYITENGRDEASTGKIDLKDSERIDYYAQHLKMVQDAISIGANVKGFFAWSLLDNFEWATGYAVRFGLVYVDFNGGRKRYPKKSAKWFKKLLNEKKKN

SEQ ID NO: 81741 - protein, 487 aa, Arabidopsis thaliana
  peptide (1)..(487): Ceres Seq. ID no. 12661140
MAKKHSSTPKLRRSDFPEDFIFGAATSAYQVEGAAHEDGRGPSIWDTFSEKYPEKIKDGSNGSIASDSYHLYKEDVGLLHQIGFDAYRFSISWSRILPRENLKGGINQAGIDYYNNLINELLSKGIKPFATIFHWDTPQSLEDAYGGFLGAEIVNDFRDYADICFKNFGDRVKHWMTLNEPLTVVQQGYVAGVMAPGRCSKFTNPNCTAGNGATEPYIVGHNLILAHGEAVKVYREKYKASQKGQVGIALNAGWNLPYSESAEDRLAAARAMAFTFDYFMEPLVTGKYPIDMVNYVKGGRLPTFTAKQSKMLKGSYDFIGRNYYSSSYAKDVPCSSENVTLFSDPCASVTGEREGVPIGPKAASDWLLIYPKGIRDLLLYAKYKFKDPVMYITENGRDEASTGKIDLKDSERIDYYAQHLKMVQDAISIGANVKGFFAWSLLDNFEWATGYAVRFGLVYVDFNGGRKRYPKKSAKWFKKLLNEKKKN

SEQ ID NO: 81742 - protein, 312 aa, Arabidopsis thaliana
  peptide (1)..(312): Ceres Seq. ID no. 12661141
MTLNEPLTVVQQGYVAGVMAPGRCSKFTNPNCTAGNGATEPYIVGHNLILAHGEAVKVYREKYKASQKGQVGIALNAGWNLPYSESAEDRLAAARAMAFTFDYFMEPLVTGKYPIDMVNYVKGGRLPTFTAKQSKMLKGSYDFIGRNYYSSSYAKDVPCSSENVTLFSDPCASVTGEREGVPIGPKAASDWLLIYPKGIRDLLLYAKYKFKDPVMYITENGRDEASTGKIDLKDSERIDYYAQHLKMVQDAISIGANVKGFFAWSLLDNFEWATGYAVRFGLVYVDFNGGRKRYPKKSAKWFKKLLNEKKKN

SEQ ID NO: 81743 - DNA, 342 bp, Arabidopsis thaliana
  misc_feature (1)..(342): Ceres Seq. ID no. 12661169
  misc_feature (1)..(342): Ortholog of  Ceres SEQ ID NO 13645078 as cited in SEQ ID NO 51158
atggttctcttggtttcttaccaaggaagagagctaatcgtcacagaggaaagggtatgtctttttttcaaacttaggactgagaaggaaataactccaatgggaggattcgcacattacggtatagtgaaggatgactacttgatgattaagggttgctgcatgggtccaaagaagagagttgtgactcttcgtcagtcactgctaaggcagacttctcgtcttgcgatggaggtgattaatctcaagttcgtcgatacctcatcgaaggggggacatggtcacttccagaccagcgaggaaaaggccaagtattttggtcgtgctgcaagaaaggcttaa

SEQ ID NO: 81744 - protein, 113 aa, Arabidopsis thaliana
  peptide (1)..(113): Ceres Seq. ID no. 12661170
MVLLVSYQGRELIVTEERVCLFFKLRTEKEITPMGGFAHYGIVKDDYLMIKGCCMGPKKRVVTLRQSLLRQTSRLAMEVINLKFVDTSSKGGHGHFQTSEEKAKYFGRAARKA

SEQ ID NO: 81745 - protein, 80 aa, Arabidopsis thaliana; identical to SEQ ID NO: 75889
  peptide (1)..(80): Ceres Seq. ID no. 12661171

SEQ ID NO: 81746 - protein, 65 aa, Arabidopsis thaliana; identical to SEQ ID NO: 75890
  peptide (1)..(65): Ceres Seq. ID no. 12661172

SEQ ID NO: 81747 - DNA, 1500 bp, Arabidopsis thaliana
  misc_feature (1)..(1500): Ceres Seq. ID no. 12661185
  misc_feature (1)..(1500): Ortholog of  Ceres SEQ ID NO 13502874 as cited in SEQ ID NO 66298
  misc_feature (1)..(1500): Ortholog of  Ceres SEQ ID NO 12614124 as cited in SEQ ID NO 68392
atggcagaactcatcatcgttgactttcaaaacatatctatcttcatcctcttatgtctcttctcattcctttgttacgctctcttcttcaagaaaccaaaaggctttgacctgcctccgagccctccttctctaccaatcatcggtcatcttcaccatcttctctcatcatctctaccacacaagtcctttcaaaaactctccttcaagtatggacctcttctccatctccgcatctttaatttccccatggtcctcgtctcatcagcctcaatggcctacgaggtcttcaggacaaacgacgtaaacgtctcgtatcgctttgtcccagtcaacaaagactctctagtgttcggatcttcaggattcgtaaccgctccttatggagattactggaagttcatgaagaagctcatatccacgaaactactccgaccacatgcactcgagctgtcgaaaggtaaccgtgcagaggagctacgtcggttttgccttgatctgcaaggtaaggcgaggaagaaggagagcgttgagatcggtaaagtagcactaaagctcactaacaacatcatatgtaggatgagcatgggaaggagttgttcagagaagaacggtgtagcggagagagcaagggaattggttaacaaatcctttgccttatcagtgaagctcttcttttcaaacatgttcagaaaagatataatgggagtttctcgtgaattcgacgagtttcttgagaggattctagtggaacacgaggagaaccttgagggggatcaagatagggacatgattgatcatttgttggaagcttatagaaacgaagaagcagaatataagatcactagaaaacagatcaagtctttaattgtggaaatttttcttggaggcactgacagctcggcgcagacgatacaatggactatggcggagatacttaacaaccccggcgttctcgagaaattaagagcagaaatcgattccgttgtggggggaaaaaggttgattcaagaatcagatcttccaaacctcccttatttgcaagctgttgttaaagaagggctaagattgcatccctcggctcctgtcttgttaagggtatttggagaaagttgcgaggtcaaagagttctacgtaccggagaaaacaacacttgttgttaatctctatgctgtgaatagagatcctgattcttgggaagatcctgatatgtttaagccagagaggtttttagtttcttcgatatcaggagatgaagaaaagataagagagcaagccgtgaagtatgttacttttggaggtggaaggaggacatgtcccgcggtaaaactagctcatatctttatggaaactgcgattggagcgatggtgcagtgttttgactggagaattaaaggagagaaagtatacatggaagaggctgtttcaggacttagtttgaaaatggctcatccgcttaagtgcactcctgttgttcggttcgaccctttcagcttttga

SEQ ID NO: 81748 - protein, 499 aa, Arabidopsis thaliana
  peptide (1)..(499): Ceres Seq. ID no. 12661186
MAELIIVDFQNISIFILLCLFSFLCYALFFKKPKGFDLPPSPPSLPIIGHLHHLLSSSLPHKSFQKLSFKYGPLLHLRIFNFPMVLVSSASMAYEVFRTNDVNVSYRFVPVNKDSLVFGSSGFVTAPYGDYWKFMKKLISTKLLRPHALELSKGNRAEELRRFCLDLQGKARKKESVEIGKVALKLTNNIICRMSMGRSCSEKNGVAERARELVNKSFALSVKLFFSNMFRKDIMGVSREFDEFLERILVEHEENLEGDQDRDMIDHLLEAYRNEEAEYKITRKQIKSLIVEIFLGGTDSSAQTIQWTMAEILNNPGVLEKLRAEIDSVVGGKRLIQESDLPNLPYLQAVVKEGLRLHPSAPVLLRVFGESCEVKEFYVPEKTTLVVNLYAVNRDPDSWEDPDMFKPERFLVSSISGDEEKIREQAVKYVTFGGGRRTCPAVKLAHIFMETAIGAMVQCFDWRIKGEKVYMEEAVSGLSLKMAHPLKCTPVVRFDPFSF

SEQ ID NO: 81749 - protein, 416 aa, Arabidopsis thaliana
  peptide (1)..(416): Ceres Seq. ID no. 12661187
MVLVSSASMAYEVFRTNDVNVSYRFVPVNKDSLVFGSSGFVTAPYGDYWKFMKKLISTKLLRPHALELSKGNRAEELRRFCLDLQGKARKKESVEIGKVALKLTNNIICRMSMGRSCSEKNGVAERARELVNKSFALSVKLFFSNMFRKDIMGVSREFDEFLERILVEHEENLEGDQDRDMIDHLLEAYRNEEAEYKITRKQIKSLIVEIFLGGTDSSAQTIQWTMAEILNNPGVLEKLRAEIDSVVGGKRLIQESDLPNLPYLQAVVKEGLRLHPSAPVLLRVFGESCEVKEFYVPEKTTLVVNLYAVNRDPDSWEDPDMFKPERFLVSSISGDEEKIREQAVKYVTFGGGRRTCPAVKLAHIFMETAIGAMVQCFDWRIKGEKVYMEEAVSGLSLKMAHPLKCTPVVRFDPFSF

SEQ ID NO: 81750 - protein, 408 aa, Arabidopsis thaliana
  peptide (1)..(408): Ceres Seq. ID no. 12661188
MAYEVFRTNDVNVSYRFVPVNKDSLVFGSSGFVTAPYGDYWKFMKKLISTKLLRPHALELSKGNRAEELRRFCLDLQGKARKKESVEIGKVALKLTNNIICRMSMGRSCSEKNGVAERARELVNKSFALSVKLFFSNMFRKDIMGVSREFDEFLERILVEHEENLEGDQDRDMIDHLLEAYRNEEAEYKITRKQIKSLIVEIFLGGTDSSAQTIQWTMAEILNNPGVLEKLRAEIDSVVGGKRLIQESDLPNLPYLQAVVKEGLRLHPSAPVLLRVFGESCEVKEFYVPEKTTLVVNLYAVNRDPDSWEDPDMFKPERFLVSSISGDEEKIREQAVKYVTFGGGRRTCPAVKLAHIFMETAIGAMVQCFDWRIKGEKVYMEEAVSGLSLKMAHPLKCTPVVRFDPFSF

SEQ ID NO: 81751 - DNA, 1494 bp, Arabidopsis thaliana
  misc_feature (1)..(1494): Ceres Seq. ID no. 12661189
  misc_feature (1)..(1494): Ortholog of  Ceres SEQ ID NO 13594209 as cited in SEQ ID NO 59089
  misc_feature (1)..(1494): Ortholog of  Ceres SEQ ID NO 13502874 as cited in SEQ ID NO 66298
  misc_feature (1)..(1494): Ortholog of  Ceres SEQ ID NO 15169631 as cited in SEQ ID NO 67173
  misc_feature (1)..(1494): Ortholog of  Ceres SEQ ID NO 12614124 as cited in SEQ ID NO 68392
atggaaatgatgatattaatctcactgtgcttaaccactttcctaactattctactcttcttcaaatcactcctcaaacgacccaactctaacttacctccgtctccatggcgtcttccggtcattggaaacctccatcagctcagtctccacccgcaccgtgctctctcttccctcagcgcgcgccacgggccactcatgctccttcgtttcggccgtgtccctgttctcattgtctcttctgctgacgtagctcatgatgtcatgaagacacatgatcttaagtttgccaaccgtccgatcacgaaatctgcccataaaatctcgaatggcgggcgagatttggtattcgccccctatggcgaatactggaggaacgttaagagtctatgcacgatacatctcctcagcaacaaaatggttcaatcctctgagaaaagaagagaagaagagataactctattgatggagacgctggaagaagcaagtttatcttcttcatcggtgaatctaagcaaactcattactaatatggtaagcgacataatgggtaaagttgtattggggaaaaaatacagcggcgaggaaggcacaatcgatgtcaagaccataacaaagagtttcttggatgccgtggggctttccccggtcggggaatacattccgagtttggcatggataggtaagattacgggttcagatggtaagctagagaaaataaccaagcagtttggtgattttatagaaaaagtgttgcaagaacatgaggatacaactgccgacaaagaaacaccagattttgttgatatgttgctaacaattcaaagagatgagactgcacaatgccaattggataaaagcgacttaaaagtcatcatatttgaaatgtttttagggagcacgacaacaacttccgcggtaatagagtgggcgatgacacgcctaatgagaaatccagaatgtttgaagaaacttcaagatgagattcgttcagtttcgaagatgaattcatatgtatcaggaaaagaagttgaaaatatgaactacttaaaagctgtgatcaaggaggtacttcggctgcatcccccactcccgctattagttccgcgactattaagcgaagatgtaaaattaaaaggatacgacattactgcgggcacacaggtgatcattaatgcttgggcgatccaacgagacactgcgacatggggatcggatgcacaagaatttaggccagaaagacattttgattcaacttgggattttgttggacgaaatttcaaatacattccatttggagcagggagaaggttatgtcccggcattggacttgggtcggtgatggcaagtgtgactttggccaatcttgtgaaacggtttgactggagagttgaggatggaccttcaggatatgataaaccagatctagtagagggagctggaatcgatgtttgccgaaaatttcctcttgttgtctttccatcttctgcttag

SEQ ID NO: 81752 - protein, 497 aa, Arabidopsis thaliana
  peptide (1)..(497): Ceres Seq. ID no. 12661190
MEMMILISLCLTTFLTILLFFKSLLKRPNSNLPPSPWRLPVIGNLHQLSLHPHRALSSLSARHGPLMLLRFGRVPVLIVSSADVAHDVMKTHDLKFANRPITKSAHKISNGGRDLVFAPYGEYWRNVKSLCTIHLLSNKMVQSSEKRREEEITLLMETLEEASLSSSSVNLSKLITNMVSDIMGKVVLGKKYSGEEGTIDVKTITKSFLDAVGLSPVGEYIPSLAWIGKITGSDGKLEKITKQFGDFIEKVLQEHEDTTADKETPDFVDMLLTIQRDETAQCQLDKSDLKVIIFEMFLGSTTTTSAVIEWAMTRLMRNPECLKKLQDEIRSVSKMNSYVSGKEVENMNYLKAVIKEVLRLHPPLPLLVPRLLSEDVKLKGYDITAGTQVIINAWAIQRDTATWGSDAQEFRPERHFDSTWDFVGRNFKYIPFGAGRRLCPGIGLGSVMASVTLANLVKRFDWRVEDGPSGYDKPDLVEGAGIDVCRKFPLVVFPSSA

SEQ ID NO: 81753 - protein, 495 aa, Arabidopsis thaliana
  peptide (1)..(495): Ceres Seq. ID no. 12661191
MMILISLCLTTFLTILLFFKSLLKRPNSNLPPSPWRLPVIGNLHQLSLHPHRALSSLSARHGPLMLLRFGRVPVLIVSSADVAHDVMKTHDLKFANRPITKSAHKISNGGRDLVFAPYGEYWRNVKSLCTIHLLSNKMVQSSEKRREEEITLLMETLEEASLSSSSVNLSKLITNMVSDIMGKVVLGKKYSGEEGTIDVKTITKSFLDAVGLSPVGEYIPSLAWIGKITGSDGKLEKITKQFGDFIEKVLQEHEDTTADKETPDFVDMLLTIQRDETAQCQLDKSDLKVIIFEMFLGSTTTTSAVIEWAMTRLMRNPECLKKLQDEIRSVSKMNSYVSGKEVENMNYLKAVIKEVLRLHPPLPLLVPRLLSEDVKLKGYDITAGTQVIINAWAIQRDTATWGSDAQEFRPERHFDSTWDFVGRNFKYIPFGAGRRLCPGIGLGSVMASVTLANLVKRFDWRVEDGPSGYDKPDLVEGAGIDVCRKFPLVVFPSSA

SEQ ID NO: 81754 - protein, 494 aa, Arabidopsis thaliana
  peptide (1)..(494): Ceres Seq. ID no. 12661192
MILISLCLTTFLTILLFFKSLLKRPNSNLPPSPWRLPVIGNLHQLSLHPHRALSSLSARHGPLMLLRFGRVPVLIVSSADVAHDVMKTHDLKFANRPITKSAHKISNGGRDLVFAPYGEYWRNVKSLCTIHLLSNKMVQSSEKRREEEITLLMETLEEASLSSSSVNLSKLITNMVSDIMGKVVLGKKYSGEEGTIDVKTITKSFLDAVGLSPVGEYIPSLAWIGKITGSDGKLEKITKQFGDFIEKVLQEHEDTTADKETPDFVDMLLTIQRDETAQCQLDKSDLKVIIFEMFLGSTTTTSAVIEWAMTRLMRNPECLKKLQDEIRSVSKMNSYVSGKEVENMNYLKAVIKEVLRLHPPLPLLVPRLLSEDVKLKGYDITAGTQVIINAWAIQRDTATWGSDAQEFRPERHFDSTWDFVGRNFKYIPFGAGRRLCPGIGLGSVMASVTLANLVKRFDWRVEDGPSGYDKPDLVEGAGIDVCRKFPLVVFPSSA

SEQ ID NO: 81755 - DNA, 1149 bp, Arabidopsis thaliana
  misc_feature (1)..(1149): Ceres Seq. ID no. 12661213
  misc_feature (1)..(1149): Ortholog of  Ceres SEQ ID NO 14308120 as cited in SEQ ID NO 58423
  misc_feature (1)..(1149): Ortholog of  Ceres SEQ ID NO 15177787 as cited in SEQ ID NO 59431
  misc_feature (1)..(1149): Ortholog of  Ceres SEQ ID NO 13595647 as cited in SEQ ID NO 59884
  misc_feature (1)..(1149): Ortholog of  Ceres SEQ ID NO 12617197 as cited in SEQ ID NO 63406
  misc_feature (1)..(1149): Ortholog of  Ceres SEQ ID NO 13597804 as cited in SEQ ID NO 64182
  misc_feature (1)..(1149): Ortholog of  Ceres SEQ ID NO 14301622 as cited in SEQ ID NO 65156
  misc_feature (1)..(1149): Ortholog of  Ceres SEQ ID NO 13598565 as cited in SEQ ID NO 65250
  misc_feature (1)..(1149): Ortholog of  Ceres SEQ ID NO 13598597 as cited in SEQ ID NO 65496
  misc_feature (1)..(1149): Ortholog of  Ceres SEQ ID NO 13596284 as cited in SEQ ID NO 68273
atggttagtcagaaagagaccgtgtgtgtaaccggcgcttcgggtttcatcggttcatggctagtgatgcgattactagaacgtggttactttgttcgtgccaccgttcgagatcccggtaatttgaagaaagtacaacatcttcttgatttgccaaacgccaagacgctactcactttatggaaggctgatttatctgaggaaggaagctacgatgatgccataaacggatgtgacggtgttttccacgtggcaacacccatggattttgaatcaaaagatcctgagaacgaagtgataaagccgacagtgaatggaatgttggggataatgaaagcatgtgttaaggcaaagaccgtacgaagattcgtatttacttcatctgccggaaccgttaatgtagaagaacatcagaagaatgtctatgatgaaaatgattggagtgatcttgagtttatcatgtccaaaaagatgacaggatggatgtatttcgtgtcaaaaacgttagcggagaaagcagcgtgggatttcgccgaagagaaaggattagatttcattagtattattccaacattggtggtcggtccattcatcacaacgtctatgccgcctagccttatcaccgcgctctctcctatcactcggaacgaggcgcattactcgatcataagacaaggacagtatgtgcatttggacgacttatgcaacgctcatatcttcttatacgaacaagcagccgccaagggacgttatatttgttcctctcatgatgcaaccattcttactatctccaaatttctcaggccaaaataccccgaatataacgtaccttcaacgtttgaaggtgttgatgagaatctaaagagcattgaattcagttccaagaagctgacggacatggggtttaacttcaagtatagtctcgaggaaatgtttattgaatctattgagacatgtcgtcaaaagggttttctcccggtttcattatcgtaccaatccatatcggagatcaagactaagaatgaaaacattgacgtcaaaaccggagatggtttaaccgatggtatgaagccatgtaacaagacagaaacggggataaccggcgagagaaccgatgctcccatgctagcacaacagatgtgtgcctag

SEQ ID NO: 81756 - protein, 382 aa, Arabidopsis thaliana
  peptide (1)..(382): Ceres Seq. ID no. 12661214
MVSQKETVCVTGASGFIGSWLVMRLLERGYFVRATVRDPGNLKKVQHLLDLPNAKTLLTLWKADLSEEGSYDDAINGCDGVFHVATPMDFESKDPENEVIKPTVNGMLGIMKACVKAKTVRRFVFTSSAGTVNVEEHQKNVYDENDWSDLEFIMSKKMTGWMYFVSKTLAEKAAWDFAEEKGLDFISIIPTLVVGPFITTSMPPSLITALSPITRNEAHYSIIRQGQYVHLDDLCNAHIFLYEQAAAKGRYICSSHDATILTISKFLRPKYPEYNVPSTFEGVDENLKSIEFSSKKLTDMGFNFKYSLEEMFIESIETCRQKGFLPVSLSYQSISEIKTKNENIDVKTGDGLTDGMKPCNKTETGITGERTDAPMLAQQMCA

SEQ ID NO: 81757 - protein, 360 aa, Arabidopsis thaliana
  peptide (1)..(360): Ceres Seq. ID no. 12661215
MRLLERGYFVRATVRDPGNLKKVQHLLDLPNAKTLLTLWKADLSEEGSYDDAINGCDGVFHVATPMDFESKDPENEVIKPTVNGMLGIMKACVKAKTVRRFVFTSSAGTVNVEEHQKNVYDENDWSDLEFIMSKKMTGWMYFVSKTLAEKAAWDFAEEKGLDFISIIPTLVVGPFITTSMPPSLITALSPITRNEAHYSIIRQGQYVHLDDLCNAHIFLYEQAAAKGRYICSSHDATILTISKFLRPKYPEYNVPSTFEGVDENLKSIEFSSKKLTDMGFNFKYSLEEMFIESIETCRQKGFLPVSLSYQSISEIKTKNENIDVKTGDGLTDGMKPCNKTETGITGERTDAPMLAQQMCA

SEQ ID NO: 81758 - protein, 295 aa, Arabidopsis thaliana
  peptide (1)..(295): Ceres Seq. ID no. 12661216
MDFESKDPENEVIKPTVNGMLGIMKACVKAKTVRRFVFTSSAGTVNVEEHQKNVYDENDWSDLEFIMSKKMTGWMYFVSKTLAEKAAWDFAEEKGLDFISIIPTLVVGPFITTSMPPSLITALSPITRNEAHYSIIRQGQYVHLDDLCNAHIFLYEQAAAKGRYICSSHDATILTISKFLRPKYPEYNVPSTFEGVDENLKSIEFSSKKLTDMGFNFKYSLEEMFIESIETCRQKGFLPVSLSYQSISEIKTKNENIDVKTGDGLTDGMKPCNKTETGITGERTDAPMLAQQMCA

SEQ ID NO: 81759 - DNA, 5145 bp, Arabidopsis thaliana
  misc_feature (1)..(5145): Ceres Seq. ID no. 12661231
  misc_feature (1)..(5145): Ortholog of  Ceres SEQ ID NO 15169400 as cited in SEQ ID NO 55093
atggctaactcttccgctggctccgccgcagaccaccgcaacaaacacctctccgtcaatccaccgcaccagatcttcaaagatatccaaggttctgacaatgcgattcctctttcaccacagtggcttctctccaaaccaggggagaacaagactgggatgggaactggggatcctaatcagtatggaaaccattcggatgttgtgagaacaacagggaatggggaggagacactggataatctgaagaaaaaagatgttttccggccatccttgcttgatgcagaaagtggtcgtcgtgatcgttggcgtgatgaggaaagggacaccttgtcctcagtccgaaatgaccgctggcggaatggcgacaaagactctggtgataataagaaggttgaccggtgggataatgtggctcctaaatttggggaacaacgacgtggtccgaatgaccggtggactgattcaggaaacaaggatgctgcgccagagcagaggcgtgagagcaagtggaactctcgctggggtcctgatgacaaggaagctgagattccgcgtaataagtgggatgaacctggtaaggacggtgaaatcattcgtgagaagggtccatctcttcctactagcgatggagaccattaccggccctggagaccctctcaaggtcgaggaagaggagaagctcttcacaaccaatcaacaccaaacaaacaggttacttccttctcccacagcagggggcgtggagagaacactgctatcttttcagctggacgtggaaggatgagtcctggtggaagcatttttactagcgcaccaaaccagtctcatccccctggatctgcctctgacaagggggaaagtggtcctggagaacctccccatctgagatatagcagaatgaaactgttggatgtgtacaggatggctgacacagagtgttatgaaaagtttccggatgggtttattgaggtgccttccctaacgtctgaggagccaacggatcctctggctctttgtgctccaagttccgatgaagtgaatgttctggatgcgattgagaaaggaaaaatagtgagcagtggtgcccctcagacgtccaaggatggccctactggacgaaatccggtcgagttttcacaacctagacggatcaggcctgctggaagcagagaagatatgacattcggtgctgaggagtctaaagatgaaagtggagaaacaaggaactatccagatgataagtttaggcctgaagcttctcatgaaggttatgcaccttttaggagaggcaatgaggcacctgtcagagaactgaaagaacccagtatgcagggaaatgctcatgttcaatctgcctctccatggcgtcagtcttctgggggagaaaggtcgaataggaactcacatgattggaatgacccttcagctgatagcaggctgaaatcttctgacagtgtttggtcgcatcctaaagattcaataaatcatttaggtggcaataatatgatgttgccgcagtcgaaaggtgaatcaagatggcaaatcagtgaagatccttcacttagaaggcagccatctctggtgttcgacagggagcaggaagttagaaagcttctcccatcttcgcctgaagaactttcactctattataaagatcctcagggtctaattcaaggccctttttctggatctgatatcattggatggtttgaggctgggtattttggcatagatttgctagttcgtcttgcaagtgcaccaaatgattctcctttttcattacttggtgatgtaatgccacatttacgggctaagtcgggtccaccacctggttttactggtgccaagcaaaacgaatttgttgatgcagctggtacatcagccttccctggtgtggggaaagttcattctgggatgggtgagactgatatgttgcaaaatgatatgaggtataagcatgttgcaggaactgtagcggagaaccggtttattgaatcattgatgtctgggggtctgaccaattcagctcaaggtgttcaaggatatggagtaaatagttctggtgggttgtctttaccagttactgatggtggggctgatatgtatctcctggccaagaaattggaacttgagcggcagagatcaatacctagtccgtattcatattggcctggtcgggaatctgcaaacctgatgccaggatcagagaatgtgtcagaaaatgctcaacaacctacccgttctccaagttctgatttgttgtccatcctccaaggtgtaacggataggtcttctcctgctgttagtggtcctcttcctgcttggtctcaacccattcaaaaggaaagtgatttgcaccatgctaaaactttccaaacgcaaattccctttggggtccaacagcagagactgccagagcagaatttacctttgtcaggtttacttggtcaacctatggaaaataatccaggtggcatgttatctcctgatatgatgctcgctgctggactctctcaagagcatcaatcgctcaatctgttgcagcagcaacagctcttgttgcagttgaatgctcagacaccactttctgcccaacatcagcgtctattggtggaaaagatgctcttgcttaaacaccaacataaacaagaagagcagcagcaattgttacgacagcaacagcagctgtattctcaggtttttgctgatcaacagcgttctcagcaacggtttggagacccatcttatggtcagttgcaggcgtctcttgatgcgcttaggctgcaaccatcaaaagatatgtcacaagtcaatcagcaggtgcaggttcctgtttcccatgaggagcgaggcatcaacttagctgatttgctcccagtaacccatgccactaatcagactgttgcttctttcgaaaccccctctctgcacctgcaaaaccagctatttggtaatgttgaccctaggatggttctgcctgatcaaattgatgatacccataaaaaagagtcgaaatcagaatatgaaagaacagtttctgcagactatgtgaacagcttgtactcagaaaagcctgtcctttcccctggctatcatgctacacataatgtggaagaacctgtgagctatccaaacaatgaaagctccactgctactatgacagctcccgaaatagttgaaagtaagttgctggaggagcagtctaaggacatgtatgctggaaagggagaggtcagtattgagttatctggggagactcctgcaactgaagttaaaaacaatgacgtttctgtagcacggaagacttctgagaagaagtccaggaagcagcgggctaagcaggctgctgacctggctaagtcaacttctagagctcctctgcaggagacaaagaaacctcaaccaggaagtgctgatgattctgagataaagggtaaaactaaaaagtcggctgacactttgatagacaatgatactcacctcattaaaagctccacagccacagcttcaaacacttcccaaatgagttctgaagtagattcagtcaggggagaagagtcttcactgcaaaacacacgaacacaaccaggacgagcttggaagcctgctcctggctttaagccgaagtcattactggaaattcaaatggaagaacagagggtagcgcaagcagaagctttagctccaaagatttcttctaccgtgaattcagtgggttcggcggctccttgggctggaattgttaccaattcagattctaacatactaagggagactcatggagagtcagctattactcaaaccggtgttgtaaagcctgaaagtgttcctactcttaaggctaagaaaagccacttgcatgacttgctggctgatgatgtttttgccaaatccagtgacaaagagagggaagtaatggaaatcatctctaacaatgatgcatttatgcaagtcacgaccactaatgcagagtctttcgacgatgataactttattgacgctagggaaacaaaaaagagccgtaagaaatctgcgagggcaaaaacttctggtgcaaaaattgctgcacatgttcctgctgtagatacatccctccaaacaaactctgttgagaagggaaaaagttctcgtattctgcagcagcaggagaaggaagttttgccggctattccttctgggccttctctgggagattttgttctctggaaaggagagtctgtaaacaatcctccaccggctgctgcatggtcttctggtcccaaaaaatctacaaaacctagctcgcttagggacatcgtgaaggagcaggagaagatgacgacctcatctcatccaccccctagtccagtacctaccacccagaaagctattccacctcaggctcatcagggcggtgcttcctggtcgcgttctgcatcttcaccatcgcaggctgtttctcaatcttcctctcagtcaaaatccaaaggagatgatgaccttttctggggtccagttgagcaatcaacccaggacacaaaacagggagactttccacatcttacaagtcaaaacagttggggaaccaaaaacactcctggaaaagttaatgcaggaacttcactgaatcgacagaaatcagtttcaatgggatctgcggatcgggttttgtcttcacctgttgtcactcaggcgtcacacaaagggaaaaaagaggcagtaacaaaactcacagaggcgaatggcttcagagattggtgcaaaagcgaatgtctcagacttcttggttccgaagatacaagtgtcttggaattttgtctgaagctatcccgatcagaagctgaaactcttctgatagaaaatctggggtctcgtgaccctgaccacaagttcatcgacaaatttctcaactacaaagacctgttaccatcagaagtagttgagattgcatttcaatcaaagggctcgggagtcgggacccgaaacaacacaggtgaagactattactataacactacagctgcaaatgacgggttctcgaaagttggaggaaagaaaaaggcgaagaaagggaagaaggttagcttgagcgcatcggttctgggatttaatgtggttagtaaccggatcatgatgggagagattcagacaattgaggactga

SEQ ID NO: 81760 - protein, 1714 aa, Arabidopsis thaliana
  peptide (1)..(1714): Ceres Seq. ID no. 12661232
MANSSAGSAADHRNKHLSVNPPHQIFKDIQGSDNAIPLSPQWLLSKPGENKTGMGTGDPNQYGNHSDVVRTTGNGEETLDNLKKKDVFRPSLLDAESGRRDRWRDEERDTLSSVRNDRWRNGDKDSGDNKKVDRWDNVAPKFGEQRRGPNDRWTDSGNKDAAPEQRRESKWNSRWGPDDKEAEIPRNKWDEPGKDGEIIREKGPSLPTSDGDHYRPWRPSQGRGRGEALHNQSTPNKQVTSFSHSRGRGENTAIFSAGRGRMSPGGSIFTSAPNQSHPPGSASDKGESGPGEPPHLRYSRMKLLDVYRMADTECYEKFPDGFIEVPSLTSEEPTDPLALCAPSSDEVNVLDAIEKGKIVSSGAPQTSKDGPTGRNPVEFSQPRRIRPAGSREDMTFGAEESKDESGETRNYPDDKFRPEASHEGYAPFRRGNEAPVRELKEPSMQGNAHVQSASPWRQSSGGERSNRNSHDWNDPSADSRLKSSDSVWSHPKDSINHLGGNNMMLPQSKGESRWQISEDPSLRRQPSLVFDREQEVRKLLPSSPEELSLYYKDPQGLIQGPFSGSDIIGWFEAGYFGIDLLVRLASAPNDSPFSLLGDVMPHLRAKSGPPPGFTGAKQNEFVDAAGTSAFPGVGKVHSGMGETDMLQNDMRYKHVAGTVAENRFIESLMSGGLTNSAQGVQGYGVNSSGGLSLPVTDGGADMYLLAKKLELERQRSIPSPYSYWPGRESANLMPGSENVSENAQQPTRSPSSDLLSILQGVTDRSSPAVSGPLPAWSQPIQKESDLHHAKTFQTQIPFGVQQQRLPEQNLPLSGLLGQPMENNPGGMLSPDMMLAAGLSQEHQSLNLLQQQQLLLQLNAQTPLSAQHQRLLVEKMLLLKHQHKQEEQQQLLRQQQQLYSQVFADQQRSQQRFGDPSYGQLQASLDALRLQPSKDMSQVNQQVQVPVSHEERGINLADLLPVTHATNQTVASFETPSLHLQNQLFGNVDPRMVLPDQIDDTHKKESKSEYERTVSADYVNSLYSEKPVLSPGYHATHNVEEPVSYPNNESSTATMTAPEIVESKLLEEQSKDMYAGKGEVSIELSGETPATEVKNNDVSVARKTSEKKSRKQRAKQAADLAKSTSRAPLQETKKPQPGSADDSEIKGKTKKSADTLIDNDTHLIKSSTATASNTSQMSSEVDSVRGEESSLQNTRTQPGRAWKPAPGFKPKSLLEIQMEEQRVAQAEALAPKISSTVNSVGSAAPWAGIVTNSDSNILRETHGESAITQTGVVKPESVPTLKAKKSHLHDLLADDVFAKSSDKEREVMEIISNNDAFMQVTTTNAESFDDDNFIDARETKKSRKKSARAKTSGAKIAAHVPAVDTSLQTNSVEKGKSSRILQQQEKEVLPAIPSGPSLGDFVLWKGESVNNPPPAAAWSSGPKKSTKPSSLRDIVKEQEKMTTSSHPPPSPVPTTQKAIPPQAHQGGASWSRSASSPSQAVSQSSSQSKSKGDDDLFWGPVEQSTQDTKQGDFPHLTSQNSWGTKNTPGKVNAGTSLNRQKSVSMGSADRVLSSPVVTQASHKGKKEAVTKLTEANGFRDWCKSECLRLLGSEDTSVLEFCLKLSRSEAETLLIENLGSRDPDHKFIDKFLNYKDLLPSEVVEIAFQSKGSGVGTRNNTGEDYYYNTTAANDGFSKVGGKKKAKKGKKVSLSASVLGFNVVSNRIMMGEIQTIED

SEQ ID NO: 81761 - protein, 1661 aa, Arabidopsis thaliana
  peptide (1)..(1661): Ceres Seq. ID no. 12661233
MGTGDPNQYGNHSDVVRTTGNGEETLDNLKKKDVFRPSLLDAESGRRDRWRDEERDTLSSVRNDRWRNGDKDSGDNKKVDRWDNVAPKFGEQRRGPNDRWTDSGNKDAAPEQRRESKWNSRWGPDDKEAEIPRNKWDEPGKDGEIIREKGPSLPTSDGDHYRPWRPSQGRGRGEALHNQSTPNKQVTSFSHSRGRGENTAIFSAGRGRMSPGGSIFTSAPNQSHPPGSASDKGESGPGEPPHLRYSRMKLLDVYRMADTECYEKFPDGFIEVPSLTSEEPTDPLALCAPSSDEVNVLDAIEKGKIVSSGAPQTSKDGPTGRNPVEFSQPRRIRPAGSREDMTFGAEESKDESGETRNYPDDKFRPEASHEGYAPFRRGNEAPVRELKEPSMQGNAHVQSASPWRQSSGGERSNRNSHDWNDPSADSRLKSSDSVWSHPKDSINHLGGNNMMLPQSKGESRWQISEDPSLRRQPSLVFDREQEVRKLLPSSPEELSLYYKDPQGLIQGPFSGSDIIGWFEAGYFGIDLLVRLASAPNDSPFSLLGDVMPHLRAKSGPPPGFTGAKQNEFVDAAGTSAFPGVGKVHSGMGETDMLQNDMRYKHVAGTVAENRFIESLMSGGLTNSAQGVQGYGVNSSGGLSLPVTDGGADMYLLAKKLELERQRSIPSPYSYWPGRESANLMPGSENVSENAQQPTRSPSSDLLSILQGVTDRSSPAVSGPLPAWSQPIQKESDLHHAKTFQTQIPFGVQQQRLPEQNLPLSGLLGQPMENNPGGMLSPDMMLAAGLSQEHQSLNLLQQQQLLLQLNAQTPLSAQHQRLLVEKMLLLKHQHKQEEQQQLLRQQQQLYSQVFADQQRSQQRFGDPSYGQLQASLDALRLQPSKDMSQVNQQVQVPVSHEERGINLADLLPVTHATNQTVASFETPSLHLQNQLFGNVDPRMVLPDQIDDTHKKESKSEYERTVSADYVNSLYSEKPVLSPGYHATHNVEEPVSYPNNESSTATMTAPEIVESKLLEEQSKDMYAGKGEVSIELSGETPATEVKNNDVSVARKTSEKKSRKQRAKQAADLAKSTSRAPLQETKKPQPGSADDSEIKGKTKKSADTLIDNDTHLIKSSTATASNTSQMSSEVDSVRGEESSLQNTRTQPGRAWKPAPGFKPKSLLEIQMEEQRVAQAEALAPKISSTVNSVGSAAPWAGIVTNSDSNILRETHGESAITQTGVVKPESVPTLKAKKSHLHDLLADDVFAKSSDKEREVMEIISNNDAFMQVTTTNAESFDDDNFIDARETKKSRKKSARAKTSGAKIAAHVPAVDTSLQTNSVEKGKSSRILQQQEKEVLPAIPSGPSLGDFVLWKGESVNNPPPAAAWSSGPKKSTKPSSLRDIVKEQEKMTTSSHPPPSPVPTTQKAIPPQAHQGGASWSRSASSPSQAVSQSSSQSKSKGDDDLFWGPVEQSTQDTKQGDFPHLTSQNSWGTKNTPGKVNAGTSLNRQKSVSMGSADRVLSSPVVTQASHKGKKEAVTKLTEANGFRDWCKSECLRLLGSEDTSVLEFCLKLSRSEAETLLIENLGSRDPDHKFIDKFLNYKDLLPSEVVEIAFQSKGSGVGTRNNTGEDYYYNTTAANDGFSKVGGKKKAKKGKKVSLSASVLGFNVVSNRIMMGEIQTIED

SEQ ID NO: 81762 - protein, 1453 aa, Arabidopsis thaliana
  peptide (1)..(1453): Ceres Seq. ID no. 12661234
MSPGGSIFTSAPNQSHPPGSASDKGESGPGEPPHLRYSRMKLLDVYRMADTECYEKFPDGFIEVPSLTSEEPTDPLALCAPSSDEVNVLDAIEKGKIVSSGAPQTSKDGPTGRNPVEFSQPRRIRPAGSREDMTFGAEESKDESGETRNYPDDKFRPEASHEGYAPFRRGNEAPVRELKEPSMQGNAHVQSASPWRQSSGGERSNRNSHDWNDPSADSRLKSSDSVWSHPKDSINHLGGNNMMLPQSKGESRWQISEDPSLRRQPSLVFDREQEVRKLLPSSPEELSLYYKDPQGLIQGPFSGSDIIGWFEAGYFGIDLLVRLASAPNDSPFSLLGDVMPHLRAKSGPPPGFTGAKQNEFVDAAGTSAFPGVGKVHSGMGETDMLQNDMRYKHVAGTVAENRFIESLMSGGLTNSAQGVQGYGVNSSGGLSLPVTDGGADMYLLAKKLELERQRSIPSPYSYWPGRESANLMPGSENVSENAQQPTRSPSSDLLSILQGVTDRSSPAVSGPLPAWSQPIQKESDLHHAKTFQTQIPFGVQQQRLPEQNLPLSGLLGQPMENNPGGMLSPDMMLAAGLSQEHQSLNLLQQQQLLLQLNAQTPLSAQHQRLLVEKMLLLKHQHKQEEQQQLLRQQQQLYSQVFADQQRSQQRFGDPSYGQLQASLDALRLQPSKDMSQVNQQVQVPVSHEERGINLADLLPVTHATNQTVASFETPSLHLQNQLFGNVDPRMVLPDQIDDTHKKESKSEYERTVSADYVNSLYSEKPVLSPGYHATHNVEEPVSYPNNESSTATMTAPEIVESKLLEEQSKDMYAGKGEVSIELSGETPATEVKNNDVSVARKTSEKKSRKQRAKQAADLAKSTSRAPLQETKKPQPGSADDSEIKGKTKKSADTLIDNDTHLIKSSTATASNTSQMSSEVDSVRGEESSLQNTRTQPGRAWKPAPGFKPKSLLEIQMEEQRVAQAEALAPKISSTVNSVGSAAPWAGIVTNSDSNILRETHGESAITQTGVVKPESVPTLKAKKSHLHDLLADDVFAKSSDKEREVMEIISNNDAFMQVTTTNAESFDDDNFIDARETKKSRKKSARAKTSGAKIAAHVPAVDTSLQTNSVEKGKSSRILQQQEKEVLPAIPSGPSLGDFVLWKGESVNNPPPAAAWSSGPKKSTKPSSLRDIVKEQEKMTTSSHPPPSPVPTTQKAIPPQAHQGGASWSRSASSPSQAVSQSSSQSKSKGDDDLFWGPVEQSTQDTKQGDFPHLTSQNSWGTKNTPGKVNAGTSLNRQKSVSMGSADRVLSSPVVTQASHKGKKEAVTKLTEANGFRDWCKSECLRLLGSEDTSVLEFCLKLSRSEAETLLIENLGSRDPDHKFIDKFLNYKDLLPSEVVEIAFQSKGSGVGTRNNTGEDYYYNTTAANDGFSKVGGKKKAKKGKKVSLSASVLGFNVVSNRIMMGEIQTIED

SEQ ID NO: 81763 - DNA, 897 bp, Arabidopsis thaliana
  misc_feature (1)..(897): Ceres Seq. ID no. 12661242
  misc_feature (1)..(897): Ortholog of  Ceres SEQ ID NO 12608620 as cited in SEQ ID NO 60192
atggcagaggcaagtttctatatcggagtcataggaaatgtaatctccgtactagttttcctctcaccagtattattaatcgatcggtccatattaatataccaaacaaaaatcatcagggagacgttttggaaaatagtgaagcggagatcaacggaggagtacaaaagcttgccgtacatttgcacgttgttaggatcatcgctatggacatattacggcatcgtcactcccggagaatatcttgtctccaccgttaatggctttggtgctcttgttgaaaccatctacgtttcactttttctcttttatgcccctcgacatctcaagctgaaaacagtggatgtggatgcgatgttgaacgtgttttttccaatcgcggcgattgtggcaacgagaagtgcgtttgaagatgagaagatgcgttctcaatcaataggtttcatatctgctggtctaaacattataatgtatggttctccactttcagcaatgctactatactgtaccacgacttggtatggtaggtccatatcttggataaagacatatatacgtaacatttcattttcaatcattcgcaacaaaataaatagaatacgttttgagtttatcacaatatctgttataatatatagactgatcatagtgtctaatttcttaatacaatatgcagaaaacagtagtgacaacaaagagcgtgaaatacatgccgttttggttgtcgtttttcctcttcttaaacggcgcgatttgggctgtctatgctttactccaacacgacgttttcttactcgtaaaaatgccaaaccggttggtttaagcaacggtttaagtgagattgctcaagatgaagaggaaggcctcacatcacgtgttgaacctctcctctcttaa

SEQ ID NO: 81764 - protein, 298 aa, Arabidopsis thaliana
  peptide (1)..(298): Ceres Seq. ID no. 12661243
MAEASFYIGVIGNVISVLVFLSPVLLIDRSILIYQTKIIRETFWKIVKRRSTEEYKSLPYICTLLGSSLWTYYGIVTPGEYLVSTVNGFGALVETIYVSLFLFYAPRHLKLKTVDVDAMLNVFFPIAAIVATRSAFEDEKMRSQSIGFISAGLNIIMYGSPLSAMLLYCTTTWYGRSISWIKTYIRNISFSIIRNKINRIRFEFITISVIIYRLIIVSNFLIQYAENSSDNKEREIHAVLVVVFPLLKRRDLGCLCFTPTRRFLTRKNAKPVGLSNGLSEIAQDEEEGLTSRVEPLLS

SEQ ID NO: 81765 - protein, 180 aa, Arabidopsis thaliana
  peptide (1)..(180): Ceres Seq. ID no. 12661244
MLNVFFPIAAIVATRSAFEDEKMRSQSIGFISAGLNIIMYGSPLSAMLLYCTTTWYGRSISWIKTYIRNISFSIIRNKINRIRFEFITISVIIYRLIIVSNFLIQYAENSSDNKEREIHAVLVVVFPLLKRRDLGCLCFTPTRRFLTRKNAKPVGLSNGLSEIAQDEEEGLTSRVEPLLS

SEQ ID NO: 81766 - protein, 158 aa, Arabidopsis thaliana
  peptide (1)..(158): Ceres Seq. ID no. 12661245
MRSQSIGFISAGLNIIMYGSPLSAMLLYCTTTWYGRSISWIKTYIRNISFSIIRNKINRIRFEFITISVIIYRLIIVSNFLIQYAENSSDNKEREIHAVLVVVFPLLKRRDLGCLCFTPTRRFLTRKNAKPVGLSNGLSEIAQDEEEGLTSRVEPLLS

SEQ ID NO: 81767 - DNA, 2106 bp, Arabidopsis thaliana
  misc_feature (1)..(2106): Ceres Seq. ID no. 12661250
  misc_feature (1)..(2106): Ortholog of  Ceres SEQ ID NO 13594037 as cited in SEQ ID NO 55666
  misc_feature (1)..(2106): Ortholog of  Ceres SEQ ID NO 13657707 as cited in SEQ ID NO 66407
atgaataaatatgtcttgttaggcgtcacggctctcattatggcaatggtcatttgtgtagaggccaacgatggcaacagcccgagtaggaaaatggaagaggttcaccgtgaaagcaagctgatgataacaaagacgacggtgagtattatatgtgcctccaccgattacaaacaagattgcaccacgagtctcgcaaccgtgaggtcgccggatccccgaaatctaataagatctgcttttgaccttgctatcatctcgattcgaagtggaatcgacagagggatgattgatctaaagagtagagcagatgccgatatgcacacaagagaagcgcttaatacttgtagagagcttatggatgatgcgattgatgatcttcgaaaaacgagggataaatttaggggatttttgttcactagattgtcagacttcgttgaggatctttgtgtgtggcttagcggatcaatcacataccaacagacgtgcattgatggatttgaagggattgatagtgaagcggccgtgatgatggagagagtcatgaggaaggggcagcatctcactagcaatggattggcgattgccgcaaatctcgataaattattgaaggctttccgtattccatttccatttcttaggtcaagaagaggcagactcggcattttaggttcgggttcttcacgagacgaatcggtgggttcttcccaagattcccctccaaatgaagattcttctgatgattctcctagcacagtggactcttcggagaatcaaccagtggattcttcatcagaaaatcagtcgtcggactcttcaaataatagaccattagattcttccaagaatcaacaaatggaatcttccgaagatactcctaaaaaatcggcattttcagggaatcaaccattagacgactcttccgataaacttcctcaaaaatcgacttcttctgagaaccaaccgttggattcctccgagaaccctcctcaaaaatcaacttctagcgagaatcgaccgttggatcctcttcgcaaattgaatccccttaataaattggattctttgaaggatcgacacttatcggaggaaggagagttcccgccatgggtaacaccgcattcgcggaggcttcttgcacgtagacctagaaataatggaatcaaagcgaatgttgtggttgcaaaggacgggagtggtaagtgcaagactatcgcacaagcattggcaatggtaccaatgaagaacacaaagaagtttgtgattcacataaaggaaggtgtttacaaggagaaagtagaggtaaccaaaaaaatgctacacgtcatgttcgttggagacggaccaacaaagacggttatcactggagacattgccttcttaccagaccaagtcggcacctaccgcaccgcctccgttgcggtgaatggggactatttcatggcaaaggatatagggttcgagaacacggcaggagctgcacgccatcaagcagtcgcactccgagtttcagccgactttgctgtgttcttcaactgtcatatgaatggttaccaagacacgctttacgtccatactcatcgtcaattctaccgtaactgccgtgtctcaggcacgatcgatttcgtcttcggtgacgccaaggccgtttttcagaactgcgaattcgttatccgccgtcccatggaacaccaacagtgcatcgtcacagcacaaggacgaaaagaccggcgtgagacaactgggattgttatccacaatagccgtataaccggtgatgcatcatatcttcccgtgaaagccaagaacagagcatttttgggacggccatggaaagagttttcgaggacaattataatgaacacagagattgatgatgtgatagacccggaaggttggttgaagtggaacgagacgtttgcgctcaacacgttgttctacactgagtaccgcaacagaggtcgtggttcgggtcagggtcgtcgggttaggtggagaggtatcaagcggatctctgatagagccgcaagggagtttgctcccgggaatttcttacgtggcaacacatggatcccacaaacgcgtattccatacaatgctaactga

SEQ ID NO: 81768 - protein, 701 aa, Arabidopsis thaliana
  peptide (1)..(701): Ceres Seq. ID no. 12661251
MNKYVLLGVTALIMAMVICVEANDGNSPSRKMEEVHRESKLMITKTTVSIICASTDYKQDCTTSLATVRSPDPRNLIRSAFDLAIISIRSGIDRGMIDLKSRADADMHTREALNTCRELMDDAIDDLRKTRDKFRGFLFTRLSDFVEDLCVWLSGSITYQQTCIDGFEGIDSEAAVMMERVMRKGQHLTSNGLAIAANLDKLLKAFRIPFPFLRSRRGRLGILGSGSSRDESVGSSQDSPPNEDSSDDSPSTVDSSENQPVDSSSENQSSDSSNNRPLDSSKNQQMESSEDTPKKSAFSGNQPLDDSSDKLPQKSTSSENQPLDSSENPPQKSTSSENRPLDPLRKLNPLNKLDSLKDRHLSEEGEFPPWVTPHSRRLLARRPRNNGIKANVVVAKDGSGKCKTIAQALAMVPMKNTKKFVIHIKEGVYKEKVEVTKKMLHVMFVGDGPTKTVITGDIAFLPDQVGTYRTASVAVNGDYFMAKDIGFENTAGAARHQAVALRVSADFAVFFNCHMNGYQDTLYVHTHRQFYRNCRVSGTIDFVFGDAKAVFQNCEFVIRRPMEHQQCIVTAQGRKDRRETTGIVIHNSRITGDASYLPVKAKNRAFLGRPWKEFSRTIIMNTEIDDVIDPEGWLKWNETFALNTLFYTEYRNRGRGSGQGRRVRWRGIKRISDRAAREFAPGNFLRGNTWIPQTRIPYNAN

SEQ ID NO: 81769 - protein, 688 aa, Arabidopsis thaliana
  peptide (1)..(688): Ceres Seq. ID no. 12661252
MAMVICVEANDGNSPSRKMEEVHRESKLMITKTTVSIICASTDYKQDCTTSLATVRSPDPRNLIRSAFDLAIISIRSGIDRGMIDLKSRADADMHTREALNTCRELMDDAIDDLRKTRDKFRGFLFTRLSDFVEDLCVWLSGSITYQQTCIDGFEGIDSEAAVMMERVMRKGQHLTSNGLAIAANLDKLLKAFRIPFPFLRSRRGRLGILGSGSSRDESVGSSQDSPPNEDSSDDSPSTVDSSENQPVDSSSENQSSDSSNNRPLDSSKNQQMESSEDTPKKSAFSGNQPLDDSSDKLPQKSTSSENQPLDSSENPPQKSTSSENRPLDPLRKLNPLNKLDSLKDRHLSEEGEFPPWVTPHSRRLLARRPRNNGIKANVVVAKDGSGKCKTIAQALAMVPMKNTKKFVIHIKEGVYKEKVEVTKKMLHVMFVGDGPTKTVITGDIAFLPDQVGTYRTASVAVNGDYFMAKDIGFENTAGAARHQAVALRVSADFAVFFNCHMNGYQDTLYVHTHRQFYRNCRVSGTIDFVFGDAKAVFQNCEFVIRRPMEHQQCIVTAQGRKDRRETTGIVIHNSRITGDASYLPVKAKNRAFLGRPWKEFSRTIIMNTEIDDVIDPEGWLKWNETFALNTLFYTEYRNRGRGSGQGRRVRWRGIKRISDRAAREFAPGNFLRGNTWIPQTRIPYNAN

SEQ ID NO: 81770 - protein, 686 aa, Arabidopsis thaliana
  peptide (1)..(686): Ceres Seq. ID no. 12661253
MVICVEANDGNSPSRKMEEVHRESKLMITKTTVSIICASTDYKQDCTTSLATVRSPDPRNLIRSAFDLAIISIRSGIDRGMIDLKSRADADMHTREALNTCRELMDDAIDDLRKTRDKFRGFLFTRLSDFVEDLCVWLSGSITYQQTCIDGFEGIDSEAAVMMERVMRKGQHLTSNGLAIAANLDKLLKAFRIPFPFLRSRRGRLGILGSGSSRDESVGSSQDSPPNEDSSDDSPSTVDSSENQPVDSSSENQSSDSSNNRPLDSSKNQQMESSEDTPKKSAFSGNQPLDDSSDKLPQKSTSSENQPLDSSENPPQKSTSSENRPLDPLRKLNPLNKLDSLKDRHLSEEGEFPPWVTPHSRRLLARRPRNNGIKANVVVAKDGSGKCKTIAQALAMVPMKNTKKFVIHIKEGVYKEKVEVTKKMLHVMFVGDGPTKTVITGDIAFLPDQVGTYRTASVAVNGDYFMAKDIGFENTAGAARHQAVALRVSADFAVFFNCHMNGYQDTLYVHTHRQFYRNCRVSGTIDFVFGDAKAVFQNCEFVIRRPMEHQQCIVTAQGRKDRRETTGIVIHNSRITGDASYLPVKAKNRAFLGRPWKEFSRTIIMNTEIDDVIDPEGWLKWNETFALNTLFYTEYRNRGRGSGQGRRVRWRGIKRISDRAAREFAPGNFLRGNTWIPQTRIPYNAN

SEQ ID NO: 81771 - DNA, 1400 bp, Arabidopsis thaliana
  misc_feature (1)..(1400): Ceres Seq. ID no. 12661273
  misc_feature (1)..(1400): Ortholog of  Ceres SEQ ID NO 15177903 as cited in SEQ ID NO 54993
  misc_feature (1)..(1400): Ortholog of  Ceres SEQ ID NO 15177994 as cited in SEQ ID NO 55641
  misc_feature (1)..(1400): Ortholog of  Ceres SEQ ID NO 13595454 as cited in SEQ ID NO 56502
  misc_feature (1)..(1400): Ortholog of  Ceres SEQ ID NO 13589016 as cited in SEQ ID NO 68472
acacacacacccaactacttttttccatcgccggcctgtacaaatgtcgactacccgtaggatccgcggcgagaatcggttttataacccacctccgatgagaaaacttcaacaagagcgtgagaagaagagacttgaagcggaggagatagagaaagagaagaagaaggcaaaggagattctcgatcgaaagattaaagtcgaggagaaggagattaagcaacctgaggagtgctcgacctccgattgctctgtgccgagtcgggtctcctccaccaccaccaccaccggaactacttcttccaatttgggccggtttctggattgcaccactccaattgtttctacgcgcacttgcctttgacaagtagtaaggggtggagaactcgtgaaccagagtaccgtccctatttcttgctgaatgatttgtgggattcatttgaggaatggagcgcctacggtgtcggggttcctcttcttttaaatgggatcgattcggttgttcagtattatgttccttatctctctggtattcagctttatgaagacccatctacgagcctgcacaactaggaggagagttggtgaagaaagtgatggtgattcgcctagagacatgagtagcgatgggagcaatgactgtagagagctttctcaaaatttatacagagcctctttggaagagaaaccttgcattggttcatcgagtgatgagagtgaggccagcagtaactctcctggtgaacttgtctttgagtatcttgagggtgctatgccatttggccgtgaaccattgaccgacaagatctcaaacctgtcatcacaattcccagcactcagaacatacagaagctgtgatctatcaccttcgagttgggtctctgttgcttggtacccaatataccgaataccattaggtcaatcgttacaaaacctcgatgcttgctttttaacattccactcgttgtcaacaccctgtcgaggtacaagcaatgaggaaggtcaaagctcaagcaaatcggttgcatcggcgaagttccattgcccactttcggtctcgcatcctacaagtttaaactgtcagaatggagcccagagagtgacgtagacgagaaccagagagtcgggacgctgctacgaacagctgaagagtggctcaggcggttgaaggtgattctaccggactttagacacttcatatcgcatagtggttcggcgtggagatgatgatatttagagtcattttctaaactctaaataaggagagtgatatatagcaaaagtgaaatatctttcagctacttttgtttgttttgttgaaggaaaatgagaatctgtatagacactgatcgtacatttgtttaattactgggaaaacttatgtaattgaaacagtttgg

SEQ ID NO: 81772 - protein, 207 aa, Arabidopsis thaliana
  peptide (1)..(207): Ceres Seq. ID no. 12661274
MGSIRLFSIMFLISLVFSFMKTHLRACTTRRRVGEESDGDSPRDMSSDGSNDCRELSQNLYRASLEEKPCIGSSSDESEASSNSPGELVFEYLEGAMPFGREPLTDKISNLSSQFPALRTYRSCDLSPSSWVSVAWYPIYRIPLGQSLQNLDACFLTFHSLSTPCRGTSNEEGQSSSKSVASAKFHCPLSVSHPTSLNCQNGAQRVT

SEQ ID NO: 81773 - protein, 198 aa, Arabidopsis thaliana
  peptide (1)..(198): Ceres Seq. ID no. 12661275
MFLISLVFSFMKTHLRACTTRRRVGEESDGDSPRDMSSDGSNDCRELSQNLYRASLEEKPCIGSSSDESEASSNSPGELVFEYLEGAMPFGREPLTDKISNLSSQFPALRTYRSCDLSPSSWVSVAWYPIYRIPLGQSLQNLDACFLTFHSLSTPCRGTSNEEGQSSSKSVASAKFHCPLSVSHPTSLNCQNGAQRVT

SEQ ID NO: 81774 - protein, 188 aa, Arabidopsis thaliana
  peptide (1)..(188): Ceres Seq. ID no. 12661276
MKTHLRACTTRRRVGEESDGDSPRDMSSDGSNDCRELSQNLYRASLEEKPCIGSSSDESEASSNSPGELVFEYLEGAMPFGREPLTDKISNLSSQFPALRTYRSCDLSPSSWVSVAWYPIYRIPLGQSLQNLDACFLTFHSLSTPCRGTSNEEGQSSSKSVASAKFHCPLSVSHPTSLNCQNGAQRVT

SEQ ID NO: 81775 - DNA, 681 bp, Arabidopsis thaliana
  misc_feature (1)..(681): Ceres Seq. ID no. 12661281
  misc_feature (1)..(681): Ortholog of  Ceres SEQ ID NO 13595210 as cited in SEQ ID NO 56285
atgtcaatgacggaagaaaccaagacgacgaagctcgaatcggcgggagattcgtccgatgtagacaacgggaactgtagtagcagtggaagtggaggtgatacgaagaagacatgcgttgattgcggaacaagcaggactcctcttttggcgtggtggacctgcttggccctaaactctgttgctagtgggttttgtctcattgatgtgatcatgtgtatacatagtctaggtatgcgagccttattactaattgatcagtcattgtgcaatgcgtgtggtatcaagagcagaaagaagagacaagcagctcttggaattagacaagatgatattaaaatcaagagcaaaagtaataacaatcttggtcttgagagccgaaatgtcaagaccggaaaaggcgaaccagttaatgttaagattgccaaatgtgaaccgggaattgtcaagattgccaaaggtgaaccaggaaatgtcaagaacaaaatcaagagagatcctgagaattccagtagcagcaataataacaagaagaacgtgaaaagggttggtagatttttggattttgggtttaaggtaccggcgatgaagagatcggctgtggagaagaagaggctatggaggaaacttggggaagaggaacgagccgcagtacttctcatggctctttcttgtggttga

SEQ ID NO: 81776 - protein, 226 aa, Arabidopsis thaliana
  peptide (1)..(226): Ceres Seq. ID no. 12661282
MSMTEETKTTKLESAGDSSDVDNGNCSSSGSGGDTKKTCVDCGTSRTPLLAWWTCLALNSVASGFCLIDVIMCIHSLGMRALLLIDQSLCNACGIKSRKKRQAALGIRQDDIKIKSKSNNNLGLESRNVKTGKGEPVNVKIAKCEPGIVKIAKGEPGNVKNKIKRDPENSSSSNNNKKNVKRVGRFLDFGFKVPAMKRSAVEKKRLWRKLGEEERAAVLLMALSCG

SEQ ID NO: 81777 - protein, 224 aa, Arabidopsis thaliana
  peptide (1)..(224): Ceres Seq. ID no. 12661283
MTEETKTTKLESAGDSSDVDNGNCSSSGSGGDTKKTCVDCGTSRTPLLAWWTCLALNSVASGFCLIDVIMCIHSLGMRALLLIDQSLCNACGIKSRKKRQAALGIRQDDIKIKSKSNNNLGLESRNVKTGKGEPVNVKIAKCEPGIVKIAKGEPGNVKNKIKRDPENSSSSNNNKKNVKRVGRFLDFGFKVPAMKRSAVEKKRLWRKLGEEERAAVLLMALSCG

SEQ ID NO: 81778 - protein, 155 aa, Arabidopsis thaliana
  peptide (1)..(155): Ceres Seq. ID no. 12661284
MCIHSLGMRALLLIDQSLCNACGIKSRKKRQAALGIRQDDIKIKSKSNNNLGLESRNVKTGKGEPVNVKIAKCEPGIVKIAKGEPGNVKNKIKRDPENSSSSNNNKKNVKRVGRFLDFGFKVPAMKRSAVEKKRLWRKLGEEERAAVLLMALSCG

SEQ ID NO: 81779 - DNA, 2721 bp, Arabidopsis thaliana
  misc_feature (1)..(2721): Ceres Seq. ID no. 12661293
  misc_feature (1)..(2721): Ortholog of  Ceres SEQ ID NO 14308747 as cited in SEQ ID NO 55372
atggccggcgttgattccggcaagcttatcggctctgagattcatggattccatactttacaagatctagatatacaaacaatgttagatgaagcatacagtaggtggctccgtcctaatgagatccatgctcttctctgtaaccataaattcttcaccatcaacgtcaagccctgtggtacgattgtgttgtttgatcgtaagatgttgaggaactttagaaaggatggtcataactggaaaaagaaaaaggatggaaagacaattaaggaagctcatgaacatctaaaagttggtaatgaggaaaggattcatgtttattatgcccacggtgaggatacccctacatttgtgcgaaggtgttactggttattggataagtctcaggagcacatagttcttgtccactatcgcgagacacatgaggttcatgcagctccagcaacacctgggaactcgtactcaagttcgatcactgaccacttatctcctaaaattgtagctgaagataccagttctggtgtccataatacttgtaatacagtgcggagcaacagtctgggttctagaaatcatgagattaggcttcatgagatcaacacacttgattgggatgagcttctagtacctgcagatattagcaaccaatctcatccaaccgaagaagatatgctatacttcacagaacagctccaaactgcacccaggggatctgtaaagcaaggaaatcaccttgcaggctacaacggatcagtagatataccatcattcccgggtcttgaagatcctgtatatcaaaataataactcatgtggtgcaggagaattttctagtcagcattcgcactgtggagtagatccaaatctacagagaagggatttcagtgcaacagttactgatcaaccaggtgatgctttgcttaataacggttatggaagtcaggatagttttggaaggtgggtgaacaacttcattagtgactctcctggttccgtcgatgatccttcccttgaagctgtatatacacctgggcaggattcatctactcctcctactgtatttcattcccactctgacataccggagcaagtattcaacataactgatgtttcacctgcctggggcgtattcgacagagaaaacaaaggtcttatgcatctcttatggctaagtgtgagtactgagtacttccaacatttgggaagatcaaacctcatctgcatatgtggagagttgcgtgtccccgccgaatttctccagatgggggtttatcgttgcttccttcctcctcaatctcctggggtggtgaacctttatcttagtgtcgatggaaacaaaccgatcagccaattgttcagcttcgaacaccgctcagttcagtttatcgaaaaagccatccctcaagacgaccagctatacaagtgggaagaatttgagttccaagtcagacttgctcatcttctgttcacttcttcgaacaaaatcagcgttttaactagtaaaatatcacctgaaaaccttcttgaggctaagaaactcgccagcaggacttcgcatctcttaaatagttgggcttatttaatgaagtcaattcaggcaaatgaggtaccgtttgatcaagcgagggaccatctctttgagcttactctgaaaaataggctgaaagagtggcttttggagaaggtcatcgaaaaccgcaacactaaggaatatgactctaaagggcttggagtgatccacctctgtgccgtcctaggatacacttggtcaatccttctcttctcctgggcaaatatatcgttggatttccgtgataagcagggttggactgctcttcattgggcagcatactatggaaggccaaacctggtgacagaccctactaaggaattcctcggcggctgcacggcagctgatctggcacaacagaaaggttatgacggtttagcagcttttcttgctgagaaatgtcttgtagcacagttcaaggacatgcaaacggctggaaacattagtggcaaccttgaaaccatcaaggcagagaagtcgtcaaatccagggaatgcaaatgaagaggagcaaagcctgaaggacactctagcggcatacagaactgctgcagaggcagcggcgcggattcagggagcgttcagggagcacgagctgaaagttaggtcaagcgcagttaggtttgctagcaaggaagaagaagccaaaaacataatagccgcgatgaagattcagcacgcgtttcgcaatttcgaggttcgtaggaagattgcagccgctgctcggattcagtataggttccaaacatggaaaatgaggcgggaatttctgaacatgcgaaagaaggcaattaggatccaggctgcgtttagaggtttccaagtaagaagacagtaccagaaaataacatggtcagtgggagttcttgagaaggcaattctgagatggagactgaagagaaaaggattcagaggccttcaggtaagtcaacctgacgagaaggaagggagtgaggcggtggaggatttctacaagacaagccagaaacaagcggaggaacggcttgagaggtcagtggttaaagtccaggccatgttccggtccaagaaggctcagcaagattacagaaggatgaaactggctcatgaagaagctcagctggagtatgatgggatgcaagaacttgatcaaatggctacggaggagagctga

SEQ ID NO: 81780 - protein, 906 aa, Arabidopsis thaliana
  peptide (1)..(906): Ceres Seq. ID no. 12661294
MAGVDSGKLIGSEIHGFHTLQDLDIQTMLDEAYSRWLRPNEIHALLCNHKFFTINVKPCGTIVLFDRKMLRNFRKDGHNWKKKKDGKTIKEAHEHLKVGNEERIHVYYAHGEDTPTFVRRCYWLLDKSQEHIVLVHYRETHEVHAAPATPGNSYSSSITDHLSPKIVAEDTSSGVHNTCNTVRSNSLGSRNHEIRLHEINTLDWDELLVPADISNQSHPTEEDMLYFTEQLQTAPRGSVKQGNHLAGYNGSVDIPSFPGLEDPVYQNNNSCGAGEFSSQHSHCGVDPNLQRRDFSATVTDQPGDALLNNGYGSQDSFGRWVNNFISDSPGSVDDPSLEAVYTPGQDSSTPPTVFHSHSDIPEQVFNITDVSPAWGVFDRENKGLMHLLWLSVSTEYFQHLGRSNLICICGELRVPAEFLQMGVYRCFLPPQSPGVVNLYLSVDGNKPISQLFSFEHRSVQFIEKAIPQDDQLYKWEEFEFQVRLAHLLFTSSNKISVLTSKISPENLLEAKKLASRTSHLLNSWAYLMKSIQANEVPFDQARDHLFELTLKNRLKEWLLEKVIENRNTKEYDSKGLGVIHLCAVLGYTWSILLFSWANISLDFRDKQGWTALHWAAYYGRPNLVTDPTKEFLGGCTAADLAQQKGYDGLAAFLAEKCLVAQFKDMQTAGNISGNLETIKAEKSSNPGNANEEEQSLKDTLAAYRTAAEAAARIQGAFREHELKVRSSAVRFASKEEEAKNIIAAMKIQHAFRNFEVRRKIAAAARIQYRFQTWKMRREFLNMRKKAIRIQAAFRGFQVRRQYQKITWSVGVLEKAILRWRLKRKGFRGLQVSQPDEKEGSEAVEDFYKTSQKQAEERLERSVVKVQAMFRSKKAQQDYRRMKLAHEEAQLEYDGMQELDQMATEES

SEQ ID NO: 81781 - protein, 879 aa, Arabidopsis thaliana
  peptide (1)..(879): Ceres Seq. ID no. 12661295
MLDEAYSRWLRPNEIHALLCNHKFFTINVKPCGTIVLFDRKMLRNFRKDGHNWKKKKDGKTIKEAHEHLKVGNEERIHVYYAHGEDTPTFVRRCYWLLDKSQEHIVLVHYRETHEVHAAPATPGNSYSSSITDHLSPKIVAEDTSSGVHNTCNTVRSNSLGSRNHEIRLHEINTLDWDELLVPADISNQSHPTEEDMLYFTEQLQTAPRGSVKQGNHLAGYNGSVDIPSFPGLEDPVYQNNNSCGAGEFSSQHSHCGVDPNLQRRDFSATVTDQPGDALLNNGYGSQDSFGRWVNNFISDSPGSVDDPSLEAVYTPGQDSSTPPTVFHSHSDIPEQVFNITDVSPAWGVFDRENKGLMHLLWLSVSTEYFQHLGRSNLICICGELRVPAEFLQMGVYRCFLPPQSPGVVNLYLSVDGNKPISQLFSFEHRSVQFIEKAIPQDDQLYKWEEFEFQVRLAHLLFTSSNKISVLTSKISPENLLEAKKLASRTSHLLNSWAYLMKSIQANEVPFDQARDHLFELTLKNRLKEWLLEKVIENRNTKEYDSKGLGVIHLCAVLGYTWSILLFSWANISLDFRDKQGWTALHWAAYYGRPNLVTDPTKEFLGGCTAADLAQQKGYDGLAAFLAEKCLVAQFKDMQTAGNISGNLETIKAEKSSNPGNANEEEQSLKDTLAAYRTAAEAAARIQGAFREHELKVRSSAVRFASKEEEAKNIIAAMKIQHAFRNFEVRRKIAAAARIQYRFQTWKMRREFLNMRKKAIRIQAAFRGFQVRRQYQKITWSVGVLEKAILRWRLKRKGFRGLQVSQPDEKEGSEAVEDFYKTSQKQAEERLERSVVKVQAMFRSKKAQQDYRRMKLAHEEAQLEYDGMQELDQMATEES

SEQ ID NO: 81782 - protein, 838 aa, Arabidopsis thaliana
  peptide (1)..(838): Ceres Seq. ID no. 12661296
MLRNFRKDGHNWKKKKDGKTIKEAHEHLKVGNEERIHVYYAHGEDTPTFVRRCYWLLDKSQEHIVLVHYRETHEVHAAPATPGNSYSSSITDHLSPKIVAEDTSSGVHNTCNTVRSNSLGSRNHEIRLHEINTLDWDELLVPADISNQSHPTEEDMLYFTEQLQTAPRGSVKQGNHLAGYNGSVDIPSFPGLEDPVYQNNNSCGAGEFSSQHSHCGVDPNLQRRDFSATVTDQPGDALLNNGYGSQDSFGRWVNNFISDSPGSVDDPSLEAVYTPGQDSSTPPTVFHSHSDIPEQVFNITDVSPAWGVFDRENKGLMHLLWLSVSTEYFQHLGRSNLICICGELRVPAEFLQMGVYRCFLPPQSPGVVNLYLSVDGNKPISQLFSFEHRSVQFIEKAIPQDDQLYKWEEFEFQVRLAHLLFTSSNKISVLTSKISPENLLEAKKLASRTSHLLNSWAYLMKSIQANEVPFDQARDHLFELTLKNRLKEWLLEKVIENRNTKEYDSKGLGVIHLCAVLGYTWSILLFSWANISLDFRDKQGWTALHWAAYYGRPNLVTDPTKEFLGGCTAADLAQQKGYDGLAAFLAEKCLVAQFKDMQTAGNISGNLETIKAEKSSNPGNANEEEQSLKDTLAAYRTAAEAAARIQGAFREHELKVRSSAVRFASKEEEAKNIIAAMKIQHAFRNFEVRRKIAAAARIQYRFQTWKMRREFLNMRKKAIRIQAAFRGFQVRRQYQKITWSVGVLEKAILRWRLKRKGFRGLQVSQPDEKEGSEAVEDFYKTSQKQAEERLERSVVKVQAMFRSKKAQQDYRRMKLAHEEAQLEYDGMQELDQMATEES

SEQ ID NO: 81783 - DNA, 1068 bp, Arabidopsis thaliana
  misc_feature (1)..(1068): Ceres Seq. ID no. 12661315
  misc_feature (1)..(1068): Ortholog of  Ceres SEQ ID NO 13596474 as cited in SEQ ID NO 62169
  misc_feature (1)..(1068): Ortholog of  Ceres SEQ ID NO 13598714 as cited in SEQ ID NO 62656
  misc_feature (1)..(1068): Ortholog of  Ceres SEQ ID NO 13596969 as cited in SEQ ID NO 63375
  misc_feature (1)..(1068): Ortholog of  Ceres SEQ ID NO 13597519 as cited in SEQ ID NO 64759
  misc_feature (1)..(1068): Ortholog of  Ceres SEQ ID NO 13587054 as cited in SEQ ID NO 0
atgaagaatctctttaacttgttccttatgtttttctttgcaatgccaattctttcactctccgagaatccaaccaatttcagcgagagttgcgaagacgggagtggagaaaccggttcaagctttggcatagggttcgatttggttcttgattttggtttataccggaatagctgccccgaagcagagtctatcgtctactcgtgggtggaaaccacggtgttagaggatccaagaatggctgcttctcttctccgtcttcatttccacgactgttttgtcaatgcaaggaatgagtactacgaaccagaatgtgtttttgtttttgacttgcattatgcattgcagggatgtgatgcttcggtgttgttagatgacacagaaggactggttggtgaaaaaacggcgcctcctaatctaaattctctacgagggttcgaagtgattgattcgataaagtctgatattgaatctgtatgtccagagaccgtctcatgcgcagacattcttgccatggctgctagagattcagtcgttgtgtcgggtggaccaaggtgggaggtggaagtaggaagaaaagacagtagaacagcaagcaaacaggcagcaacaaatggcttaccctcaccaaactcaaccgtatcaactctcatctctactttccagaatcttggcctttcacaaaccgacatggtcgctctttccgctcggttgcagccactgcaaactggacaaccagctaaccacggagacaaccttgagttcctcgagtcactgcaacagttatgctcgactgttgggcccagtgtaggtatcactcagcttgacttggtgactccatcaacatttgacaaccagtactatgtaaacctcctctcgggtgagggattgcttccatcagaccaggctttagcggttcaagacccagggacaagggcgattgttgagacctacgcaacagatcagtcggttttctttgaggattttaagaacgctatggttaaaatgggagggatacccggtggtagtaatagcgagattaggaagaattgtagaatgattaactaa

SEQ ID NO: 81784 - protein, 355 aa, Arabidopsis thaliana
  peptide (1)..(355): Ceres Seq. ID no. 12661316
MKNLFNLFLMFFFAMPILSLSENPTNFSESCEDGSGETGSSFGIGFDLVLDFGLYRNSCPEAESIVYSWVETTVLEDPRMAASLLRLHFHDCFVNARNEYYEPECVFVFDLHYALQGCDASVLLDDTEGLVGEKTAPPNLNSLRGFEVIDSIKSDIESVCPETVSCADILAMAARDSVVVSGGPRWEVEVGRKDSRTASKQAATNGLPSPNSTVSTLISTFQNLGLSQTDMVALSARLQPLQTGQPANHGDNLEFLESLQQLCSTVGPSVGITQLDLVTPSTFDNQYYVNLLSGEGLLPSDQALAVQDPGTRAIVETYATDQSVFFEDFKNAMVKMGGIPGGSNSEIRKNCRMIN

SEQ ID NO: 81785 - protein, 346 aa, Arabidopsis thaliana
  peptide (1)..(346): Ceres Seq. ID no. 12661317
MFFFAMPILSLSENPTNFSESCEDGSGETGSSFGIGFDLVLDFGLYRNSCPEAESIVYSWVETTVLEDPRMAASLLRLHFHDCFVNARNEYYEPECVFVFDLHYALQGCDASVLLDDTEGLVGEKTAPPNLNSLRGFEVIDSIKSDIESVCPETVSCADILAMAARDSVVVSGGPRWEVEVGRKDSRTASKQAATNGLPSPNSTVSTLISTFQNLGLSQTDMVALSARLQPLQTGQPANHGDNLEFLESLQQLCSTVGPSVGITQLDLVTPSTFDNQYYVNLLSGEGLLPSDQALAVQDPGTRAIVETYATDQSVFFEDFKNAMVKMGGIPGGSNSEIRKNCRMIN

SEQ ID NO: 81786 - protein, 341 aa, Arabidopsis thaliana
  peptide (1)..(341): Ceres Seq. ID no. 12661318
MPILSLSENPTNFSESCEDGSGETGSSFGIGFDLVLDFGLYRNSCPEAESIVYSWVETTVLEDPRMAASLLRLHFHDCFVNARNEYYEPECVFVFDLHYALQGCDASVLLDDTEGLVGEKTAPPNLNSLRGFEVIDSIKSDIESVCPETVSCADILAMAARDSVVVSGGPRWEVEVGRKDSRTASKQAATNGLPSPNSTVSTLISTFQNLGLSQTDMVALSARLQPLQTGQPANHGDNLEFLESLQQLCSTVGPSVGITQLDLVTPSTFDNQYYVNLLSGEGLLPSDQALAVQDPGTRAIVETYATDQSVFFEDFKNAMVKMGGIPGGSNSEIRKNCRMIN

SEQ ID NO: 81787 - DNA, 681 bp, Arabidopsis thaliana
  misc_feature (1)..(681): Ceres Seq. ID no. 12661332
  misc_feature (1)..(681): Ortholog of  Ceres SEQ ID NO 15169809 as cited in SEQ ID NO 52839
atgatgatgcaatgtttagatggattaaagcacttagccttaattctgttgacttgttgtgatgctgatcctcccaaggttcgtcagaaccctaaggatgtggctagaggcactgtgtttacagtgaatgagattgaagctctttacgaactgttcaagagcattagcaaaaacgggcttatcgacaaggaacaatttcaattggtactattcaaaatgaacacaacgagaagcctttttgctgatagggtgtttgacttgtttgataccaagaatactgggattctagattttgaagcctttgctcgttcactttcggtctttcaccctaatgctaaatttgaggataagattgagttctctttcaagctgtatgatctgaatcagcaaggttatataaagagacaggaggtgaagcaaatggttgtgcggactctagctgaatctggcatgaacctttctgatcatgtgattgagagcatcatagacaagacatttgaagaagctgatactaaactggacgggaagattgataaggaagagtggaggagtcttgtgttgcgccacccctctctgttacagaacatgagccttcaacatctcaaagacgtaacaaagacgtttccaaattttgtatttcacactatagtgacagacactcctagtgagctggatggatga

SEQ ID NO: 81788 - protein, 226 aa, Arabidopsis thaliana
  peptide (1)..(226): Ceres Seq. ID no. 12661333
MMMQCLDGLKHLALILLTCCDADPPKVRQNPKDVARGTVFTVNEIEALYELFKSISKNGLIDKEQFQLVLFKMNTTRSLFADRVFDLFDTKNTGILDFEAFARSLSVFHPNAKFEDKIEFSFKLYDLNQQGYIKRQEVKQMVVRTLAESGMNLSDHVIESIIDKTFEEADTKLDGKIDKEEWRSLVLRHPSLLQNMSLQHLKDVTKTFPNFVFHTIVTDTPSELDG

SEQ ID NO: 81789 - protein, 225 aa, Arabidopsis thaliana
  peptide (1)..(225): Ceres Seq. ID no. 12661334
MMQCLDGLKHLALILLTCCDADPPKVRQNPKDVARGTVFTVNEIEALYELFKSISKNGLIDKEQFQLVLFKMNTTRSLFADRVFDLFDTKNTGILDFEAFARSLSVFHPNAKFEDKIEFSFKLYDLNQQGYIKRQEVKQMVVRTLAESGMNLSDHVIESIIDKTFEEADTKLDGKIDKEEWRSLVLRHPSLLQNMSLQHLKDVTKTFPNFVFHTIVTDTPSELDG

SEQ ID NO: 81790 - protein, 224 aa, Arabidopsis thaliana
  peptide (1)..(224): Ceres Seq. ID no. 12661335
MQCLDGLKHLALILLTCCDADPPKVRQNPKDVARGTVFTVNEIEALYELFKSISKNGLIDKEQFQLVLFKMNTTRSLFADRVFDLFDTKNTGILDFEAFARSLSVFHPNAKFEDKIEFSFKLYDLNQQGYIKRQEVKQMVVRTLAESGMNLSDHVIESIIDKTFEEADTKLDGKIDKEEWRSLVLRHPSLLQNMSLQHLKDVTKTFPNFVFHTIVTDTPSELDG

SEQ ID NO: 81791 - DNA, 1644 bp, Arabidopsis thaliana
  misc_feature (1)..(1644): Ceres Seq. ID no. 12661387
  misc_feature (1)..(1644): Ortholog of  Ceres SEQ ID NO 14310592 as cited in SEQ ID NO 55379
atggctgctcataatctatgcttcaattcagcttttgtttgcaacgttcatcatcaaaagactcagcattttccttttgaaaccgcggagaaagctatattgtttaaagaagaggtgaggaagacattaaatgaaattgaaggttctattgagcagctagaaatgatcgattctctgcaaagactcggaatctcgtatcactataaacatgaaatccatgatattttgagaaaaattcatgaccaacacggcgaaattgagagggaaacacaagatcttcatgctacatcacttgaatttattctcttaaggcaacatggttttgatgtctcgcaagatgcttttgacgttttcataagtgagaccggagaattcagaaaaactttacacagcgatatcaaaggtttactctctctatacgaagcttcttatttttcaatggattcggagtttaaactcaaggagactagaatttatgcaaacaagcggttaagtgagtttgtcgcggaaagtagcaaaactatttgcagagaagatgaaacttatatattagagatggtgaaacgagcactagagacgccgtaccattggagcatacgaagattagaagcaagatggtacataaatgtgtacgaaaaaaagcatgaaatgaaccctctcttgctagagtttgcagcaattgatttcaacatgttacaagctaatcatcaagaagaacttaaacttatttctagttggtggaacagcacaggacttatgaaacaacttgatttcgtgagagaccgaatcacagagagttatttttggaccattggaatattttacgaaccagagtttaaatactgccgcaagatactcaccaaaatattcatgttaattgtgattatggatgatatctacgacatctatggtacattagaggagctcgagcttttcacaaatgtggtcgaaaaatgggatgtgaaccatgttgaaagacttcccaactacatgagaatgtgttttctttttctatacaatgagatcaaccaaataggatacgatgttctcagagacaaaggacttaacgttatcccttacctcaaacaagtttggacggatctatttaaaacgttcctaactgaatccaagtggtacaaaactggacacaaaccaagtttcgaagaatacatgcaaaacggtgtgatctcgagttctgtcccaacgatactgctccaccttttctccgtcctatccgaccacatctccgaccaaaccctaaccgatgattccaaaaaccactctgtcgtccggagctgtgccaccattctccgtctcgctaatgatcttgccacctcaacggaggagatggcaagaggagattccccaaagtcggtccaatgttacatgtatgagacaagagcaagtgaggaagaggcacgtagacacatgcaaagtatgatcagcgactcttgggacattataaactccgatttaaaaacggcacacacttcttctcttcctcgtggttttctggcagccgccgcaaatcttaaccgcgtggtacagtgtatctaccggcacggtgatggccacggaagcccagaaaagaccaagaccgttgattatatccaatcagtactcttcaatcccgttccgttatag

SEQ ID NO: 81792 - protein, 547 aa, Arabidopsis thaliana
  peptide (1)..(547): Ceres Seq. ID no. 12661388
MAAHNLCFNSAFVCNVHHQKTQHFPFETAEKAILFKEEVRKTLNEIEGSIEQLEMIDSLQRLGISYHYKHEIHDILRKIHDQHGEIERETQDLHATSLEFILLRQHGFDVSQDAFDVFISETGEFRKTLHSDIKGLLSLYEASYFSMDSEFKLKETRIYANKRLSEFVAESSKTICREDETYILEMVKRALETPYHWSIRRLEARWYINVYEKKHEMNPLLLEFAAIDFNMLQANHQEELKLISSWWNSTGLMKQLDFVRDRITESYFWTIGIFYEPEFKYCRKILTKIFMLIVIMDDIYDIYGTLEELELFTNVVEKWDVNHVERLPNYMRMCFLFLYNEINQIGYDVLRDKGLNVIPYLKQVWTDLFKTFLTESKWYKTGHKPSFEEYMQNGVISSSVPTILLHLFSVLSDHISDQTLTDDSKNHSVVRSCATILRLANDLATSTEEMARGDSPKSVQCYMYETRASEEEARRHMQSMISDSWDIINSDLKTAHTSSLPRGFLAAAANLNRVVQCIYRHGDGHGSPEKTKTVDYIQSVLFNPVPL

SEQ ID NO: 81793 - protein, 493 aa, Arabidopsis thaliana
  peptide (1)..(493): Ceres Seq. ID no. 12661389
MIDSLQRLGISYHYKHEIHDILRKIHDQHGEIERETQDLHATSLEFILLRQHGFDVSQDAFDVFISETGEFRKTLHSDIKGLLSLYEASYFSMDSEFKLKETRIYANKRLSEFVAESSKTICREDETYILEMVKRALETPYHWSIRRLEARWYINVYEKKHEMNPLLLEFAAIDFNMLQANHQEELKLISSWWNSTGLMKQLDFVRDRITESYFWTIGIFYEPEFKYCRKILTKIFMLIVIMDDIYDIYGTLEELELFTNVVEKWDVNHVERLPNYMRMCFLFLYNEINQIGYDVLRDKGLNVIPYLKQVWTDLFKTFLTESKWYKTGHKPSFEEYMQNGVISSSVPTILLHLFSVLSDHISDQTLTDDSKNHSVVRSCATILRLANDLATSTEEMARGDSPKSVQCYMYETRASEEEARRHMQSMISDSWDIINSDLKTAHTSSLPRGFLAAAANLNRVVQCIYRHGDGHGSPEKTKTVDYIQSVLFNPVPL

SEQ ID NO: 81794 - protein, 401 aa, Arabidopsis thaliana
  peptide (1)..(401): Ceres Seq. ID no. 12661390
MDSEFKLKETRIYANKRLSEFVAESSKTICREDETYILEMVKRALETPYHWSIRRLEARWYINVYEKKHEMNPLLLEFAAIDFNMLQANHQEELKLISSWWNSTGLMKQLDFVRDRITESYFWTIGIFYEPEFKYCRKILTKIFMLIVIMDDIYDIYGTLEELELFTNVVEKWDVNHVERLPNYMRMCFLFLYNEINQIGYDVLRDKGLNVIPYLKQVWTDLFKTFLTESKWYKTGHKPSFEEYMQNGVISSSVPTILLHLFSVLSDHISDQTLTDDSKNHSVVRSCATILRLANDLATSTEEMARGDSPKSVQCYMYETRASEEEARRHMQSMISDSWDIINSDLKTAHTSSLPRGFLAAAANLNRVVQCIYRHGDGHGSPEKTKTVDYIQSVLFNPVPL

SEQ ID NO: 81795 - DNA, 1728 bp, Arabidopsis thaliana
  misc_feature (1)..(1728): Ceres Seq. ID no. 12661391
  misc_feature (1)..(1728): Ortholog of  Ceres SEQ ID NO 14310592 as cited in SEQ ID NO 55379
atgcctaaacgacaggctcaacggcgtttcactcgcaagactgactcgaaaacaccatcccagcctctggtatcccgtcgctctgcaaactatcaaccgtctctttggcagcacgaatatctcctctcgctcggtaatacatatgtgaaagaggacaacgtcgagagagttacgttattgaagcaggaagtgagtaaaatgctcaatgaaacggaaggtttactcgaacagctagagctcatcgacactttacaaaggcttggagtttcttaccattttgaacaagaaatcaagaagacactaacgaatgtgcatgttaaaaatgtgcgagcacacaaaaaccggatagatcgaaaccgatggggagatttatacgcgaccgcccttgagttccgactcctaaggcaacatggtttcagtatcgcacaagatgtttttgacggaaatattggagttgatttggatgataaagacatcaagggtattctttcactatacgaagcttcatatctctcgaccagaatcgatactaaattgaaagagagcatatactatacaacaaaacgacttagaaaatttgtggaggtaaataagaatgagaccaaatcttacactcttcgaaggatggttatacatgcgttagagatgccgtaccaccggagagtgggaagactagaagcaagatggtacatagaagtgtacggagagagacacgacatgaaccctatcttgcttgaactcgcgaaacttgattttaatttcgtacaagctatccatcaagacgagctcaaatccctctctagttggtggagcaagacgggattaacaaaacacctcgatttcgttagagatcgaataacggagggttatttctcgagtgttggagtaatgtatgagcccgagtttgcatatcaccgacaaatgcttacaaaggttttcatgctcattacaactatcgacgatatatacgatatttatgggacacttgaggagctccaactattcacgaccatagttgaaaaatgggatgtgaatcgtcttgaagaacttcccaactacatgaagttatgttttctctgcctcgtcaacgaaatcaatcagattggatattttgtactcagagataaagggtttaatgtgattccttacctcaaagaatcttgggcagatatgtgtacaacgtttttgaaagaggcaaagtggtataaaagtggttacaaacctaacttcgaagaatacatgcaaaatggttggatctcaagctcagtccctacaatacttctacacttgttctgtctcttatccgaccaaaccttagacattcttggctcctacaatcactctgtagttcgaagctccgccaccatcctccgtctcgctaacgatctcgccacttcttcggtcagtcatggtttcacaacgtacaatactgaggaattagcgagaggcgacactatgaaatccgtacaatgtcacatgcatgaaactggagcttcggaggcagagtcacgcgcgtacattcaaggaattatcggtgtggcttgggatgacttaaacatggagaaaaagagttgtaggctacatcaaggtttcctagaagctgcggctaatcttggacgtgtggctcagtgcgtttatcagtacggtgatggccatggctgtcctgacaaggctaagaccgtcaatcatgtccggtccttgctcgtccaccctcttccactcaattaa

SEQ ID NO: 81796 - protein, 575 aa, Arabidopsis thaliana
  peptide (1)..(575): Ceres Seq. ID no. 12661392
MPKRQAQRRFTRKTDSKTPSQPLVSRRSANYQPSLWQHEYLLSLGNTYVKEDNVERVTLLKQEVSKMLNETEGLLEQLELIDTLQRLGVSYHFEQEIKKTLTNVHVKNVRAHKNRIDRNRWGDLYATALEFRLLRQHGFSIAQDVFDGNIGVDLDDKDIKGILSLYEASYLSTRIDTKLKESIYYTTKRLRKFVEVNKNETKSYTLRRMVIHALEMPYHRRVGRLEARWYIEVYGERHDMNPILLELAKLDFNFVQAIHQDELKSLSSWWSKTGLTKHLDFVRDRITEGYFSSVGVMYEPEFAYHRQMLTKVFMLITTIDDIYDIYGTLEELQLFTTIVEKWDVNRLEELPNYMKLCFLCLVNEINQIGYFVLRDKGFNVIPYLKESWADMCTTFLKEAKWYKSGYKPNFEEYMQNGWISSSVPTILLHLFCLLSDQTLDILGSYNHSVVRSSATILRLANDLATSSVSHGFTTYNTEELARGDTMKSVQCHMHETGASEAESRAYIQGIIGVAWDDLNMEKKSCRLHQGFLEAAANLGRVAQCVYQYGDGHGCPDKAKTVNHVRSLLVHPLPLN

SEQ ID NO: 81797 - protein, 509 aa, Arabidopsis thaliana
  peptide (1)..(509): Ceres Seq. ID no. 12661393
MLNETEGLLEQLELIDTLQRLGVSYHFEQEIKKTLTNVHVKNVRAHKNRIDRNRWGDLYATALEFRLLRQHGFSIAQDVFDGNIGVDLDDKDIKGILSLYEASYLSTRIDTKLKESIYYTTKRLRKFVEVNKNETKSYTLRRMVIHALEMPYHRRVGRLEARWYIEVYGERHDMNPILLELAKLDFNFVQAIHQDELKSLSSWWSKTGLTKHLDFVRDRITEGYFSSVGVMYEPEFAYHRQMLTKVFMLITTIDDIYDIYGTLEELQLFTTIVEKWDVNRLEELPNYMKLCFLCLVNEINQIGYFVLRDKGFNVIPYLKESWADMCTTFLKEAKWYKSGYKPNFEEYMQNGWISSSVPTILLHLFCLLSDQTLDILGSYNHSVVRSSATILRLANDLATSSVSHGFTTYNTEELARGDTMKSVQCHMHETGASEAESRAYIQGIIGVAWDDLNMEKKSCRLHQGFLEAAANLGRVAQCVYQYGDGHGCPDKAKTVNHVRSLLVHPLPLN

SEQ ID NO: 81798 - protein, 367 aa, Arabidopsis thaliana
  peptide (1)..(367): Ceres Seq. ID no. 12661394
MVIHALEMPYHRRVGRLEARWYIEVYGERHDMNPILLELAKLDFNFVQAIHQDELKSLSSWWSKTGLTKHLDFVRDRITEGYFSSVGVMYEPEFAYHRQMLTKVFMLITTIDDIYDIYGTLEELQLFTTIVEKWDVNRLEELPNYMKLCFLCLVNEINQIGYFVLRDKGFNVIPYLKESWADMCTTFLKEAKWYKSGYKPNFEEYMQNGWISSSVPTILLHLFCLLSDQTLDILGSYNHSVVRSSATILRLANDLATSSVSHGFTTYNTEELARGDTMKSVQCHMHETGASEAESRAYIQGIIGVAWDDLNMEKKSCRLHQGFLEAAANLGRVAQCVYQYGDGHGCPDKAKTVNHVRSLLVHPLPLN

SEQ ID NO: 81799 - DNA, 783 bp, Arabidopsis thaliana
  misc_feature (1)..(783): Ceres Seq. ID no. 12661418
  misc_feature (1)..(783): Ortholog of  Ceres SEQ ID NO 12635175 as cited in SEQ ID NO 0
atggagattatgcatctattggaactatgttacctcaatcttctgagctttacaatgtttcttgttttgttttattttgaagggggacattgtgggtatggagaatttggaagagatatcaataacggtgaagtgagtggtgtttcatggcgactatggaacaatggaactggctgtggtgcttgttaccaggtgaggtgcaagataccaccacactgcagtgaggaaggagtatacgtagtggctacggactccggagaaggagatggcacggacttcatcttaagccctaaggcgtacggacgtatggcgcgacccggcacagaaaatcagctctactccttcggtgtagtcaacgttgagtaccaaaggatcccttgccgatacgcagggtataatctggtgtataagatccatgagaaaagctacaatcctcattatcttgccatccttgtcttgtacgttggtggtgttaatgacatcctcgccgttgaagtctggcaggtaaatttaatcaaagatgttgagaaacttagatatatgtttttgaggatcaaaatatatagtttactcttagatgattttgaggattgcaaagagtggagacgtatgagaagagtgtttggagcggttcatgatttgcagaatccacctagaggcactctcacattgaggttcttagtctacggaagcgcaggaatcaattggatccaatcgccaaacgctattcccgctgattggactgccggagccacctacgactccaacattctacttacttaa

SEQ ID NO: 81800 - protein, 260 aa, Arabidopsis thaliana
  peptide (1)..(260): Ceres Seq. ID no. 12661419
MEIMHLLELCYLNLLSFTMFLVLFYFEGGHCGYGEFGRDINNGEVSGVSWRLWNNGTGCGACYQVRCKIPPHCSEEGVYVVATDSGEGDGTDFILSPKAYGRMARPGTENQLYSFGVVNVEYQRIPCRYAGYNLVYKIHEKSYNPHYLAILVLYVGGVNDILAVEVWQVNLIKDVEKLRYMFLRIKIYSLLLDDFEDCKEWRRMRRVFGAVHDLQNPPRGTLTLRFLVYGSAGINWIQSPNAIPADWTAGATYDSNILLT

SEQ ID NO: 81801 - protein, 257 aa, Arabidopsis thaliana
  peptide (1)..(257): Ceres Seq. ID no. 12661420
MHLLELCYLNLLSFTMFLVLFYFEGGHCGYGEFGRDINNGEVSGVSWRLWNNGTGCGACYQVRCKIPPHCSEEGVYVVATDSGEGDGTDFILSPKAYGRMARPGTENQLYSFGVVNVEYQRIPCRYAGYNLVYKIHEKSYNPHYLAILVLYVGGVNDILAVEVWQVNLIKDVEKLRYMFLRIKIYSLLLDDFEDCKEWRRMRRVFGAVHDLQNPPRGTLTLRFLVYGSAGINWIQSPNAIPADWTAGATYDSNILLT

SEQ ID NO: 81802 - protein, 242 aa, Arabidopsis thaliana
  peptide (1)..(242): Ceres Seq. ID no. 12661421
MFLVLFYFEGGHCGYGEFGRDINNGEVSGVSWRLWNNGTGCGACYQVRCKIPPHCSEEGVYVVATDSGEGDGTDFILSPKAYGRMARPGTENQLYSFGVVNVEYQRIPCRYAGYNLVYKIHEKSYNPHYLAILVLYVGGVNDILAVEVWQVNLIKDVEKLRYMFLRIKIYSLLLDDFEDCKEWRRMRRVFGAVHDLQNPPRGTLTLRFLVYGSAGINWIQSPNAIPADWTAGATYDSNILLT

SEQ ID NO: 81803 - DNA, 987 bp, Arabidopsis thaliana
  misc_feature (1)..(987): Ceres Seq. ID no. 12661450
  misc_feature (1)..(987): Ortholog of  Ceres SEQ ID NO 14309076 as cited in SEQ ID NO 0
atgatacgaagagtctccaccacctcatgtctctccgccacagcttttagatcatttaccaaatggtcctttaaatcttctcaatttcacggcgagtccctcgattcctctgtctcacctcttctcattcccggcttccacgtcttccattgtccggatgtcgttgggattgtagcgaaactttcagattgtattgctgctaaaggaggtaacattcttggttatgatgttttggttcctgagaacaagaacgtcttctactctagaagtgagtttatatttgatccagtaaaatggccgaggaggcagatggatgaagattttcaaactattgcacaaaagtttagtgctttgagctcagtagtacgagtgccctctttagaccccaaatacaagatagctcttctactgtcgaaacaggatcattgtctggttgaaatgttacataaatggcaggatggaaaacttcccgttgatataacatgtgtgataagtaatcatgaaagagctccaaacacccatgttatgaggtttctccagaggcatggcatctcttatcattatttaccaacaaccgatcagaataaaatagaagaggagattttggaattggttaagggtaccgattttctagttctcgctagatacatgcagctactatccggtaacttcttgaaaggttatggaaaagatgtaatcaacatccatcatggcctcttgccatcattcaaaggaagaaatcccgtgaaacaggcatttgatgcaggtgtgaaactaattggtgcaacaactcactttgttacagaggagcttgattcaggtcctatcattgagcaaatggttgagagagtttcccaccgagacaatttgaggagctttgtccagaaatcagaggaccttgagaaaaagtgtctcatgaaagctataaaatcttactgcgaactgcgagtattgccttatgggacacaaaggactgtcgtattctaa

SEQ ID NO: 81804 - protein, 328 aa, Arabidopsis thaliana
  peptide (1)..(328): Ceres Seq. ID no. 12661451
MIRRVSTTSCLSATAFRSFTKWSFKSSQFHGESLDSSVSPLLIPGFHVFHCPDVVGIVAKLSDCIAAKGGNILGYDVLVPENKNVFYSRSEFIFDPVKWPRRQMDEDFQTIAQKFSALSSVVRVPSLDPKYKIALLLSKQDHCLVEMLHKWQDGKLPVDITCVISNHERAPNTHVMRFLQRHGISYHYLPTTDQNKIEEEILELVKGTDFLVLARYMQLLSGNFLKGYGKDVINIHHGLLPSFKGRNPVKQAFDAGVKLIGATTHFVTEELDSGPIIEQMVERVSHRDNLRSFVQKSEDLEKKCLMKAIKSYCELRVLPYGTQRTVVF

SEQ ID NO: 81805 - protein, 225 aa, Arabidopsis thaliana
  peptide (1)..(225): Ceres Seq. ID no. 12661452
MDEDFQTIAQKFSALSSVVRVPSLDPKYKIALLLSKQDHCLVEMLHKWQDGKLPVDITCVISNHERAPNTHVMRFLQRHGISYHYLPTTDQNKIEEEILELVKGTDFLVLARYMQLLSGNFLKGYGKDVINIHHGLLPSFKGRNPVKQAFDAGVKLIGATTHFVTEELDSGPIIEQMVERVSHRDNLRSFVQKSEDLEKKCLMKAIKSYCELRVLPYGTQRTVVF

SEQ ID NO: 81806 - protein, 182 aa, Arabidopsis thaliana
  peptide (1)..(182): Ceres Seq. ID no. 12661453
MLHKWQDGKLPVDITCVISNHERAPNTHVMRFLQRHGISYHYLPTTDQNKIEEEILELVKGTDFLVLARYMQLLSGNFLKGYGKDVINIHHGLLPSFKGRNPVKQAFDAGVKLIGATTHFVTEELDSGPIIEQMVERVSHRDNLRSFVQKSEDLEKKCLMKAIKSYCELRVLPYGTQRTVVF

SEQ ID NO: 81807 - DNA, 927 bp, Arabidopsis thaliana
  misc_feature (1)..(927): Ceres Seq. ID no. 12661458
  misc_feature (1)..(927): Ortholog of  Ceres SEQ ID NO 14311579 as cited in SEQ ID NO 51717
atggagaagagtttccaaaggtctgctctccttgtgactttgtctctcttcttcttctccattccggtttcactctctgttccattcgttctgtttcacgggtttggaggtgaatgctccaatgacaaagtgagcaacttaacacagttcctcatcaaccactccggctaccctggaacttgcgtagaaataggagatggagtgaaagattccttattcatgccgcttaggcaacaagccagcatagcttgtgagaaaattaaacagatgccagagctgagtgaaggttacaacatagtggcagagtctcaaggaaacttggtcgctagaggcctaatcgagttttgcgataatgctccaccagtcatcaactatgtctccttaggaggacctcatgctggcgtcgctgcaatccccgaggggtgtgattcagcattttgcatactcatgaaggcgttttttgcagtgatttacagcgattttgctcaagatcatactgctccaagtggttatgtcaaaaaacctatggaaataaaaaattatttggaacactccaagtatctgccaaagctaaacaacgagagacctggcgagaaaaactccacttttaaagaccgtttcaccagcttgcaaaacttggttctcatcatgttccagaatgatacaatattggttccaagagaaacttcttggttcggatattacccggatggagcttcatcttcaacacctgttttgcctcctcaaaagacaaagctatacactgaggattggattggtctgaaaaccttggatgatgctggaaaagtgaggtttattagtgtccctggcggacacatcgaaataacggaagaagaccttgtcaaatacgttgtgccttacctccagaatgagtctttgttctcttctgaacacgagacaatatag

SEQ ID NO: 81808 - protein, 308 aa, Arabidopsis thaliana
  peptide (1)..(308): Ceres Seq. ID no. 12661459
MEKSFQRSALLVTLSLFFFSIPVSLSVPFVLFHGFGGECSNDKVSNLTQFLINHSGYPGTCVEIGDGVKDSLFMPLRQQASIACEKIKQMPELSEGYNIVAESQGNLVARGLIEFCDNAPPVINYVSLGGPHAGVAAIPEGCDSAFCILMKAFFAVIYSDFAQDHTAPSGYVKKPMEIKNYLEHSKYLPKLNNERPGEKNSTFKDRFTSLQNLVLIMFQNDTILVPRETSWFGYYPDGASSSTPVLPPQKTKLYTEDWIGLKTLDDAGKVRFISVPGGHIEITEEDLVKYVVPYLQNESLFSSEHETI

SEQ ID NO: 81809 - protein, 235 aa, Arabidopsis thaliana
  peptide (1)..(235): Ceres Seq. ID no. 12661460
MPLRQQASIACEKIKQMPELSEGYNIVAESQGNLVARGLIEFCDNAPPVINYVSLGGPHAGVAAIPEGCDSAFCILMKAFFAVIYSDFAQDHTAPSGYVKKPMEIKNYLEHSKYLPKLNNERPGEKNSTFKDRFTSLQNLVLIMFQNDTILVPRETSWFGYYPDGASSSTPVLPPQKTKLYTEDWIGLKTLDDAGKVRFISVPGGHIEITEEDLVKYVVPYLQNESLFSSEHETI

SEQ ID NO: 81810 - protein, 219 aa, Arabidopsis thaliana
  peptide (1)..(219): Ceres Seq. ID no. 12661461
MPELSEGYNIVAESQGNLVARGLIEFCDNAPPVINYVSLGGPHAGVAAIPEGCDSAFCILMKAFFAVIYSDFAQDHTAPSGYVKKPMEIKNYLEHSKYLPKLNNERPGEKNSTFKDRFTSLQNLVLIMFQNDTILVPRETSWFGYYPDGASSSTPVLPPQKTKLYTEDWIGLKTLDDAGKVRFISVPGGHIEITEEDLVKYVVPYLQNESLFSSEHETI

SEQ ID NO: 81811 - DNA, 934 bp, Arabidopsis thaliana
  misc_feature (1)..(934): Ceres Seq. ID no. 12661462
  misc_feature (1)..(934): Ortholog of  Ceres SEQ ID NO 14311579 as cited in SEQ ID NO 51717
atggagaagtattcccggcggtctattctcctttccacggtggtcgccgccgtgttattctctttaattccggtttcaatctctattcccttcatactctttcacggaattggagataaatgttctggtggagttagtaacttcacgcaactcctaaccaacctctctggctctcctggctattgcttagaaataggaaatggagaaaaggactcatggttcatgccactaagaaagcaaacaagtgtagcgtgtgagaaagtgaaagcgatgaaagtgttaagtcaaggttacaacattgttgcagagtctcaaggaaacttagttgctagaggactaatcgagttctgcgataatgctcctcctgttataaactatatctctttaggaggtcctcatgctggcattgccaaaatccctaagtgtaattctggcccaatatgtgcgataggtgaagctttgttgaagttagaggtctatactgacttcgttcaagatcatattgctcctagtggttatatcaagattcctggtgaaatttcaaagtatttggagcactccaagtatctaccaaagcttaacaatgagagacctgacgaaagaaactctactttcaaagaccgattcactaacttacacaatttagttcttgtcatgttcgagagcgatacaatgttaatccctaaagaaactgcatggtttggttattatgaagatgaaggattcgatacccttttgtcagctcaacagacaaagttgtacagagaagattggattggtctgaaagcattggatgctgccggaaaagtgaagtttgaaagtgtgttaggggaccacctcagtatatcggatgaggaggttgtggaatttgttgtgccttacttaatgcaaaactgtatgtgaattttcatgagactataagattgacaaagtt

SEQ ID NO: 81812 - protein, 300 aa, Arabidopsis thaliana
  peptide (1)..(300): Ceres Seq. ID no. 12661463
MEKYSRRSILLSTVVAAVLFSLIPVSISIPFILFHGIGDKCSGGVSNFTQLLTNLSGSPGYCLEIGNGEKDSWFMPLRKQTSVACEKVKAMKVLSQGYNIVAESQGNLVARGLIEFCDNAPPVINYISLGGPHAGIAKIPKCNSGPICAIGEALLKLEVYTDFVQDHIAPSGYIKIPGEISKYLEHSKYLPKLNNERPDERNSTFKDRFTNLHNLVLVMFESDTMLIPKETAWFGYYEDEGFDTLLSAQQTKLYREDWIGLKALDAAGKVKFESVLGDHLSISDEEVVEFVVPYLMQNCM

SEQ ID NO: 81813 - protein, 226 aa, Arabidopsis thaliana
  peptide (1)..(226): Ceres Seq. ID no. 12661464
MPLRKQTSVACEKVKAMKVLSQGYNIVAESQGNLVARGLIEFCDNAPPVINYISLGGPHAGIAKIPKCNSGPICAIGEALLKLEVYTDFVQDHIAPSGYIKIPGEISKYLEHSKYLPKLNNERPDERNSTFKDRFTNLHNLVLVMFESDTMLIPKETAWFGYYEDEGFDTLLSAQQTKLYREDWIGLKALDAAGKVKFESVLGDHLSISDEEVVEFVVPYLMQNCM

SEQ ID NO: 81814 - protein, 210 aa, Arabidopsis thaliana
  peptide (1)..(210): Ceres Seq. ID no. 12661465
MKVLSQGYNIVAESQGNLVARGLIEFCDNAPPVINYISLGGPHAGIAKIPKCNSGPICAIGEALLKLEVYTDFVQDHIAPSGYIKIPGEISKYLEHSKYLPKLNNERPDERNSTFKDRFTNLHNLVLVMFESDTMLIPKETAWFGYYEDEGFDTLLSAQQTKLYREDWIGLKALDAAGKVKFESVLGDHLSISDEEVVEFVVPYLMQNCM

SEQ ID NO: 81815 - DNA, 567 bp, Arabidopsis thaliana
  misc_feature (1)..(567): Ceres Seq. ID no. 12661469
  misc_feature (1)..(567): Ortholog of  Ceres SEQ ID NO 14302764 as cited in SEQ ID NO 67753
  misc_feature (1)..(567): Ortholog of  Ceres SEQ ID NO 14302291 as cited in SEQ ID NO 68180
atgttagtttacggtatcctcaacgacgcctttcacggcggttgggagccgtcttcttcgtcttccgacgaagatcgtagctctttcccgagtgttaagatcgagactccggagagtttcgcggcggtggattctgttccggtcaagaaggagaagacgagtcctgtttcggcggcggtgacggcggcgaagggaaagcattatagaggagtgagacaaaggccgtgggggaaatttgcggcggagattagagacccggcgaagaacggagctagggtttggttaggaacgtttgagacggcggaggacgcggcgttggcttacgacagagctgctttcaggatgcgtggttcccgcgctttgttgaattttccgttgagagttaattcaggagaacccgacccggttcgaatcaagtccaagagatcttctttttcttcttctaacgagaacggagctccgaagaagaggagaacggtggccgccggtggtggaatggataagggattgacggtgaagtgcgaggttgttgaagtggcacgtggcgatcgtttattggttttataa

SEQ ID NO: 81816 - protein, 188 aa, Arabidopsis thaliana; identical to SEQ ID NO: 27258
  peptide (1)..(188): Ceres Seq. ID no. 12661470

SEQ ID NO: 81817 - DNA, 636 bp, Arabidopsis thaliana
  misc_feature (1)..(636): Ceres Seq. ID no. 12661520
  misc_feature (1)..(636): Ortholog of  Ceres SEQ ID NO 13639250 as cited in SEQ ID NO 56555
  misc_feature (1)..(636): Ortholog of  Ceres SEQ ID NO 15177034 as cited in SEQ ID NO 60024
  misc_feature (1)..(636): Ortholog of  Ceres SEQ ID NO 13598257 as cited in SEQ ID NO 63008
  misc_feature (1)..(636): Ortholog of  Ceres SEQ ID NO 13597309 as cited in SEQ ID NO 63851
  misc_feature (1)..(636): Ortholog of  Ceres SEQ ID NO 12599167 as cited in SEQ ID NO 64443
atgacgaccaaagagtgcggaaaccacggtggtggcggtggaggaggcggaaccgcctgtagaatctgtggagcaatcatcggcttcatcatcatcgtcttgatgacaatcttcctcgtttggataatcctccaaccgaaaaacccagaattcatcctccaagacaccaccgtctacgcctttaacctctcgcagcctaacctcctcacctcaaagtttcagataacaatcgcttcacgcaaccgaaactccaacatcggaatctactacgaccatcttcacgcctacgcttcttaccggaaccagcaaatcactctagctagcgaccttcctccgacgtaccaaagacacaaagaagatagcgtttggtcacctctcttatatggaaaccaagtccctatcgctcctttcaacgccgtggctctcggggacgagcagaatagtggggttttcacgttgactatatgcgttgatggacaagtgaggtggaaggtcgggactcttactatagggaattatcatctccatgttcgttgtcaggcgttcataaaccaggctgataaagccgccggagttcatgtcggcgaaaacaccgttaagtacacgttgatcaataagtgcagtgtcaatttttag

SEQ ID NO: 81818 - protein, 211 aa, Arabidopsis thaliana
  peptide (1)..(211): Ceres Seq. ID no. 12661521
MTTKECGNHGGGGGGGGTACRICGAIIGFIIIVLMTIFLVWIILQPKNPEFILQDTTVYAFNLSQPNLLTSKFQITIASRNRNSNIGIYYDHLHAYASYRNQQITLASDLPPTYQRHKEDSVWSPLLYGNQVPIAPFNAVALGDEQNSGVFTLTICVDGQVRWKVGTLTIGNYHLHVRCQAFINQADKAAGVHVGENTVKYTLINKCSVNF

SEQ ID NO: 81819 - protein, 177 aa, Arabidopsis thaliana
  peptide (1)..(177): Ceres Seq. ID no. 12661522
MTIFLVWIILQPKNPEFILQDTTVYAFNLSQPNLLTSKFQITIASRNRNSNIGIYYDHLHAYASYRNQQITLASDLPPTYQRHKEDSVWSPLLYGNQVPIAPFNAVALGDEQNSGVFTLTICVDGQVRWKVGTLTIGNYHLHVRCQAFINQADKAAGVHVGENTVKYTLINKCSVNF

SEQ ID NO: 81820 - DNA, 2136 bp, Arabidopsis thaliana
  misc_feature (1)..(2136): Ceres Seq. ID no. 12661537
  misc_feature (1)..(2136): Ortholog of  Ceres SEQ ID NO 15180156 as cited in SEQ ID NO 0
atggctcagtatagacaatcaggaacagagaggtttttgggaggtcgaagcggttacaatccttatgtcaacggtggagcttcgtcagatcacgtagcgatcgggatccgtaacggcggtggtagtaatttcggagttgtaactcagcacgggaaagctagtcgatggcggcgatctactcgattagataggaatcgtcgttgtggtgttggctctttggtgtttgttctttgtgttgtgctcgttgtttgtgtctcagcttactattatttctctggttatactaatttcggcaaagatgataaaggaattgatacagctgaaggtgattttcttacgaatgtgtcaagaactgatcctttgaaaatacttaagtttggtcatggttcagtgttacatggaagagattcgagagattgggataaggatgatagaagaagggatgaagattataatgaggatgatgtagaggataaatctgttgttgaggagaggtcagtgtctgaagtgaaaaaggatgtatcgcttcggaatcctttgaagggttcggattggaagggggttggtttttacaatgaagctggacgtgatgagctgaagaagtatgaagtggagtatcaggcttctcttgtaaaaggtggtcaatcgttgaaagagaatgatgggcatcatcagccatttgatacagaatctaatgaagatgattcgattgattctcatgatactcaaggggatgaatatgttgacatggggcatgatggggatgaaaatgaagaatcacacaaagataatcataagcacaatgaggatggtgctgaagaatcacacaaagatagtcataggcacaatgaggatggtgctgaagaatctcacaaagagactgcatctgtgtttcttcattccacgaccaagcatcagaaaattgaaaaggttcatggagctacttcaaaaaggtcacgtgggaagtcttctcttcttagtggtaagtcggggaaaacatcgcaaactgatgcaaaaagaagagctcgaagtcacagattttcaggcgtatcttgtgagatgaagctgttgaattccagtcaacaaatacaagagcctttgaaaactcaaaattttgctgcaccctccttacaatacatacagatggaggataaacctgatggagaagaacagtgggagcctaaatttgcaggtcaccagagtttacaggaacgagaagactctttcttggttcaagagcagaaaatccattgtggctttgtcaaagctcctgaaggattgccaagcactggatttgacctgacagaagatgatgctaactatatcagtaaatgtcacattgctgtgatatcctgtatctttggaaactctgatcgcttgaggcatcctgctaataaaatggtaagtagtttgtcaagaaaagatgtttgcttcgttgtgtttgtggacgagattaccatgcaaacactttctgccgaaggccaagtacccgacggagctggattcgttggtctgtggaagttggttgtggtgaggaatcttccttacacagatatgcggagggtagggaaaataccaaaactgttaccacacagacttttcacttcggcaaggtactcaatctggttggacagcaagttacgtctccagttggaccccctagtcattttggaatactttctgtggcgtgaagggcacgagtatgctatctccaatcactatgaccgccattgcctatgggaagaagttgcacaaaacaagaagctgaacaagtacaatcacactgtcattgatcagcagtttgagttttaccagtctgacgggctgacgagattcaatgcttcagatccccacaagcttcttcccagcaatgttccagaagggtctttcattgtacgggaacatacccccatgtcaaacctattctcctgtctttggttcaacgaagttgagcgcttcactccccgagatcagctaagctttgcatacacttaccagaaattaacaaggatgaatcctgacactccatttaatcttcacatgttcaaggattgcgagaggagaaaaatcaccaaattgtttcgtcacagatcagaggagaagcgaaaccttatacaagcagcaacaacacaataa

SEQ ID NO: 81821 - protein, 711 aa, Arabidopsis thaliana
  peptide (1)..(711): Ceres Seq. ID no. 12661538
MAQYRQSGTERFLGGRSGYNPYVNGGASSDHVAIGIRNGGGSNFGVVTQHGKASRWRRSTRLDRNRRCGVGSLVFVLCVVLVVCVSAYYYFSGYTNFGKDDKGIDTAEGDFLTNVSRTDPLKILKFGHGSVLHGRDSRDWDKDDRRRDEDYNEDDVEDKSVVEERSVSEVKKDVSLRNPLKGSDWKGVGFYNEAGRDELKKYEVEYQASLVKGGQSLKENDGHHQPFDTESNEDDSIDSHDTQGDEYVDMGHDGDENEESHKDNHKHNEDGAEESHKDSHRHNEDGAEESHKETASVFLHSTTKHQKIEKVHGATSKRSRGKSSLLSGKSGKTSQTDAKRRARSHRFSGVSCEMKLLNSSQQIQEPLKTQNFAAPSLQYIQMEDKPDGEEQWEPKFAGHQSLQEREDSFLVQEQKIHCGFVKAPEGLPSTGFDLTEDDANYISKCHIAVISCIFGNSDRLRHPANKMVSSLSRKDVCFVVFVDEITMQTLSAEGQVPDGAGFVGLWKLVVVRNLPYTDMRRVGKIPKLLPHRLFTSARYSIWLDSKLRLQLDPLVILEYFLWREGHEYAISNHYDRHCLWEEVAQNKKLNKYNHTVIDQQFEFYQSDGLTRFNASDPHKLLPSNVPEGSFIVREHTPMSNLFSCLWFNEVERFTPRDQLSFAYTYQKLTRMNPDTPFNLHMFKDCERRKITKLFRHRSEEKRNLIQAATTQ

SEQ ID NO: 81822 - protein, 462 aa, Arabidopsis thaliana
  peptide (1)..(462): Ceres Seq. ID no. 12661539
MGHDGDENEESHKDNHKHNEDGAEESHKDSHRHNEDGAEESHKETASVFLHSTTKHQKIEKVHGATSKRSRGKSSLLSGKSGKTSQTDAKRRARSHRFSGVSCEMKLLNSSQQIQEPLKTQNFAAPSLQYIQMEDKPDGEEQWEPKFAGHQSLQEREDSFLVQEQKIHCGFVKAPEGLPSTGFDLTEDDANYISKCHIAVISCIFGNSDRLRHPANKMVSSLSRKDVCFVVFVDEITMQTLSAEGQVPDGAGFVGLWKLVVVRNLPYTDMRRVGKIPKLLPHRLFTSARYSIWLDSKLRLQLDPLVILEYFLWREGHEYAISNHYDRHCLWEEVAQNKKLNKYNHTVIDQQFEFYQSDGLTRFNASDPHKLLPSNVPEGSFIVREHTPMSNLFSCLWFNEVERFTPRDQLSFAYTYQKLTRMNPDTPFNLHMFKDCERRKITKLFRHRSEEKRNLIQAATTQ

SEQ ID NO: 81823 - protein, 358 aa, Arabidopsis thaliana
  peptide (1)..(358): Ceres Seq. ID no. 12661540
MKLLNSSQQIQEPLKTQNFAAPSLQYIQMEDKPDGEEQWEPKFAGHQSLQEREDSFLVQEQKIHCGFVKAPEGLPSTGFDLTEDDANYISKCHIAVISCIFGNSDRLRHPANKMVSSLSRKDVCFVVFVDEITMQTLSAEGQVPDGAGFVGLWKLVVVRNLPYTDMRRVGKIPKLLPHRLFTSARYSIWLDSKLRLQLDPLVILEYFLWREGHEYAISNHYDRHCLWEEVAQNKKLNKYNHTVIDQQFEFYQSDGLTRFNASDPHKLLPSNVPEGSFIVREHTPMSNLFSCLWFNEVERFTPRDQLSFAYTYQKLTRMNPDTPFNLHMFKDCERRKITKLFRHRSEEKRNLIQAATTQ

SEQ ID NO: 81824 - DNA, 1008 bp, Arabidopsis thaliana
  misc_feature (1)..(1008): Ceres Seq. ID no. 12661547
  misc_feature (1)..(1008): Ortholog of  Ceres SEQ ID NO 13655375 as cited in SEQ ID NO 63347
  misc_feature (1)..(1008): Ortholog of  Ceres SEQ ID NO 12626166 as cited in SEQ ID NO 64505
  misc_feature (1)..(1008): Ortholog of  Ceres SEQ ID NO 14301599 as cited in SEQ ID NO 65699
  misc_feature (1)..(1008): Ortholog of  Ceres SEQ ID NO 13654415 as cited in SEQ ID NO 68820
  misc_feature (1)..(1008): Ortholog of  Ceres SEQ ID NO 14301978 as cited in SEQ ID NO 0
  misc_feature (1)..(1008): Ortholog of  Ceres SEQ ID NO 14303290 as cited in SEQ ID NO 0
atggctccagtgaaaaaatcagataagaaagcaacattagatgctgctgcttggatgttcaatgttgttacttctgttggtatcatcattgttaataaagctttaatggctacttatggctttagctttgctacaacgttaaccggtttacatttcgccactacgacgttgatgacgcttgttttaagatgtttaggatatatacaaccttctcatcttccatttacagagcttcttaagtttattctgtttgctaatttttcgattgttggaatgaatgttagtcttatgtggaactctgttgggttttatcagattgcaaagcttagcatgattcctgtatcatgcttgttggaagtagtatttgataagattcgttactcaagagatacaaaacttagcattggacttgttcttgttggtgttggtgtttgtactgttactgatgttagtgttaacaccaaaggttttgttgctgcttttgttgctgtgtggagtactgctttgcaacaatactatgtacattatctacagcgaaagtactcgcttagctcattcaacctactgggtcatactgctccagctcaggctgcaacgttattgatagtcggtccatttctcgactattggttgacagacaaacgggtagacatgtatgattacaactctgtctctgtgatgtttataaccctctcgtgcacaatagcaatcgggacaaacctgagccagttcatctgcatcgggagattcacagcagtgtcattccaagtcctgggccatatgaagacgatcttggtgcttgtaatgggcttcttcttctttgacagagatggtctaaacctgcatgtgattcttggcatgatcattgcagtactcgggatgatctggtacggtaatgcctcgtccaagccaggcggcaaggagaagaagaattattctcttccaacgacccgacaacagaaacttggggctacttcagattctgatgaacatcgagataaagcgtag

SEQ ID NO: 81825 - protein, 335 aa, Arabidopsis thaliana
  peptide (1)..(335): Ceres Seq. ID no. 12661548
MAPVKKSDKKATLDAAAWMFNVVTSVGIIIVNKALMATYGFSFATTLTGLHFATTTLMTLVLRCLGYIQPSHLPFTELLKFILFANFSIVGMNVSLMWNSVGFYQIAKLSMIPVSCLLEVVFDKIRYSRDTKLSIGLVLVGVGVCTVTDVSVNTKGFVAAFVAVWSTALQQYYVHYLQRKYSLSSFNLLGHTAPAQAATLLIVGPFLDYWLTDKRVDMYDYNSVSVMFITLSCTIAIGTNLSQFICIGRFTAVSFQVLGHMKTILVLVMGFFFFDRDGLNLHVILGMIIAVLGMIWYGNASSKPGGKEKKNYSLPTTRQQKLGATSDSDEHRDKA

SEQ ID NO: 81826 - protein, 317 aa, Arabidopsis thaliana
  peptide (1)..(317): Ceres Seq. ID no. 12661549
MFNVVTSVGIIIVNKALMATYGFSFATTLTGLHFATTTLMTLVLRCLGYIQPSHLPFTELLKFILFANFSIVGMNVSLMWNSVGFYQIAKLSMIPVSCLLEVVFDKIRYSRDTKLSIGLVLVGVGVCTVTDVSVNTKGFVAAFVAVWSTALQQYYVHYLQRKYSLSSFNLLGHTAPAQAATLLIVGPFLDYWLTDKRVDMYDYNSVSVMFITLSCTIAIGTNLSQFICIGRFTAVSFQVLGHMKTILVLVMGFFFFDRDGLNLHVILGMIIAVLGMIWYGNASSKPGGKEKKNYSLPTTRQQKLGATSDSDEHRDKA

SEQ ID NO: 81827 - protein, 300 aa, Arabidopsis thaliana
  peptide (1)..(300): Ceres Seq. ID no. 12661550
MATYGFSFATTLTGLHFATTTLMTLVLRCLGYIQPSHLPFTELLKFILFANFSIVGMNVSLMWNSVGFYQIAKLSMIPVSCLLEVVFDKIRYSRDTKLSIGLVLVGVGVCTVTDVSVNTKGFVAAFVAVWSTALQQYYVHYLQRKYSLSSFNLLGHTAPAQAATLLIVGPFLDYWLTDKRVDMYDYNSVSVMFITLSCTIAIGTNLSQFICIGRFTAVSFQVLGHMKTILVLVMGFFFFDRDGLNLHVILGMIIAVLGMIWYGNASSKPGGKEKKNYSLPTTRQQKLGATSDSDEHRDKA

SEQ ID NO: 81828 - DNA, 645 bp, Arabidopsis thaliana
  misc_feature (1)..(645): Ceres Seq. ID no. 12661569
  misc_feature (1)..(645): Ortholog of  Ceres SEQ ID NO 14314534 as cited in SEQ ID NO 52434
  misc_feature (1)..(645): Ortholog of  Ceres SEQ ID NO 13656436 as cited in SEQ ID NO 69154
atggcgaatagaatagatcatgagtacgattacttgttcaagatcgtcctgatcggcgattccggtgttggtaaatccaacattctctctcgattcaccagaaacgagttctgtctcgaatccaaatccaccattggcgtcgaattcgccacccggactttacaggttgaaggcaaaacagtgaaggctcagatttgggacactgcaggtcaagagcgttatcgagcaatcacaagtgcttactacagaggagctgttggagctcttcttgtctacgacataaccaagagacaaacttttgagaatgtcttgagatggttacgtgagctaagggatcatgctgattccaacattgttatcatgatggctggaaacaaatcagacctgaatcacttgagatctgttgctgatgaagatggtcgctctctcgccgagaaggaaggtttgtcgtttctcgagacatctgctttagaagcgactaacatcgagaaagcgtttcagaccattttgtctgagatttatcatatcataagcaagaaagctttagcggcacaagaagctgcaggtaatcttccgggccaaggaacagcgatcaatatatcagattcatctgcaactaacagaaaaggatgctgttctacctaa

SEQ ID NO: 81829 - protein, 214 aa, Arabidopsis thaliana
  peptide (1)..(214): Ceres Seq. ID no. 12661570
MANRIDHEYDYLFKIVLIGDSGVGKSNILSRFTRNEFCLESKSTIGVEFATRTLQVEGKTVKAQIWDTAGQERYRAITSAYYRGAVGALLVYDITKRQTFENVLRWLRELRDHADSNIVIMMAGNKSDLNHLRSVADEDGRSLAEKEGLSFLETSALEATNIEKAFQTILSEIYHIISKKALAAQEAAGNLPGQGTAINISDSSATNRKGCCST

SEQ ID NO: 81830 - DNA, 934 bp, Arabidopsis thaliana
  misc_feature (1)..(934): Ceres Seq. ID no. 12661571
  misc_feature (1)..(934): Ortholog of  Ceres SEQ ID NO 15170458 as cited in SEQ ID NO 52842
  misc_feature (1)..(934): Ortholog of  Ceres SEQ ID NO 14304224 as cited in SEQ ID NO 56350
  misc_feature (1)..(934): Ortholog of  Ceres SEQ ID NO 13597679 as cited in SEQ ID NO 65073
aagagagaaatggctggagcagagcaaagccagagatggagccttaaggccaagaccgtacttgtaaccggtggaacaaaaggcatcgggcatgctatagtagaggaatttgcaggatttggagcagtaatacatacttgtgctagaaacgaatatgagcttaacgagtgtttaagcaaatggcaaaagaagggttttcaagtcactggttcggtctgtgacgcatctttgagaccagagagagaaaagctaatgcagactgtgtcttcaatgtttggtggaaagctcgatatcctcataaacaatttgggagcgattcggtcaaaaccaacgctggattacacagcagaagatttctcgtttcatatttcgacaaacttagaatctgcttatcatctgagccagcttgcgcatcctctgcttaaggcttcaggatgtgggaacataattttcatgtcctctattgctggagttgtatctgctagtgtcggctccatctactctgcaacgaaaggggcattgaatcagctagcaaggaacttggcatgtgagtgggctagtgatggcattagggctaatgctgtggctcctgcagtcatcgcaactcctttggctgaagctgtgtatgatgatgagttcaagaaagtggtgatatcaagaaagccgttggggcgtttcggggagcctgaagaagtgtcctcgcttgtggcttttctatgtatgcctgcagcttcttatataactggtcaaaccatttgtgtcgatggaggtctcactgtcaatggcttctcctatcagccacaaggttaaaatccaatatccaaaaacaaacacattttcaacttcattactttgaacattgtcatcttgggctaagcccggtttggaagtatggattctggccgtaacactttagaaaataaaaggaaacttc

SEQ ID NO: 81831 - protein, 269 aa, Arabidopsis thaliana
  peptide (1)..(269): Ceres Seq. ID no. 12661572
KREMAGAEQSQRWSLKAKTVLVTGGTKGIGHAIVEEFAGFGAVIHTCARNEYELNECLSKWQKKGFQVTGSVCDASLRPEREKLMQTVSSMFGGKLDILINNLGAIRSKPTLDYTAEDFSFHISTNLESAYHLSQLAHPLLKASGCGNIIFMSSIAGVVSASVGSIYSATKGALNQLARNLACEWASDGIRANAVAPAVIATPLAEAVYDDEFKKVVISRKPLGRFGEPEEVSSLVAFLCMPAASYITGQTICVDGGLTVNGFSYQPQG

SEQ ID NO: 81832 - protein, 266 aa, Arabidopsis thaliana
  peptide (1)..(266): Ceres Seq. ID no. 12661573
MAGAEQSQRWSLKAKTVLVTGGTKGIGHAIVEEFAGFGAVIHTCARNEYELNECLSKWQKKGFQVTGSVCDASLRPEREKLMQTVSSMFGGKLDILINNLGAIRSKPTLDYTAEDFSFHISTNLESAYHLSQLAHPLLKASGCGNIIFMSSIAGVVSASVGSIYSATKGALNQLARNLACEWASDGIRANAVAPAVIATPLAEAVYDDEFKKVVISRKPLGRFGEPEEVSSLVAFLCMPAASYITGQTICVDGGLTVNGFSYQPQG

SEQ ID NO: 81833 - protein, 185 aa, Arabidopsis thaliana
  peptide (1)..(185): Ceres Seq. ID no. 12661574
MQTVSSMFGGKLDILINNLGAIRSKPTLDYTAEDFSFHISTNLESAYHLSQLAHPLLKASGCGNIIFMSSIAGVVSASVGSIYSATKGALNQLARNLACEWASDGIRANAVAPAVIATPLAEAVYDDEFKKVVISRKPLGRFGEPEEVSSLVAFLCMPAASYITGQTICVDGGLTVNGFSYQPQG

SEQ ID NO: 81834 - DNA, 2088 bp, Arabidopsis thaliana
  misc_feature (1)..(2088): Ceres Seq. ID no. 12661578
  misc_feature (1)..(2088): Ortholog of  Ceres SEQ ID NO 13659394 as cited in SEQ ID NO 67049
atggaatcgaattactcaggtgtggtcaacggctacgatgtgagtttcttaccaacttcgattccggatcttggattcggtgttccttcttctagtgattttgatcttcggatggatcaatactatcaccaaccttcgatttgggttccagatcaagatcatcacttttctccaccagctgatgagattgattctgaaaacacccttttgaaatatgtaaaccagctccttatggaagagagtctcgctgagaagcagtctatcttctatgattccttggctcttcgacaaaccgaggaaatgttgcagcaagtcatcagcgactcgcagactcagtcttctatacctaataattcgattactaccagtagtagtagtaatagtggtgattatagtaacagcagcaattctagtgtacgcatcgagaatgaagtgttgtttgataataaacatcttggtgattctggtgttgtgtcatttccagggtctaacatgttgcgtggaggtgagcaattcgggcagccagcgaatgagattcttgtcaggagtatgtttagtgatgcagaatcagttctgcagtttaagagagggttagaggaagctagcaagtttcttcctaatactgatcaatggatctttaatcttgagcctgagatggaaagagttgttccggtgaaagtagaggaaggatggtcagctatctcgaaaactaggaagaatcatcacgagcgggaagaagaagaagatgatctagaggaagctaggaggaggagtaagcaattcgcagtgaatgaggaagatgggaaattaacagaaatgtttgataaggttttgcttcttgatggtgaatgcgatccgcagattatcgaagatggcgaaaatggttcaagcaaggctctggttaagaaaggccgcgcgaaaaagaagagtcgagcggttgatttccgcacacttctcacactatgcgcacaatctgtttctgcaggggataagattacggctgatgatttgctgaggcagataaggaagcaatgttcacctgttggtgatgcatcacagagactagctcatttcttcgccaatgcacttgaggcgcgtcttgaaggtagcacaggaactatgatccagagttattacgattccatttcctccaagaaacgaacagctgcacagattcttaaatcctatagtgtgttcttgtctgcgtctccgtttatgactttgatctatttcttctccaacaagatgattcttgatgctgccaaggatgcttcggttcttcatatagtcgattttgggatcctttatggtttccagtggccgatgtttatacagcacttatcaaagagcaaccccggactacggaaactacggattaccggtatcgagattcctcaacatgggcttcgtccaactgaaagaatacaggatacaggtcgaagactgacagagtattgcaaacggtttggtgttccatttgaatacaatgcaattgcgtctaagaactgggaaacaatcaagatggaggagttcaagatccgaccaaacgaagttcttgcagttaatgctgtgctccgattcaagaacctccgagatgtgattccaggggaagaggattgcccgagggacggatttctaaaactgatcagagacatgaaccctaacgttttcctcagctcgacagtcaatggatctttcaacgcaccgttcttcaccacacggttcaaagaagctttgtttcactactcggcactctttgacttgtttggtgcgactctgtccaaagaaaacccggagaggatacatttcgaaggggagttttacgggagagaagtgatgaatgtgatagcatgtgaaggagtagatagagtggagagacctgagacgtacaagcaatggcaagtgaggatgataagggctggatttaaacagaagccagtggaggcagagcttgtgcagttatttagggaaaagatgaagaaatggggttatcataaagactttgtccttgatgaagatagtaattggttcttacaaggttggaaaggtcgcatcctcttctcttcttcttgttgggtcccttcttag

SEQ ID NO: 81835 - protein, 695 aa, Arabidopsis thaliana
  peptide (1)..(695): Ceres Seq. ID no. 12661579
MESNYSGVVNGYDVSFLPTSIPDLGFGVPSSSDFDLRMDQYYHQPSIWVPDQDHHFSPPADEIDSENTLLKYVNQLLMEESLAEKQSIFYDSLALRQTEEMLQQVISDSQTQSSIPNNSITTSSSSNSGDYSNSSNSSVRIENEVLFDNKHLGDSGVVSFPGSNMLRGGEQFGQPANEILVRSMFSDAESVLQFKRGLEEASKFLPNTDQWIFNLEPEMERVVPVKVEEGWSAISKTRKNHHEREEEEDDLEEARRRSKQFAVNEEDGKLTEMFDKVLLLDGECDPQIIEDGENGSSKALVKKGRAKKKSRAVDFRTLLTLCAQSVSAGDKITADDLLRQIRKQCSPVGDASQRLAHFFANALEARLEGSTGTMIQSYYDSISSKKRTAAQILKSYSVFLSASPFMTLIYFFSNKMILDAAKDASVLHIVDFGILYGFQWPMFIQHLSKSNPGLRKLRITGIEIPQHGLRPTERIQDTGRRLTEYCKRFGVPFEYNAIASKNWETIKMEEFKIRPNEVLAVNAVLRFKNLRDVIPGEEDCPRDGFLKLIRDMNPNVFLSSTVNGSFNAPFFTTRFKEALFHYSALFDLFGATLSKENPERIHFEGEFYGREVMNVIACEGVDRVERPETYKQWQVRMIRAGFKQKPVEAELVQLFREKMKKWGYHKDFVLDEDSNWFLQGWKGRILFSSSCWVPS

SEQ ID NO: 81836 - protein, 658 aa, Arabidopsis thaliana
  peptide (1)..(658): Ceres Seq. ID no. 12661580
MDQYYHQPSIWVPDQDHHFSPPADEIDSENTLLKYVNQLLMEESLAEKQSIFYDSLALRQTEEMLQQVISDSQTQSSIPNNSITTSSSSNSGDYSNSSNSSVRIENEVLFDNKHLGDSGVVSFPGSNMLRGGEQFGQPANEILVRSMFSDAESVLQFKRGLEEASKFLPNTDQWIFNLEPEMERVVPVKVEEGWSAISKTRKNHHEREEEEDDLEEARRRSKQFAVNEEDGKLTEMFDKVLLLDGECDPQIIEDGENGSSKALVKKGRAKKKSRAVDFRTLLTLCAQSVSAGDKITADDLLRQIRKQCSPVGDASQRLAHFFANALEARLEGSTGTMIQSYYDSISSKKRTAAQILKSYSVFLSASPFMTLIYFFSNKMILDAAKDASVLHIVDFGILYGFQWPMFIQHLSKSNPGLRKLRITGIEIPQHGLRPTERIQDTGRRLTEYCKRFGVPFEYNAIASKNWETIKMEEFKIRPNEVLAVNAVLRFKNLRDVIPGEEDCPRDGFLKLIRDMNPNVFLSSTVNGSFNAPFFTTRFKEALFHYSALFDLFGATLSKENPERIHFEGEFYGREVMNVIACEGVDRVERPETYKQWQVRMIRAGFKQKPVEAELVQLFREKMKKWGYHKDFVLDEDSNWFLQGWKGRILFSSSCWVPS

SEQ ID NO: 81837 - protein, 618 aa, Arabidopsis thaliana
  peptide (1)..(618): Ceres Seq. ID no. 12661581
MEESLAEKQSIFYDSLALRQTEEMLQQVISDSQTQSSIPNNSITTSSSSNSGDYSNSSNSSVRIENEVLFDNKHLGDSGVVSFPGSNMLRGGEQFGQPANEILVRSMFSDAESVLQFKRGLEEASKFLPNTDQWIFNLEPEMERVVPVKVEEGWSAISKTRKNHHEREEEEDDLEEARRRSKQFAVNEEDGKLTEMFDKVLLLDGECDPQIIEDGENGSSKALVKKGRAKKKSRAVDFRTLLTLCAQSVSAGDKITADDLLRQIRKQCSPVGDASQRLAHFFANALEARLEGSTGTMIQSYYDSISSKKRTAAQILKSYSVFLSASPFMTLIYFFSNKMILDAAKDASVLHIVDFGILYGFQWPMFIQHLSKSNPGLRKLRITGIEIPQHGLRPTERIQDTGRRLTEYCKRFGVPFEYNAIASKNWETIKMEEFKIRPNEVLAVNAVLRFKNLRDVIPGEEDCPRDGFLKLIRDMNPNVFLSSTVNGSFNAPFFTTRFKEALFHYSALFDLFGATLSKENPERIHFEGEFYGREVMNVIACEGVDRVERPETYKQWQVRMIRAGFKQKPVEAELVQLFREKMKKWGYHKDFVLDEDSNWFLQGWKGRILFSSSCWVPS

SEQ ID NO: 81838 - DNA, 1632 bp, Arabidopsis thaliana
  misc_feature (1)..(1632): Ceres Seq. ID no. 12661589
  misc_feature (1)..(1632): Ortholog of  Ceres SEQ ID NO 15178728 as cited in SEQ ID NO 67280
atggaaggggaagaagacactgtggcgggttctagcataccaaagaagaaaatgatgaaacagctgacaggaaaacgcgacgacactctgcttcattcagcagtgagacacggaaacaaagacagagttgttgagattcttacgaaaaccagagagtctgagttgaatcagctgttggggaaacagaaccagtcaggcgaaaccgcactctatgttgcagcagagtatggtgatgtagagattgtcaaggagatgatcaactgctatgatcttgctctcgttgagatcaaagcaaggaacggatttgatgctttccacattgctgcaaagcaaggagatctcgatgtgttgaaggttttagcagaggctcattcggagttagcgatgacggtggatctatcaaacactacggcactgcacacagcggcaacacaaggacacactgaagtggtaaactttcttttggaactgggaagcagccttgctggaattgccaagagcaatggtaagacggccctgcactctgcatcaaggaacgggcatgtcaaagtcattaaggctctcttggcatccgaacctgcgatcgcaataaggatggacaagaagggccaaacagcccttcacatggcggttaaaggaacaaatgttgaggtcgtggaggaacttatcaaagcagataggtcttctatcaatatagccgacacaaagggaaacacagcgttgcacattgcagcccgaaaaggcagatctcagattgtcaagttgctattagccaacaacatgacagacacaaaagctgttaaccgatcaggcgaaaccgcacttgacacagcagagaaaattggaaatccagaagtggctcttattttacagaaacatggtgttcccagcgccaagaccattaagccatccgggcctaaccccgctcgggaactgaaacaaaccgtaagcgatatcaagcatgaggttcacaatcagcttgagcacacacgcctgaccagaaaacgtgttcaaggaatcgccaaacagcttaacaaaatgcacactgaaggtcttaacaatgcaatcaactcgactactgttgtagctgttcttattgccacggtcgcttttgcagcaattttcactgtcccggggcagtatgtagaagacacaagtaaaattccagatgggcattccctcggggaggcgaatattgcatcgacgactccgttcataattttcttcatctttgattcgatcgcactcttcatctccttagcggtcgtggtggttcagacatcagtggtggtaatagagagcaaggccaagaaacagatgatggctgtgataaacaaactcatgtggcttgcctgtgttctcatctctgttgcctttttggctttgtcgtttgttgttgttggtgaagaagagaagtggctagccatttgggtgactgctatcggggcaactataatgattacgacgttagggacgatgtgctactggataatacagcacaagatcgaagctgccaatttaagaaacattagaagatcctccatcaacagtatatctggatcctgggggattccccagcttacggattctgatattctccagaacgagtgtaagaaaatgtatgcaatctga

SEQ ID NO: 81839 - protein, 543 aa, Arabidopsis thaliana
  peptide (1)..(543): Ceres Seq. ID no. 12661590
MEGEEDTVAGSSIPKKKMMKQLTGKRDDTLLHSAVRHGNKDRVVEILTKTRESELNQLLGKQNQSGETALYVAAEYGDVEIVKEMINCYDLALVEIKARNGFDAFHIAAKQGDLDVLKVLAEAHSELAMTVDLSNTTALHTAATQGHTEVVNFLLELGSSLAGIAKSNGKTALHSASRNGHVKVIKALLASEPAIAIRMDKKGQTALHMAVKGTNVEVVEELIKADRSSINIADTKGNTALHIAARKGRSQIVKLLLANNMTDTKAVNRSGETALDTAEKIGNPEVALILQKHGVPSAKTIKPSGPNPARELKQTVSDIKHEVHNQLEHTRLTRKRVQGIAKQLNKMHTEGLNNAINSTTVVAVLIATVAFAAIFTVPGQYVEDTSKIPDGHSLGEANIASTTPFIIFFIFDSIALFISLAVVVVQTSVVVIESKAKKQMMAVINKLMWLACVLISVAFLALSFVVVGEEEKWLAIWVTAIGATIMITTLGTMCYWIIQHKIEAANLRNIRRSSINSISGSWGIPQLTDSDILQNECKKMYAI

SEQ ID NO: 81840 - protein, 526 aa, Arabidopsis thaliana
  peptide (1)..(526): Ceres Seq. ID no. 12661591
MMKQLTGKRDDTLLHSAVRHGNKDRVVEILTKTRESELNQLLGKQNQSGETALYVAAEYGDVEIVKEMINCYDLALVEIKARNGFDAFHIAAKQGDLDVLKVLAEAHSELAMTVDLSNTTALHTAATQGHTEVVNFLLELGSSLAGIAKSNGKTALHSASRNGHVKVIKALLASEPAIAIRMDKKGQTALHMAVKGTNVEVVEELIKADRSSINIADTKGNTALHIAARKGRSQIVKLLLANNMTDTKAVNRSGETALDTAEKIGNPEVALILQKHGVPSAKTIKPSGPNPARELKQTVSDIKHEVHNQLEHTRLTRKRVQGIAKQLNKMHTEGLNNAINSTTVVAVLIATVAFAAIFTVPGQYVEDTSKIPDGHSLGEANIASTTPFIIFFIFDSIALFISLAVVVVQTSVVVIESKAKKQMMAVINKLMWLACVLISVAFLALSFVVVGEEEKWLAIWVTAIGATIMITTLGTMCYWIIQHKIEAANLRNIRRSSINSISGSWGIPQLTDSDILQNECKKMYAI

SEQ ID NO: 81841 - protein, 525 aa, Arabidopsis thaliana
  peptide (1)..(525): Ceres Seq. ID no. 12661592
MKQLTGKRDDTLLHSAVRHGNKDRVVEILTKTRESELNQLLGKQNQSGETALYVAAEYGDVEIVKEMINCYDLALVEIKARNGFDAFHIAAKQGDLDVLKVLAEAHSELAMTVDLSNTTALHTAATQGHTEVVNFLLELGSSLAGIAKSNGKTALHSASRNGHVKVIKALLASEPAIAIRMDKKGQTALHMAVKGTNVEVVEELIKADRSSINIADTKGNTALHIAARKGRSQIVKLLLANNMTDTKAVNRSGETALDTAEKIGNPEVALILQKHGVPSAKTIKPSGPNPARELKQTVSDIKHEVHNQLEHTRLTRKRVQGIAKQLNKMHTEGLNNAINSTTVVAVLIATVAFAAIFTVPGQYVEDTSKIPDGHSLGEANIASTTPFIIFFIFDSIALFISLAVVVVQTSVVVIESKAKKQMMAVINKLMWLACVLISVAFLALSFVVVGEEEKWLAIWVTAIGATIMITTLGTMCYWIIQHKIEAANLRNIRRSSINSISGSWGIPQLTDSDILQNECKKMYAI

SEQ ID NO: 81842 - DNA, 1059 bp, Arabidopsis thaliana
  misc_feature (1)..(1059): Ceres Seq. ID no. 12661655
  misc_feature (1)..(1059): Ortholog of  Ceres SEQ ID NO 15174737 as cited in SEQ ID NO 52912
  misc_feature (1)..(1059): Ortholog of  Ceres SEQ ID NO 13624551 as cited in SEQ ID NO 0
atgtcggttcctcctagattccggtccgtaaattccgatgagcgagagttccgatcagttcttggtcctaccgggaacaagctgcagaggaaaccaccggggatgaaactggagaagccgatgatggagaagaccatcatcgactcaaaagatgagaaagcgaagaaaccaactactccggcttcaccaaggacgactctgaagcaatgctcgtctctttgctcttcgattttgagaaagaatagtgcttcaatgactgcttcgtattcctctgatgcttcgtcttcgtgtgagtcatcgcctttgagcgtggcgtcttcttcgagctgtaagaaggttgtgaggcgaagtgggtctgtctcttctacaaggaagctgagtgttgggaaagaagaagagaaggtttctggtgattgcttcgctgatggtcgtaaaaggtgtgcttggatcacacctaaagctgacccgtgctatgttgctttccatgacgaagaatggggagttcctgtacatgacgacaagaagctttttgagttattatgcctctctggtgctctagccgaactctcatggaccgacattctctccagaagacatatactcagggaagtttttatggacttcgatccagtcgctgtagctgaattgaatgacaaaaagttaacagcgccaggtactgctgccatttccttactatcagaggtcaagatacgatcaatcctcgataactcacgccatgtgcgcaagattatagctgaatgtggatcattgaagaagtacatgtggaactttgtgaacaacaagcctacacagagccaattcaggtatcagcgccaagtccctgtgaagacatcgaaagctgagtttataagcaaagatcttgtacgcagaggctttcgcagcgttagtccaacagttatttactccttcatgcaagcagctggactcacgaatgatcatctcataggctgcttcagataccaagactgttgcgtagatgcagagacaacaacaacaacgaaggcgaagaagaagaacgagagagagagtgataaataa

SEQ ID NO: 81843 - protein, 352 aa, Arabidopsis thaliana
  peptide (1)..(352): Ceres Seq. ID no. 12661656
MSVPPRFRSVNSDEREFRSVLGPTGNKLQRKPPGMKLEKPMMEKTIIDSKDEKAKKPTTPASPRTTLKQCSSLCSSILRKNSASMTASYSSDASSSCESSPLSVASSSSCKKVVRRSGSVSSTRKLSVGKEEEKVSGDCFADGRKRCAWITPKADPCYVAFHDEEWGVPVHDDKKLFELLCLSGALAELSWTDILSRRHILREVFMDFDPVAVAELNDKKLTAPGTAAISLLSEVKIRSILDNSRHVRKIIAECGSLKKYMWNFVNNKPTQSQFRYQRQVPVKTSKAEFISKDLVRRGFRSVSPTVIYSFMQAAGLTNDHLIGCFRYQDCCVDAETTTTTKAKKKNERESDK

SEQ ID NO: 81844 - protein, 318 aa, Arabidopsis thaliana
  peptide (1)..(318): Ceres Seq. ID no. 12661657
MKLEKPMMEKTIIDSKDEKAKKPTTPASPRTTLKQCSSLCSSILRKNSASMTASYSSDASSSCESSPLSVASSSSCKKVVRRSGSVSSTRKLSVGKEEEKVSGDCFADGRKRCAWITPKADPCYVAFHDEEWGVPVHDDKKLFELLCLSGALAELSWTDILSRRHILREVFMDFDPVAVAELNDKKLTAPGTAAISLLSEVKIRSILDNSRHVRKIIAECGSLKKYMWNFVNNKPTQSQFRYQRQVPVKTSKAEFISKDLVRRGFRSVSPTVIYSFMQAAGLTNDHLIGCFRYQDCCVDAETTTTTKAKKKNERESDK

SEQ ID NO: 81845 - protein, 312 aa, Arabidopsis thaliana
  peptide (1)..(312): Ceres Seq. ID no. 12661658
MMEKTIIDSKDEKAKKPTTPASPRTTLKQCSSLCSSILRKNSASMTASYSSDASSSCESSPLSVASSSSCKKVVRRSGSVSSTRKLSVGKEEEKVSGDCFADGRKRCAWITPKADPCYVAFHDEEWGVPVHDDKKLFELLCLSGALAELSWTDILSRRHILREVFMDFDPVAVAELNDKKLTAPGTAAISLLSEVKIRSILDNSRHVRKIIAECGSLKKYMWNFVNNKPTQSQFRYQRQVPVKTSKAEFISKDLVRRGFRSVSPTVIYSFMQAAGLTNDHLIGCFRYQDCCVDAETTTTTKAKKKNERESDK

SEQ ID NO: 81846 - DNA, 2163 bp, Arabidopsis thaliana
  misc_feature (1)..(2163): Ceres Seq. ID no. 12661695
  misc_feature (1)..(2163): Ortholog of  Ceres SEQ ID NO 14304565 as cited in SEQ ID NO 53297
  misc_feature (1)..(2163): Ortholog of  Ceres SEQ ID NO 15172170 as cited in SEQ ID NO 58957
  misc_feature (1)..(2163): Ortholog of  Ceres SEQ ID NO 13654989 as cited in SEQ ID NO 63117
  misc_feature (1)..(2163): Ortholog of  Ceres SEQ ID NO 13584744 as cited in SEQ ID NO 69137
atgggtgttgatgtgaaacgtttccttgttgttatgcttctgttgcgaatctgtgaatacgcagctgcttctacttttcctcttgcacttcgtaattgcagtgaccattgcggaaatgttagtgttccttacccttttgggataggcaaaggttgttacaagaacaaatggttcgagattgtctgcaaaagctcatcagaccaacaaccgatacttttgttgccaaggatccgacgagcagttacttccttcaaccttggagaccctttctccatatcggtgtacaacaaattctacatccagagtccattgaaacattcaggttgtcccaacagagatggttattcatcatcgtctttgaatttgaagggcagcccattcttcatatcagaaaacaataagttcacagctgttggatgcaacaacaaggcgttcatgaatgtcacagggttacaaatcgtgggatgtgagacgacatgtggaaatgagatacggtcttacaaaggagctaacacgagttgtgttggttacaaatgctgccagatgactataccacctcttcttcaacttcaagtgtttgatgcaaccgtagagaaactggaaccaaataaacaaggatgtcaggttgccttcttgactcaattcacattgtcagggtccttgtttactcctcccgaattaatggagtacagtgaatatacaacaatagagctagaatggcgtcttgatctttcctacatgacttcaaagcgtgtactatgcaaaggcaatacatttttcgaagatagctatcaatgttcgtgtcacaatggttacgaaggaaatccctacatacctggcggatgccaagacattgatgaatgcagagatccacatctaaataaatgtggaaagagaaagtgtgtgaatgttctcggatcatatagatgtgagaaaacttggccagccattttaagtggaactctaagctctggattgttgctcctgatctttggtatgtggttgctatgcaaggctaatagaaagcggaaagtagccaagcagaagaggaagttcttccaaagaaatggaggtttgttgttgcagcaacaaacatccttccttcacggaagtgtaaatagaaccaaagttttcagctccaatgacctggagaatgcaacagatagattcaatgcgagcagaatactggggcaaggcgggcagggtacagtttataaaggaatgttggaagatgggatgatcgtcgctgtcaagaagtccaaagcattgaaagaagagaatcttgaggaattcatcaatgagatcatccttttgtcacagattaaccaccgaaatgttgtcaagatcttaggatgttgtcttgagacagaagtacctatattggtgtatgagttcattcctaaccgtaaccttttcgatcatcttcacaacccatcagaggatttcccaatgagttgggaagtccgtctctgcatcgcctgtgaagtcgccgatgccctctcctacctgcattcagccgtctctatccccatttatcacagagatgtcaagtcaacaaatatcttattggatgaaaagcaccgtgcaaaagtgtcagattttggaatctcgagatctgttgctatagatgatactcacttgacaacaattgtacaaggaacaattggatatgtagacccagagtaccttcagtcaaaccacttcacagggaagagtgacgtctacagctttggggttttgctcattgagctcttaaccggagagaaacctgtctcccttctgagacggcaagaagtccgaatgttgggtgcttacttcctcgaagccatgagaaatgacagacttcatgaaattctcgatgctcgcatcaaggaggaatgtgatcgagaagaggtccttgcagtagccaaacttgcaagaaggtgtttgagcttgaactcagaacatcgccctaccatgagagacgtatttattgaactagataggatgcaatctaagagaaaaggtactcaaagccaagcacagaatggtgaagagcatgcacacatccagatcgcaatgccggagtctatgtcacttagttactcttctccgaacatagtcgttgaaaacagctcattctcattggacacaaaaccactaatgcctcacaagacacagtga

SEQ ID NO: 81847 - protein, 720 aa, Arabidopsis thaliana
  peptide (1)..(720): Ceres Seq. ID no. 12661696
MGVDVKRFLVVMLLLRICEYAAASTFPLALRNCSDHCGNVSVPYPFGIGKGCYKNKWFEIVCKSSSDQQPILLLPRIRRAVTSFNLGDPFSISVYNKFYIQSPLKHSGCPNRDGYSSSSLNLKGSPFFISENNKFTAVGCNNKAFMNVTGLQIVGCETTCGNEIRSYKGANTSCVGYKCCQMTIPPLLQLQVFDATVEKLEPNKQGCQVAFLTQFTLSGSLFTPPELMEYSEYTTIELEWRLDLSYMTSKRVLCKGNTFFEDSYQCSCHNGYEGNPYIPGGCQDIDECRDPHLNKCGKRKCVNVLGSYRCEKTWPAILSGTLSSGLLLLIFGMWLLCKANRKRKVAKQKRKFFQRNGGLLLQQQTSFLHGSVNRTKVFSSNDLENATDRFNASRILGQGGQGTVYKGMLEDGMIVAVKKSKALKEENLEEFINEIILLSQINHRNVVKILGCCLETEVPILVYEFIPNRNLFDHLHNPSEDFPMSWEVRLCIACEVADALSYLHSAVSIPIYHRDVKSTNILLDEKHRAKVSDFGISRSVAIDDTHLTTIVQGTIGYVDPEYLQSNHFTGKSDVYSFGVLLIELLTGEKPVSLLRRQEVRMLGAYFLEAMRNDRLHEILDARIKEECDREEVLAVAKLARRCLSLNSEHRPTMRDVFIELDRMQSKRKGTQSQAQNGEEHAHIQIAMPESMSLSYSSPNIVVENSSFSLDTKPLMPHKTQ

SEQ ID NO: 81848 - protein, 709 aa, Arabidopsis thaliana
  peptide (1)..(709): Ceres Seq. ID no. 12661697
MLLLRICEYAAASTFPLALRNCSDHCGNVSVPYPFGIGKGCYKNKWFEIVCKSSSDQQPILLLPRIRRAVTSFNLGDPFSISVYNKFYIQSPLKHSGCPNRDGYSSSSLNLKGSPFFISENNKFTAVGCNNKAFMNVTGLQIVGCETTCGNEIRSYKGANTSCVGYKCCQMTIPPLLQLQVFDATVEKLEPNKQGCQVAFLTQFTLSGSLFTPPELMEYSEYTTIELEWRLDLSYMTSKRVLCKGNTFFEDSYQCSCHNGYEGNPYIPGGCQDIDECRDPHLNKCGKRKCVNVLGSYRCEKTWPAILSGTLSSGLLLLIFGMWLLCKANRKRKVAKQKRKFFQRNGGLLLQQQTSFLHGSVNRTKVFSSNDLENATDRFNASRILGQGGQGTVYKGMLEDGMIVAVKKSKALKEENLEEFINEIILLSQINHRNVVKILGCCLETEVPILVYEFIPNRNLFDHLHNPSEDFPMSWEVRLCIACEVADALSYLHSAVSIPIYHRDVKSTNILLDEKHRAKVSDFGISRSVAIDDTHLTTIVQGTIGYVDPEYLQSNHFTGKSDVYSFGVLLIELLTGEKPVSLLRRQEVRMLGAYFLEAMRNDRLHEILDARIKEECDREEVLAVAKLARRCLSLNSEHRPTMRDVFIELDRMQSKRKGTQSQAQNGEEHAHIQIAMPESMSLSYSSPNIVVENSSFSLDTKPLMPHKTQ

SEQ ID NO: 81849 - protein, 575 aa, Arabidopsis thaliana
  peptide (1)..(575): Ceres Seq. ID no. 12661698
MNVTGLQIVGCETTCGNEIRSYKGANTSCVGYKCCQMTIPPLLQLQVFDATVEKLEPNKQGCQVAFLTQFTLSGSLFTPPELMEYSEYTTIELEWRLDLSYMTSKRVLCKGNTFFEDSYQCSCHNGYEGNPYIPGGCQDIDECRDPHLNKCGKRKCVNVLGSYRCEKTWPAILSGTLSSGLLLLIFGMWLLCKANRKRKVAKQKRKFFQRNGGLLLQQQTSFLHGSVNRTKVFSSNDLENATDRFNASRILGQGGQGTVYKGMLEDGMIVAVKKSKALKEENLEEFINEIILLSQINHRNVVKILGCCLETEVPILVYEFIPNRNLFDHLHNPSEDFPMSWEVRLCIACEVADALSYLHSAVSIPIYHRDVKSTNILLDEKHRAKVSDFGISRSVAIDDTHLTTIVQGTIGYVDPEYLQSNHFTGKSDVYSFGVLLIELLTGEKPVSLLRRQEVRMLGAYFLEAMRNDRLHEILDARIKEECDREEVLAVAKLARRCLSLNSEHRPTMRDVFIELDRMQSKRKGTQSQAQNGEEHAHIQIAMPESMSLSYSSPNIVVENSSFSLDTKPLMPHKTQ

SEQ ID NO: 81850 - DNA, 1476 bp, Arabidopsis thaliana
  misc_feature (1)..(1476): Ceres Seq. ID no. 12661703
  misc_feature (1)..(1476): Ortholog of  Ceres SEQ ID NO 14310452 as cited in SEQ ID NO 54426
  misc_feature (1)..(1476): Ortholog of  Ceres SEQ ID NO 15169663 as cited in SEQ ID NO 64659
  misc_feature (1)..(1476): Ortholog of  Ceres SEQ ID NO 13656177 as cited in SEQ ID NO 64997
atggaggaaccaacgccggaggaggaagggggaatcaccatcatgtctaaatcccgcaaaaatcctaaaaccgtagtaaacattcagtcccagaaacttgattcggaccagaatactcctcaatttgagaaattcactaatcctaaccctagctccgacaccacatccgccactaatttcgaagggctcggattagctgagtgggcagtggaaacgtgtaaagagcttgggatgcgtaaacccactccagttcaaactcactgcgtgccgaagatattagccggacgagacgttttagggcttgctcagactggtagtggtaaaactgctgcgtttgctctacctatacttcaccgccttgctgaagatccttatggagtcttcgcgcttgtagtgacgccgactagagagctagcgttccagctcgctgagcagtttaaggctttgggttcgtgtttgaatttgcgttgctctgtaattgtgggaggaatggatatgttgacgcaaactatgagcttggtttcacgacctcatatcgttattactactcctggaagaatcaaggttttgcttgaaaacaatcctgatgttcctccagttttctctagaaccaagttcttagtgctggacgaggcggatagagttcttgatgttggtttccaagacgagttacgcacaatctttcagtgtctgccaaagagtagacaaacattgttgttctctgctaccatgactagtaacttacaggctttgcttgaacattcttcaaacaaagcttatttctatgaagcctatgaagggttaaagactgttgacactcttacgcagcagttcattttcgaagacaaagatgccaaagagctgtatcttgtgcacatcctctcgcaaatggaagacaagggcattcgatcagccatgatttttgtctccacttgcagaacatgtcaaaggttaagtcttatgcttgacgagcttgaagtggaaaatatagctatgcattctctgaattctcagtctatgcgactatctgcactaagtaaattcaagtctgggaaagtaccgatattgcttgcgactgatgttgccagccgtggattggacattcctactgttgaccttgtcatcaattatgacattccgagagatcctagggattatgttcatcgtgttggacgtacagctagagctggtagaggaggactggctgtaagcattatcactgagaccgatgtgaaacttatccataaaatagaagaggaagttggaaaaaagatggaaccatacaacaaaaaagtaatcactgacagtttagaagtcacaaaggtctcaaaagccaaaagagtggcaatgatgaagatgctagataatggattcgaagacaaggttaaagaccggaggaaattgaaacggaaaacacttgcggataaagggttgcttaagaaacggggcaaaaggcagaaatcaacagaaaattga

SEQ ID NO: 81851 - protein, 491 aa, Arabidopsis thaliana
  peptide (1)..(491): Ceres Seq. ID no. 12661704
MEEPTPEEEGGITIMSKSRKNPKTVVNIQSQKLDSDQNTPQFEKFTNPNPSSDTTSATNFEGLGLAEWAVETCKELGMRKPTPVQTHCVPKILAGRDVLGLAQTGSGKTAAFALPILHRLAEDPYGVFALVVTPTRELAFQLAEQFKALGSCLNLRCSVIVGGMDMLTQTMSLVSRPHIVITTPGRIKVLLENNPDVPPVFSRTKFLVLDEADRVLDVGFQDELRTIFQCLPKSRQTLLFSATMTSNLQALLEHSSNKAYFYEAYEGLKTVDTLTQQFIFEDKDAKELYLVHILSQMEDKGIRSAMIFVSTCRTCQRLSLMLDELEVENIAMHSLNSQSMRLSALSKFKSGKVPILLATDVASRGLDIPTVDLVINYDIPRDPRDYVHRVGRTARAGRGGLAVSIITETDVKLIHKIEEEVGKKMEPYNKKVITDSLEVTKVSKAKRVAMMKMLDNGFEDKVKDRRKLKRKTLADKGLLKKRGKRQKSTEN

SEQ ID NO: 81852 - protein, 477 aa, Arabidopsis thaliana
  peptide (1)..(477): Ceres Seq. ID no. 12661705
MSKSRKNPKTVVNIQSQKLDSDQNTPQFEKFTNPNPSSDTTSATNFEGLGLAEWAVETCKELGMRKPTPVQTHCVPKILAGRDVLGLAQTGSGKTAAFALPILHRLAEDPYGVFALVVTPTRELAFQLAEQFKALGSCLNLRCSVIVGGMDMLTQTMSLVSRPHIVITTPGRIKVLLENNPDVPPVFSRTKFLVLDEADRVLDVGFQDELRTIFQCLPKSRQTLLFSATMTSNLQALLEHSSNKAYFYEAYEGLKTVDTLTQQFIFEDKDAKELYLVHILSQMEDKGIRSAMIFVSTCRTCQRLSLMLDELEVENIAMHSLNSQSMRLSALSKFKSGKVPILLATDVASRGLDIPTVDLVINYDIPRDPRDYVHRVGRTARAGRGGLAVSIITETDVKLIHKIEEEVGKKMEPYNKKVITDSLEVTKVSKAKRVAMMKMLDNGFEDKVKDRRKLKRKTLADKGLLKKRGKRQKSTEN

SEQ ID NO: 81853 - protein, 414 aa, Arabidopsis thaliana
  peptide (1)..(414): Ceres Seq. ID no. 12661706
MRKPTPVQTHCVPKILAGRDVLGLAQTGSGKTAAFALPILHRLAEDPYGVFALVVTPTRELAFQLAEQFKALGSCLNLRCSVIVGGMDMLTQTMSLVSRPHIVITTPGRIKVLLENNPDVPPVFSRTKFLVLDEADRVLDVGFQDELRTIFQCLPKSRQTLLFSATMTSNLQALLEHSSNKAYFYEAYEGLKTVDTLTQQFIFEDKDAKELYLVHILSQMEDKGIRSAMIFVSTCRTCQRLSLMLDELEVENIAMHSLNSQSMRLSALSKFKSGKVPILLATDVASRGLDIPTVDLVINYDIPRDPRDYVHRVGRTARAGRGGLAVSIITETDVKLIHKIEEEVGKKMEPYNKKVITDSLEVTKVSKAKRVAMMKMLDNGFEDKVKDRRKLKRKTLADKGLLKKRGKRQKSTEN

SEQ ID NO: 81854 - DNA, 1874 bp, Arabidopsis thaliana
  misc_feature (1)..(1874): Ceres Seq. ID no. 12661723
  misc_feature (1)..(1874): Ortholog of  Ceres SEQ ID NO 13585332 as cited in SEQ ID NO 60654
  misc_feature (1)..(1874): Ortholog of  Ceres SEQ ID NO 12614124 as cited in SEQ ID NO 68392
aaatatcgtagtgttcataacgaaacgagcacacaactcactaaacactcaaacaaaaatacaaacattaagatgatgatgaagattagctttaacacatgctttcaaatcttactaggatttatcgtcttcatcgcatcaatcactttactaggtcgaatattctcaaggccttccaaaaccaaagaccggtgtcgccagcttcctcctggccgaccaggatggcccatcctcggcaatctacccgaactaatcatgactcgtcctaggtccaaatatttccaccttgccatgaaagagctaaaaacggatatcgcatgtttcaactttgccggaacccacaccatcaccataaactccgacgagatcgctagagaagcttttagagagcgagacgcagatttggcagaccggcctcaactttccatcgtagagtccattggagacaattacaaaacaatgggaacctcatcgtacggtgaacatttcatgaagatgaaaaaagtgatcacaacggaaattatgtccgttaaaacgttgaatatgttggaagctgcgagaaccatcgaagcggataatctcattgcttacattcactcgatgtatcaacggtcggagacggtcgacgttagagaactttcgagagtttatggttacgcagtgaccatgagaatgttgtttggaaggagacatgtcacgaaagaaaacatgttttcggatgatgggagactaggaaaagccgaaaaacatcatcttgaggtgattttcaacactctaaactgtttgccaggttttagtcccgtggattacgtggaccgatggttaggtggttggaatattgatggtgaagaggagagagcgaaagtgaatgttaatcttgttcgtagttacaacaatcccataatagacgagagggtcgaaatttggagggaaaaaggtggtaaggctgctgtggaagattggcttgatacgttcattacgctaaaagatcaaaacggaaactacttggttacgccagacgaaatcaaagctcaatgcgtcgaattttgtatagcagcgatcgataatccggcaaataacatggagtggacacttggggaaatgttaaagaacccggagattcttagaaaagctctgaaggagttggatgaagtagttggaaaagacaggcttgtgcaagaatcagacatacgaaatctaaactacttaaaagcttgttgcagagaaacattcaggattcacccaagcgctcattatgtcccacctcatgttgcccgtcaagataccacccttgggggttattttattcccaaaggtagccacattcatgtatgccgccctgggctaggccggaaccctaaaatatggaaagatccattagcatacgaaccggagcgtcacctccaaggagacggaatcacaaaagaggttactctggtcgaaacagagatgcgttttgtctcatttagcactggtagacgtggctgcgtcggtgtcaaagtcgggacaattatgatggctatgatgttggctaggtttcttcaaggttttaactggaaactccatcgagatttcggaccgttaagcctcgaggaagatgatgcatcattgcttatggctaagcctcttcttttgtctgttgagccacgcttggcatcaaacctttatccaaaattccgtccttaaaaacaagacgccttgttttttctctgtgatgtgtttcgacgctttgtcgtttctgtattacttgacgtactgttgtttttagactatccattgcccgaaaacgctatattgttaaaatcgtgtgtcttgtttattcttttgtatctccgtaacttaatcatgaatatcaatcaataccatatgaggtt

SEQ ID NO: 81855 - protein, 561 aa, Arabidopsis thaliana
  peptide (1)..(561): Ceres Seq. ID no. 12661724
KYRSVHNETSTQLTKHSNKNTNIKMMMKISFNTCFQILLGFIVFIASITLLGRIFSRPSKTKDRCRQLPPGRPGWPILGNLPELIMTRPRSKYFHLAMKELKTDIACFNFAGTHTITINSDEIAREAFRERDADLADRPQLSIVESIGDNYKTMGTSSYGEHFMKMKKVITTEIMSVKTLNMLEAARTIEADNLIAYIHSMYQRSETVDVRELSRVYGYAVTMRMLFGRRHVTKENMFSDDGRLGKAEKHHLEVIFNTLNCLPGFSPVDYVDRWLGGWNIDGEEERAKVNVNLVRSYNNPIIDERVEIWREKGGKAAVEDWLDTFITLKDQNGNYLVTPDEIKAQCVEFCIAAIDNPANNMEWTLGEMLKNPEILRKALKELDEVVGKDRLVQESDIRNLNYLKACCRETFRIHPSAHYVPPHVARQDTTLGGYFIPKGSHIHVCRPGLGRNPKIWKDPLAYEPERHLQGDGITKEVTLVETEMRFVSFSTGRRGCVGVKVGTIMMAMMLARFLQGFNWKLHRDFGPLSLEEDDASLLMAKPLLLSVEPRLASNLYPKFRP

SEQ ID NO: 81856 - protein, 537 aa, Arabidopsis thaliana
  peptide (1)..(537): Ceres Seq. ID no. 12661725
MMMKISFNTCFQILLGFIVFIASITLLGRIFSRPSKTKDRCRQLPPGRPGWPILGNLPELIMTRPRSKYFHLAMKELKTDIACFNFAGTHTITINSDEIAREAFRERDADLADRPQLSIVESIGDNYKTMGTSSYGEHFMKMKKVITTEIMSVKTLNMLEAARTIEADNLIAYIHSMYQRSETVDVRELSRVYGYAVTMRMLFGRRHVTKENMFSDDGRLGKAEKHHLEVIFNTLNCLPGFSPVDYVDRWLGGWNIDGEEERAKVNVNLVRSYNNPIIDERVEIWREKGGKAAVEDWLDTFITLKDQNGNYLVTPDEIKAQCVEFCIAAIDNPANNMEWTLGEMLKNPEILRKALKELDEVVGKDRLVQESDIRNLNYLKACCRETFRIHPSAHYVPPHVARQDTTLGGYFIPKGSHIHVCRPGLGRNPKIWKDPLAYEPERHLQGDGITKEVTLVETEMRFVSFSTGRRGCVGVKVGTIMMAMMLARFLQGFNWKLHRDFGPLSLEEDDASLLMAKPLLLSVEPRLASNLYPKFRP

SEQ ID NO: 81857 - protein, 536 aa, Arabidopsis thaliana
  peptide (1)..(536): Ceres Seq. ID no. 12661726
MMKISFNTCFQILLGFIVFIASITLLGRIFSRPSKTKDRCRQLPPGRPGWPILGNLPELIMTRPRSKYFHLAMKELKTDIACFNFAGTHTITINSDEIAREAFRERDADLADRPQLSIVESIGDNYKTMGTSSYGEHFMKMKKVITTEIMSVKTLNMLEAARTIEADNLIAYIHSMYQRSETVDVRELSRVYGYAVTMRMLFGRRHVTKENMFSDDGRLGKAEKHHLEVIFNTLNCLPGFSPVDYVDRWLGGWNIDGEEERAKVNVNLVRSYNNPIIDERVEIWREKGGKAAVEDWLDTFITLKDQNGNYLVTPDEIKAQCVEFCIAAIDNPANNMEWTLGEMLKNPEILRKALKELDEVVGKDRLVQESDIRNLNYLKACCRETFRIHPSAHYVPPHVARQDTTLGGYFIPKGSHIHVCRPGLGRNPKIWKDPLAYEPERHLQGDGITKEVTLVETEMRFVSFSTGRRGCVGVKVGTIMMAMMLARFLQGFNWKLHRDFGPLSLEEDDASLLMAKPLLLSVEPRLASNLYPKFRP

SEQ ID NO: 81858 - DNA, 1146 bp, Arabidopsis thaliana
  misc_feature (1)..(1146): Ceres Seq. ID no. 12661730
  misc_feature (1)..(1146): Ortholog of  Ceres SEQ ID NO 13659759 as cited in SEQ ID NO 67663
atggcgaagaaagcacttttgataggaatcaactacccaggaaccgcggtggagttacgtggctgtgtcaacgacgtccaccggatgcagaaatgcctaatcgagctttacgggttcgccaacaaggacatcgtcataatgatagacacagacaaatcatgtatacaacctacgggcaagaatatctgcgacgaactggataatctcatcgcatcagggcaatctggcgattttctggtctttcattacagtggacatggcacgagaatccctcctgggatagaagactcagaagaccctacagggtttgacgagtgtatcactccgtgcgatatgaatctaataaaggaccagcaatttagagaaatggtgtcacgtgtaaaagaaggttgtcagttgacgataatctcggactcttgtcatagtggtggtctcatccaggaagtaaaggagcagatcggtgaaagccatatgaagccggtcgataaagttaaggagcagatcgaggaaagccatatgaagcagccaaaactcgggattgctagttacttccttaacattgtgatgaatttgttagcgacttgtggagtctcaaaatctcagagagaccgtggaggtggcgaagaaagctttagaggagagatagaattagagaaagacgaaacgcttgatataaaaacaagatatctacctttcgaaagctacttaagtcttctcaaggaacaaaccgggcaaaccaatatcgaacctgtgagaattagacagacacttctcaaattattcggtgaagacccaagcccgaatcgtcagagaggtttaagtgacctaggaaactgcgaggttgatgcaggtgattctggagcttcaagattgaatgccgttaccgacaatgggattctattaagtggatgtcaaacagatcagagatcagaggatgtttatgtgacaagaactggaaaagcttatggagcattcagtgatgcgattcagatgatattgtccgcgccgagaaaggataagaagaagattacgaacaaagaattggtttccgaagctagagtgtttctcaagaaacgggggtatagtcaacgaccaggcttgtattgtcatgaccgttttgttgataaaccatttatatgctactaa

SEQ ID NO: 81859 - protein, 381 aa, Arabidopsis thaliana
  peptide (1)..(381): Ceres Seq. ID no. 12661731
MAKKALLIGINYPGTAVELRGCVNDVHRMQKCLIELYGFANKDIVIMIDTDKSCIQPTGKNICDELDNLIASGQSGDFLVFHYSGHGTRIPPGIEDSEDPTGFDECITPCDMNLIKDQQFREMVSRVKEGCQLTIISDSCHSGGLIQEVKEQIGESHMKPVDKVKEQIEESHMKQPKLGIASYFLNIVMNLLATCGVSKSQRDRGGGEESFRGEIELEKDETLDIKTRYLPFESYLSLLKEQTGQTNIEPVRIRQTLLKLFGEDPSPNRQRGLSDLGNCEVDAGDSGASRLNAVTDNGILLSGCQTDQRSEDVYVTRTGKAYGAFSDAIQMILSAPRKDKKKITNKELVSEARVFLKKRGYSQRPGLYCHDRFVDKPFICY

SEQ ID NO: 81860 - protein, 353 aa, Arabidopsis thaliana
  peptide (1)..(353): Ceres Seq. ID no. 12661732
MQKCLIELYGFANKDIVIMIDTDKSCIQPTGKNICDELDNLIASGQSGDFLVFHYSGHGTRIPPGIEDSEDPTGFDECITPCDMNLIKDQQFREMVSRVKEGCQLTIISDSCHSGGLIQEVKEQIGESHMKPVDKVKEQIEESHMKQPKLGIASYFLNIVMNLLATCGVSKSQRDRGGGEESFRGEIELEKDETLDIKTRYLPFESYLSLLKEQTGQTNIEPVRIRQTLLKLFGEDPSPNRQRGLSDLGNCEVDAGDSGASRLNAVTDNGILLSGCQTDQRSEDVYVTRTGKAYGAFSDAIQMILSAPRKDKKKITNKELVSEARVFLKKRGYSQRPGLYCHDRFVDKPFICY

SEQ ID NO: 81861 - protein, 335 aa, Arabidopsis thaliana
  peptide (1)..(335): Ceres Seq. ID no. 12661733
MIDTDKSCIQPTGKNICDELDNLIASGQSGDFLVFHYSGHGTRIPPGIEDSEDPTGFDECITPCDMNLIKDQQFREMVSRVKEGCQLTIISDSCHSGGLIQEVKEQIGESHMKPVDKVKEQIEESHMKQPKLGIASYFLNIVMNLLATCGVSKSQRDRGGGEESFRGEIELEKDETLDIKTRYLPFESYLSLLKEQTGQTNIEPVRIRQTLLKLFGEDPSPNRQRGLSDLGNCEVDAGDSGASRLNAVTDNGILLSGCQTDQRSEDVYVTRTGKAYGAFSDAIQMILSAPRKDKKKITNKELVSEARVFLKKRGYSQRPGLYCHDRFVDKPFICY

SEQ ID NO: 81862 - DNA, 495 bp, Arabidopsis thaliana
  misc_feature (1)..(495): Ceres Seq. ID no. 12661785
  misc_feature (1)..(495): Ortholog of  Ceres SEQ ID NO 13595187 as cited in SEQ ID NO 56052
  misc_feature (1)..(495): Ortholog of  Ceres SEQ ID NO 13662053 as cited in SEQ ID NO 61547
  misc_feature (1)..(495): Ortholog of  Ceres SEQ ID NO 13624283 as cited in SEQ ID NO 0
atgacgagtacaaacacgagaaacaaaggcaaatgcatagtagaaggaccaccaccgactctaagccgttatgagtcacaaaaaagccgcgactggaacacgttttgccagtatctcatgaccaagatgccaccagttcacgtatgggagtgtgaatcaaaccacatcctcgatttcctccaaagtcgtgaccagtttggtaaaacaaaagttcatatccaaggatgcgttttcttcggacagaaagagccaccaggagagtgtaactgcccgttgaaacaggcgtggggaagcttagatgctttgatcggacggctgagagcagcttacgaggagaacggtggcttaacggagaaaaacccgtttgcccggggagggattaggatttttctgagggaagtgagaggttcacaggcgaaggcgagaggagttttgtacaaaaaaaagaagcgtcttgtagttgttggtacgggaactagtactacttggacttaa

SEQ ID NO: 81863 - protein, 164 aa, Arabidopsis thaliana
  peptide (1)..(164): Ceres Seq. ID no. 12661786
MTSTNTRNKGKCIVEGPPPTLSRYESQKSRDWNTFCQYLMTKMPPVHVWECESNHILDFLQSRDQFGKTKVHIQGCVFFGQKEPPGECNCPLKQAWGSLDALIGRLRAAYEENGGLTEKNPFARGGIRIFLREVRGSQAKARGVLYKKKKRLVVVGTGTSTTWT

SEQ ID NO: 81864 - protein, 125 aa, Arabidopsis thaliana
  peptide (1)..(125): Ceres Seq. ID no. 12661787
MTKMPPVHVWECESNHILDFLQSRDQFGKTKVHIQGCVFFGQKEPPGECNCPLKQAWGSLDALIGRLRAAYEENGGLTEKNPFARGGIRIFLREVRGSQAKARGVLYKKKKRLVVVGTGTSTTWT

SEQ ID NO: 81865 - protein, 122 aa, Arabidopsis thaliana
  peptide (1)..(122): Ceres Seq. ID no. 12661788
MPPVHVWECESNHILDFLQSRDQFGKTKVHIQGCVFFGQKEPPGECNCPLKQAWGSLDALIGRLRAAYEENGGLTEKNPFARGGIRIFLREVRGSQAKARGVLYKKKKRLVVVGTGTSTTWT

SEQ ID NO: 81866 - DNA, 657 bp, Arabidopsis thaliana
  misc_feature (1)..(657): Ceres Seq. ID no. 12661824
  misc_feature (1)..(657): Ortholog of  Ceres SEQ ID NO 14304209 as cited in SEQ ID NO 56460
  misc_feature (1)..(657): Ortholog of  Ceres SEQ ID NO 12615635 as cited in SEQ ID NO 63133
  misc_feature (1)..(657): Ortholog of  Ceres SEQ ID NO 12586351 as cited in SEQ ID NO 64028
  misc_feature (1)..(657): Ortholog of  Ceres SEQ ID NO 15177482 as cited in SEQ ID NO 0
atggcagatgaggtgattcttctggatttctgggcgagtatgtttgggatgaggacaagaattgctctggcggagaaaagagttaagtacgatcacagagaagaagatctatggaataagagctccttgctcctcgagatgaacccggttcataagaaaattccggttctcatccacaatggtaaaccggtatgtgaatctctcattcagatcgagtacatagacgagacttggcccgacaataaccctctccttccctccgatccttacaagagagctcatgccaaattctgggccgacttcatcgacaaaaaggtgaatgttacggcgagaaggatttgggcggtcaaaggtgaggagcaagaagcagccaaggagttaatcgaaatactcaagacgctagagtctgagcttggagacaaaaagtactttggagacgaaacttttgggtatgtagatatagctctcattggattccatagctggtttgcagtgtacgagaagtttggaaatgtcagtatcgaatctgagtgttcgaaattggttgcgtgggccaaaaggtgtttggagagagagagcgtcgctaaagccctgcctgagtcagagaaggtcattacattcatttccgaacgtaggaagaaacttgggttggagtaa

SEQ ID NO: 81867 - protein, 218 aa, Arabidopsis thaliana
  peptide (1)..(218): Ceres Seq. ID no. 12661825
MADEVILLDFWASMFGMRTRIALAEKRVKYDHREEDLWNKSSLLLEMNPVHKKIPVLIHNGKPVCESLIQIEYIDETWPDNNPLLPSDPYKRAHAKFWADFIDKKVNVTARRIWAVKGEEQEAAKELIEILKTLESELGDKKYFGDETFGYVDIALIGFHSWFAVYEKFGNVSIESECSKLVAWAKRCLERESVAKALPESEKVITFISERRKKLGLE

SEQ ID NO: 81868 - protein, 205 aa, Arabidopsis thaliana
  peptide (1)..(205): Ceres Seq. ID no. 12661826
MFGMRTRIALAEKRVKYDHREEDLWNKSSLLLEMNPVHKKIPVLIHNGKPVCESLIQIEYIDETWPDNNPLLPSDPYKRAHAKFWADFIDKKVNVTARRIWAVKGEEQEAAKELIEILKTLESELGDKKYFGDETFGYVDIALIGFHSWFAVYEKFGNVSIESECSKLVAWAKRCLERESVAKALPESEKVITFISERRKKLGLE

SEQ ID NO: 81869 - protein, 202 aa, Arabidopsis thaliana
  peptide (1)..(202): Ceres Seq. ID no. 12661827
MRTRIALAEKRVKYDHREEDLWNKSSLLLEMNPVHKKIPVLIHNGKPVCESLIQIEYIDETWPDNNPLLPSDPYKRAHAKFWADFIDKKVNVTARRIWAVKGEEQEAAKELIEILKTLESELGDKKYFGDETFGYVDIALIGFHSWFAVYEKFGNVSIESECSKLVAWAKRCLERESVAKALPESEKVITFISERRKKLGLE

SEQ ID NO: 81870 - DNA, 2765 bp, Arabidopsis thaliana
  misc_feature (1)..(2765): Ceres Seq. ID no. 12661860
  misc_feature (1)..(2765): Ortholog of  Ceres SEQ ID NO 13597957 as cited in SEQ ID NO 60744
acgctctaatttactcgtctgctcggctgtttctctgtattggctgattcgaaatccggggtcaaaccgggtctgagctatctccaggttcggaatttacagattttatctggtctgatgggatcagagcctcggttcgagccgaggccggaactgattgacttgcctgttcttcagaaattcaagctctacgctactccctcgaatttttatttgattggaagagatgagaacaaaagctttaggaggattcttaagattgatagaagggaccaaaatgagttaaatttatttgaagatcctacaaggtatacaaaagacgaaatgcgcgaacttaaaagacggatgattgtagggaacgaggagtctggtggctttaaagcaatcacaacttgctatggaatcattgggtttgtgagattcttggagccttattatatgctgctgataacaaaacgaaagaaagtgggtgagatctgtggccatacagtttatggtatagcagagagtcaaatgatcgcgattccacatccttcaattcaatcaaaagtggctaagtctgaagccgagctgaggtacaagaagctcttaagcgtggtggatcttagcaaaaacttctacttcagctacacatatcacctcatgtattcccttcagaagaacataggcaacactgagagaggaaaccctcatgacaacacaatgttcgtgtggaactccttcttaacacgcgagatcagaaagatcctgcagaattccatatggacagttgcattgatatacggattctttcaacagactaaatgttcagtatctggtgaaaaatttgtattcactatcattgctcggcgttcacggcattatgctggtacaagatatttaaggcgtggtgtaaatgatataggcagggtagccaatgatgttgagacagagcagattgtttccaaagtggttcctgcgggtcagaaaatcccgataacatcagttgtgcaggttcgaggctccatacccctattttggtcacaggaggcatctgttttcaacccacagcccgagattatattgaataagaaggacgcaaattatgaggctacccaacaccactttcagaatctgagacagaggtatgggaaccggataataattctcaacctcctaaagactgtgacaggtgagaaaaagcaccgagaaaccatcttaaggggagagtttgcaaagacaatccgatttattaacaaaggcatggacagggagcatcgtttaaaggcaatccattttgatctaagcaaacactacaaaaaaggagctgatggtgcattcaaccacttgtgtatcttttcaaggaaatcattggaactaactgacctgttttactgtaaagctccttcaggtgtaggagctgaagaagtaatttatgattcatttttcaataaccctattccaagtcaagatgaagaggcaagtagtccagaaaaagaagatatgaaggcggatatatttctgcttcaaaatggggtcttgaggacaaactgcatagactgtttagatcgcactaattttgcgcagtacgcccacggattggtttctctcgggcatcagctgcgtacattaggtatctcaggacctcctgtcgtcgatcttaataatcctctggcaatagaactgatggacgcttaccaaaagatgggtaatacacttgcgatgcagtatggtggctcggaagcacacagcaagatgttctgtgatctgagaggtaattggaatatggtgatgaggcagcgtgatatcttcacagctgtacgtcgttactacagtaacgcgtatcaggacagtgataagcaaaacgccatcaatgtgttcttgggtcatttccggcctcgactggggaggccagcgctatgggagttggattctgaccagcacaacatcggaagatctggttctaacttagatatcgaaaatatgaggccactaattagaagatcattttccgataacattattatggactgtgatttgaatctggaggagctggtacgcgaaaattctcagcctacatatgaagggttaaacgggggtgtctcaggaaccaatttagaatttccattctatgaaactgaaccagcttctctaagcttcctctcggttatgcgcaatgaagagcttatgagagaaacagggtcagggcagatgtttcaaggcagttcctctaattctgattcccacaggcccaatgatatacctggtttttcacactcatacgtaactaagttcacgccggcagaagacatatttgaacgtggcagctcaaagtctgtttcgtcagataacttgttcaccgaccgggatgaatccgtcacttctttaactaatacgaactccagttttgagtttcctataatgggtggttccgatttactacctggtttctcaaatgctttcgctcggtgggtattctccgcaagagcatggtaaagagggtctggagaaagaaatgagccttgcacaggaaggtaacggtggttacttggcaggtacggcagggttgaacagagtcgtaataacaggaaaagcacagaataacagttacatcttgtaaatatccgactcatacctttgtaaagatccacgtttcttgttttcttttttttttctttctttctttctattcttagcaaaatagatttcattcttgttttttcaccaccacccacaaagtttgattctgtttttctgtttttggtatatatagagggtttggtttg

SEQ ID NO: 81871 - protein, 785 aa, Arabidopsis thaliana
  peptide (1)..(785): Ceres Seq. ID no. 12661861
MGSEPRFEPRPELIDLPVLQKFKLYATPSNFYLIGRDENKSFRRILKIDRRDQNELNLFEDPTRYTKDEMRELKRRMIVGNEESGGFKAITTCYGIIGFVRFLEPYYMLLITKRKKVGEICGHTVYGIAESQMIAIPHPSIQSKVAKSEAELRYKKLLSVVDLSKNFYFSYTYHLMYSLQKNIGNTERGNPHDNTMFVWNSFLTREIRKILQNSIWTVALIYGFFQQTKCSVSGEKFVFTIIARRSRHYAGTRYLRRGVNDIGRVANDVETEQIVSKVVPAGQKIPITSVVQVRGSIPLFWSQEASVFNPQPEIILNKKDANYEATQHHFQNLRQRYGNRIIILNLLKTVTGEKKHRETILRGEFAKTIRFINKGMDREHRLKAIHFDLSKHYKKGADGAFNHLCIFSRKSLELTDLFYCKAPSGVGAEEVIYDSFFNNPIPSQDEEASSPEKEDMKADIFLLQNGVLRTNCIDCLDRTNFAQYAHGLVSLGHQLRTLGISGPPVVDLNNPLAIELMDAYQKMGNTLAMQYGGSEAHSKMFCDLRGNWNMVMRQRDIFTAVRRYYSNAYQDSDKQNAINVFLGHFRPRLGRPALWELDSDQHNIGRSGSNLDIENMRPLIRRSFSDNIIMDCDLNLEELVRENSQPTYEGLNGGVSGTNLEFPFYETEPASLSFLSVMRNEELMRETGSGQMFQGSSSNSDSHRPNDIPGFSHSYVTKFTPAEDIFERGSSKSVSSDNLFTDRDESVTSLTNTNSSFEFPIMGGSDLLPGFSNAFARWVFSARAW

SEQ ID NO: 81872 - protein, 716 aa, Arabidopsis thaliana
  peptide (1)..(716): Ceres Seq. ID no. 12661862
MRELKRRMIVGNEESGGFKAITTCYGIIGFVRFLEPYYMLLITKRKKVGEICGHTVYGIAESQMIAIPHPSIQSKVAKSEAELRYKKLLSVVDLSKNFYFSYTYHLMYSLQKNIGNTERGNPHDNTMFVWNSFLTREIRKILQNSIWTVALIYGFFQQTKCSVSGEKFVFTIIARRSRHYAGTRYLRRGVNDIGRVANDVETEQIVSKVVPAGQKIPITSVVQVRGSIPLFWSQEASVFNPQPEIILNKKDANYEATQHHFQNLRQRYGNRIIILNLLKTVTGEKKHRETILRGEFAKTIRFINKGMDREHRLKAIHFDLSKHYKKGADGAFNHLCIFSRKSLELTDLFYCKAPSGVGAEEVIYDSFFNNPIPSQDEEASSPEKEDMKADIFLLQNGVLRTNCIDCLDRTNFAQYAHGLVSLGHQLRTLGISGPPVVDLNNPLAIELMDAYQKMGNTLAMQYGGSEAHSKMFCDLRGNWNMVMRQRDIFTAVRRYYSNAYQDSDKQNAINVFLGHFRPRLGRPALWELDSDQHNIGRSGSNLDIENMRPLIRRSFSDNIIMDCDLNLEELVRENSQPTYEGLNGGVSGTNLEFPFYETEPASLSFLSVMRNEELMRETGSGQMFQGSSSNSDSHRPNDIPGFSHSYVTKFTPAEDIFERGSSKSVSSDNLFTDRDESVTSLTNTNSSFEFPIMGGSDLLPGFSNAFARWVFSARAW

SEQ ID NO: 81873 - protein, 709 aa, Arabidopsis thaliana
  peptide (1)..(709): Ceres Seq. ID no. 12661863
MIVGNEESGGFKAITTCYGIIGFVRFLEPYYMLLITKRKKVGEICGHTVYGIAESQMIAIPHPSIQSKVAKSEAELRYKKLLSVVDLSKNFYFSYTYHLMYSLQKNIGNTERGNPHDNTMFVWNSFLTREIRKILQNSIWTVALIYGFFQQTKCSVSGEKFVFTIIARRSRHYAGTRYLRRGVNDIGRVANDVETEQIVSKVVPAGQKIPITSVVQVRGSIPLFWSQEASVFNPQPEIILNKKDANYEATQHHFQNLRQRYGNRIIILNLLKTVTGEKKHRETILRGEFAKTIRFINKGMDREHRLKAIHFDLSKHYKKGADGAFNHLCIFSRKSLELTDLFYCKAPSGVGAEEVIYDSFFNNPIPSQDEEASSPEKEDMKADIFLLQNGVLRTNCIDCLDRTNFAQYAHGLVSLGHQLRTLGISGPPVVDLNNPLAIELMDAYQKMGNTLAMQYGGSEAHSKMFCDLRGNWNMVMRQRDIFTAVRRYYSNAYQDSDKQNAINVFLGHFRPRLGRPALWELDSDQHNIGRSGSNLDIENMRPLIRRSFSDNIIMDCDLNLEELVRENSQPTYEGLNGGVSGTNLEFPFYETEPASLSFLSVMRNEELMRETGSGQMFQGSSSNSDSHRPNDIPGFSHSYVTKFTPAEDIFERGSSKSVSSDNLFTDRDESVTSLTNTNSSFEFPIMGGSDLLPGFSNAFARWVFSARAW

SEQ ID NO: 81874 - DNA, 2957 bp, Arabidopsis thaliana
  misc_feature (1)..(2957): Ceres Seq. ID no. 12661867
  misc_feature (1)..(2957): Ortholog of  Ceres SEQ ID NO 15176051 as cited in SEQ ID NO 53434
  misc_feature (1)..(2957): Ortholog of  Ceres SEQ ID NO 15170306 as cited in SEQ ID NO 58219
  misc_feature (1)..(2957): Ortholog of  Ceres SEQ ID NO 12465091 as cited in SEQ ID NO 65947
aattaaccagaacgttcatctaccaacaaatcctcaactccttcttcttcactaatagtataccacaaaacctcaaaattgtaatttattagattatcgtgatggccttagctaaagagttaatgggttatcctctcatcacagaaaggtcatcacttgtctcgtcggcgtcgcatttcaagaagaggacacagtcaacacagttctcgatcaacccttttgaccggagaccaagaaaaaccaaatccggcgtcgttgcagccatcagcgaggatttggtcaaaacgctgcgtttttccacaacgaccggagacagaaagagcgaagaggaggagaaagcggcggtgaagttcaaggtgagagctgtggttactgtgaggaacaagaacaaggaggatttgaaagagactcttgttaagcatttggatgcttttgctgataaaattggtcgaaacattgtcttggagcttatcagcacccaacttgatccaaaaacgaagttgccgaagaaaagcaatgcagcagttttaaaggattggtcaaagaaatcgaaaactaaggcggagagagttcactatacggcggagttcacggtggatgcagcgtttggctcgccgggagcaatcaccgtcatgaataaacaccaaaaagagtttttcttggagagcataaccattgaaggcttcgcacttggtcctgttcactttccatgcaattcttgggttcagtctcaaaaagatcaccctgataaacgaattttcttcactaatcagccgtatttgccgaatgagacaccaagcggattaagagtattgagggagaaagagttgaagaatctacgaggagatggaagtggagtgagaaaattatcagacagaatttacgactttgatgtttacaacgaccttggaaatcccgacaaatcatccgagctctctcgccccaaactcggtggcaaagaggttccttaccctagacgttgtcgtactggtcgccaatcaacagtttctgataaagacgcggagagccgagtagagaagccattacctatgtatgtgccacgagacgagcaatttgaagagtcgaagcaggacacttttgctgcagggaggctaaaagcagtcttacaccacctaattccgtcgctcaaagccagtattgtagctgaggactttgcagacttcggcgagatcgatcgtctttataaagaaggcttgttactcaagttagggtttcaagatgacatctttaagaagtttcctctccctaaggtcgtagttgataccctccaagaatctactaaaggactcctcaaatacgacactcccaaaatattatcgaaggataaaaacgcatggttaagagatgacgaattcgcacgtcaagccatagctggaatcaatccagtgaacattgagagagtcaagacttttccaccggtcagcaatcttgaccccaagatctacggtccacaacactccgctcttactgacgaccatatcattggtcacctcgacggattctccgtacaacaagcgttggaagagaatagattgtatatgttggattaccatgacatattcttaccgttcctagaccggattaatgcgctagacggacgcaaagcctatgctactcgaactatcttcttcttgactcgtctaggcacacttaagccggtagccattgagctaagcctccctccccatggtccaaaacatcggtccaagcgtgtgcttacacctccagtcgatgcaacctctaattggatgtggcagctcgctaaagcccacgttagttctaacgatgctggtgtccatcagcttgtcaatcactggttacggacacatgcatgcttggagccatttatattagctgcacacaggcaattgagcgctatgcatcccatattcaagctactggatccacacatgagatacacgttggaaatcaatgctttggctagacaatcgttgatcagtgcagatggtgtgatcgaaggaggcttcactgctggtgcatacggcatggaaatgagtgccgccgcatacaaaagcagctggcggttcgacatggaaggcctccctgccgatctaattcgcagaggaatggcaattcctgatgcaacacaaccacatggtcttaaactcctaatcgaagactatccgtacgccaacgacggtcttttactctggtcagcaatccaaacctgggtccgaacctatgttgaacgctactatccaaacccgaaccttatcaaaacagactctgagctccaatcttggtactcagaatcaatcaacgtcggccacgctgacctccgcgacgctgattggtggccggagttatcaaccgtcgacgacctcgtgtcgattctaaccactctaatctggctcgcctctgctcaacacgccgctctaaactttggacaatacccttacggtggctacgtcccaaaccgaccaccgttgatgcggcggttaatccccgacgagtcggatccagagtacgcgagtttcatctcccatccggagaagtattacttctcgtcgatgccaagtttggcgcagacttcgaagtttatggccgtggttgatactttgtcgacgcattcgccggatgaggagtatattggagagagacaacagccgtcgatttggacaggagatgcggagattgttgaagcgttttatggatttgcggcagagatcggacggatagagaaagagattgagaaaaggaacgctgatcctgaccgtagaaataggtgtggggctggtgttttgccttatgagttgttggttccgagttctgagcctggtgttacgtgtagaggtgtacctaatagtgtatctatataattaagaaggaaattatttataagaagtaaatgtagaaaacacataaataatttcttgtaaaccatgatatataatatataaagataattttcgtaa

SEQ ID NO: 81875 - protein, 919 aa, Arabidopsis thaliana
  peptide (1)..(919): Ceres Seq. ID no. 12661868
MALAKELMGYPLITERSSLVSSASHFKKRTQSTQFSINPFDRRPRKTKSGVVAAISEDLVKTLRFSTTTGDRKSEEEEKAAVKFKVRAVVTVRNKNKEDLKETLVKHLDAFADKIGRNIVLELISTQLDPKTKLPKKSNAAVLKDWSKKSKTKAERVHYTAEFTVDAAFGSPGAITVMNKHQKEFFLESITIEGFALGPVHFPCNSWVQSQKDHPDKRIFFTNQPYLPNETPSGLRVLREKELKNLRGDGSGVRKLSDRIYDFDVYNDLGNPDKSSELSRPKLGGKEVPYPRRCRTGRQSTVSDKDAESRVEKPLPMYVPRDEQFEESKQDTFAAGRLKAVLHHLIPSLKASIVAEDFADFGEIDRLYKEGLLLKLGFQDDIFKKFPLPKVVVDTLQESTKGLLKYDTPKILSKDKNAWLRDDEFARQAIAGINPVNIERVKTFPPVSNLDPKIYGPQHSALTDDHIIGHLDGFSVQQALEENRLYMLDYHDIFLPFLDRINALDGRKAYATRTIFFLTRLGTLKPVAIELSLPPHGPKHRSKRVLTPPVDATSNWMWQLAKAHVSSNDAGVHQLVNHWLRTHACLEPFILAAHRQLSAMHPIFKLLDPHMRYTLEINALARQSLISADGVIEGGFTAGAYGMEMSAAAYKSSWRFDMEGLPADLIRRGMAIPDATQPHGLKLLIEDYPYANDGLLLWSAIQTWVRTYVERYYPNPNLIKTDSELQSWYSESINVGHADLRDADWWPELSTVDDLVSILTTLIWLASAQHAALNFGQYPYGGYVPNRPPLMRRLIPDESDPEYASFISHPEKYYFSSMPSLAQTSKFMAVVDTLSTHSPDEEYIGERQQPSIWTGDAEIVEAFYGFAAEIGRIEKEIEKRNADPDRRNRCGAGVLPYELLVPSSEPGVTCRGVPNSVSI

SEQ ID NO: 81876 - protein, 912 aa, Arabidopsis thaliana
  peptide (1)..(912): Ceres Seq. ID no. 12661869
MGYPLITERSSLVSSASHFKKRTQSTQFSINPFDRRPRKTKSGVVAAISEDLVKTLRFSTTTGDRKSEEEEKAAVKFKVRAVVTVRNKNKEDLKETLVKHLDAFADKIGRNIVLELISTQLDPKTKLPKKSNAAVLKDWSKKSKTKAERVHYTAEFTVDAAFGSPGAITVMNKHQKEFFLESITIEGFALGPVHFPCNSWVQSQKDHPDKRIFFTNQPYLPNETPSGLRVLREKELKNLRGDGSGVRKLSDRIYDFDVYNDLGNPDKSSELSRPKLGGKEVPYPRRCRTGRQSTVSDKDAESRVEKPLPMYVPRDEQFEESKQDTFAAGRLKAVLHHLIPSLKASIVAEDFADFGEIDRLYKEGLLLKLGFQDDIFKKFPLPKVVVDTLQESTKGLLKYDTPKILSKDKNAWLRDDEFARQAIAGINPVNIERVKTFPPVSNLDPKIYGPQHSALTDDHIIGHLDGFSVQQALEENRLYMLDYHDIFLPFLDRINALDGRKAYATRTIFFLTRLGTLKPVAIELSLPPHGPKHRSKRVLTPPVDATSNWMWQLAKAHVSSNDAGVHQLVNHWLRTHACLEPFILAAHRQLSAMHPIFKLLDPHMRYTLEINALARQSLISADGVIEGGFTAGAYGMEMSAAAYKSSWRFDMEGLPADLIRRGMAIPDATQPHGLKLLIEDYPYANDGLLLWSAIQTWVRTYVERYYPNPNLIKTDSELQSWYSESINVGHADLRDADWWPELSTVDDLVSILTTLIWLASAQHAALNFGQYPYGGYVPNRPPLMRRLIPDESDPEYASFISHPEKYYFSSMPSLAQTSKFMAVVDTLSTHSPDEEYIGERQQPSIWTGDAEIVEAFYGFAAEIGRIEKEIEKRNADPDRRNRCGAGVLPYELLVPSSEPGVTCRGVPNSVSI

SEQ ID NO: 81877 - protein, 742 aa, Arabidopsis thaliana
  peptide (1)..(742): Ceres Seq. ID no. 12661870
MNKHQKEFFLESITIEGFALGPVHFPCNSWVQSQKDHPDKRIFFTNQPYLPNETPSGLRVLREKELKNLRGDGSGVRKLSDRIYDFDVYNDLGNPDKSSELSRPKLGGKEVPYPRRCRTGRQSTVSDKDAESRVEKPLPMYVPRDEQFEESKQDTFAAGRLKAVLHHLIPSLKASIVAEDFADFGEIDRLYKEGLLLKLGFQDDIFKKFPLPKVVVDTLQESTKGLLKYDTPKILSKDKNAWLRDDEFARQAIAGINPVNIERVKTFPPVSNLDPKIYGPQHSALTDDHIIGHLDGFSVQQALEENRLYMLDYHDIFLPFLDRINALDGRKAYATRTIFFLTRLGTLKPVAIELSLPPHGPKHRSKRVLTPPVDATSNWMWQLAKAHVSSNDAGVHQLVNHWLRTHACLEPFILAAHRQLSAMHPIFKLLDPHMRYTLEINALARQSLISADGVIEGGFTAGAYGMEMSAAAYKSSWRFDMEGLPADLIRRGMAIPDATQPHGLKLLIEDYPYANDGLLLWSAIQTWVRTYVERYYPNPNLIKTDSELQSWYSESINVGHADLRDADWWPELSTVDDLVSILTTLIWLASAQHAALNFGQYPYGGYVPNRPPLMRRLIPDESDPEYASFISHPEKYYFSSMPSLAQTSKFMAVVDTLSTHSPDEEYIGERQQPSIWTGDAEIVEAFYGFAAEIGRIEKEIEKRNADPDRRNRCGAGVLPYELLVPSSEPGVTCRGVPNSVSI

SEQ ID NO: 81878 - DNA, 827 bp, Arabidopsis thaliana
  misc_feature (1)..(827): Ceres Seq. ID no. 12661875
  misc_feature (1)..(827): Ortholog of  Ceres SEQ ID NO 13582073 as cited in SEQ ID NO 56218
attctgtaccacatcataagctggaggttctctgactccgtcgtctctttctccgtcgccaccgttcctaaaacgtctcccgtcttcttctaatggcgatcaatcgtagctccgatcatgaatccgacgaaaacacccgtctttaccatccttaccagaactaccaggtcccgatcaaatctcagtatctatacaagcttccgacttctccggaatttctattcacggaagagtctctcaagcagcgtcgatcatggggagaaaatctcactttctacacagggacgggttatctagccggctctgtagccggtgcttcagctgggatcttctctggtatcaagagtttcgaaaatggagacacgacgaagctgaaaatcaacaggattttgaattcgtctggtcaggcaggtcgtacttggggtaatagggttgggattgttgggttgatctacgcagggattgagagtggtgtggtggcggtaactgataaggacgatgtttggaccagtgttgtcgctggtctgggaactggagcggtctttagggcagcacgaggagtgagatctgcggctgtggctggtgcttttggcggaattgcggctggtgcagttgtggcggggaagcaggttttcaagcggtatgctcacatatgaagaaccggagtgatctttagagcccacctatatgggaaaatcataaaaatcaaagctttttcgggtttctagggtagaattctggtttacattttagcgtatgttaacctgcgaacctttctttatagatataataataacaataataaaggttttaccttttgatattcg

SEQ ID NO: 81879 - protein, 187 aa, Arabidopsis thaliana
  peptide (1)..(187): Ceres Seq. ID no. 12661876
MAINRSSDHESDENTRLYHPYQNYQVPIKSQYLYKLPTSPEFLFTEESLKQRRSWGENLTFYTGTGYLAGSVAGASAGIFSGIKSFENGDTTKLKINRILNSSGQAGRTWGNRVGIVGLIYAGIESGVVAVTDKDDVWTSVVAGLGTGAVFRAARGVRSAAVAGAFGGIAAGAVVAGKQVFKRYAHI

SEQ ID NO: 81880 - DNA, 2196 bp, Arabidopsis thaliana
  misc_feature (1)..(2196): Ceres Seq. ID no. 12661889
  misc_feature (1)..(2196): Ortholog of  Ceres SEQ ID NO 12586556 as cited in SEQ ID NO 64667
  misc_feature (1)..(2196): Ortholog of  Ceres SEQ ID NO 13660894 as cited in SEQ ID NO 67475
atggttcacgcttctctttggcaatttcgccttcaaattatcccttggcgtcttcgtaatttttgcttcctcacttctcaatgtccatacacatcgatttcttctcccgacaccgtttcagtttcctcgtactactcccttacgtctaacaatgatcaatccctcttccattacttcgatcatcttcttggattatgcctgacagctcagcaatgcaggcaagttcatgcccaagtacttctatccgatttcatcttccgttctgggtcattagctgcgaatctcatatcggtttacgctcggttaggactccttctcgatgcccgtaacgttttcgagactgtttctcttgttttgttgtcggatttgcgtttgtggaactcgattctaaaagctaatgtgtcacatgggttatacgagaatgctcttgagctttacaggggaatgcgtcaacgaggtctcacaggggacggatatattttgcccttgatccttcgtgcttgtaggtacttaggtcgttttggtttgtgtcgggcttttcatactcaagttattcagattggtttgaaagagaatcttcatgtggttaatgagttgcttacgttgtatccaaaggcgggaaggatgggagatgcttacaatctgtttgttgaaatgcctgtgagaaaccgtatgtcatggaatgtcatgattaaagggttttctcaagagtatgattgtgaaagtgctgttaagatttttgaatggatgcaacgtgaagagtttaaaccagatgaagtgacttggacttcggttttgtcttgtcattcgcagtgtgggaagtttgaagatgttttaaagtattttcatcttatgaggatgagtggaaatgcagttagtggtgaagctcttgctgttttcttttctgtatgtgctgaattagaagcattaagtattgctgagaaagttcatgggtatgttataaaaggtggatttgaagagtatttgccctcgaggaacgcattgatacacgtatacgggaagcaagggaaagttaaagatgcagaacacttgttccggcaaataagaaacaaaggtatagagagctggaattctttgataacatcgtttgtggatgctggtaaactcgacgaggctctttcattgttttctgagttggaggaaatgaatcatgtttgtaacgtaaaggctaatgtagttacatggacctctgttattaagggttgtaatgtccaaggaagaggagacgattcacttgaatatttccggcaaatgcagttttccaaagtattggctaattcagtgacaatttgttgtatactatcaatttgtgcggagcttccagctttgaatctcggaagagagatccatgggcatgtgatacggacctcgatgagcgagaacattctggttcagaatgcattggtgaatatgtacgcaaaatgtgggttactcagtgaggggagtctagtatttgaagcaattagggataaggatttgatctcatggaactcgataatcaaaggttatggtatgcatgggtttgctgagaaagctctaagtatgttcgatcgaatgataagttctgggtttcatcctgatgggatcgctttggtagctgttctttcagcctgtagtcatgcagggctggttgaaaagggacgcgaaattttctattccatgagcaagagatttggattagagccccaacaagagcactatgcatgtattgttgatctccttggtcgtgtaggctttctgaaagaagcgagtgagattgtgaagaacatgcctatggagcccaaggtctgtgtgttgggagctctgttgaattcttgccggatgcataaaaacgtggacattgcagagggtatagcatcacaacttagtgttcttgaaccggagaggacaggaagctatatgttgctttccaacatctactctgctggtggaagatgggaagaatctgcaaatgtaagggctttagccaagaaaaaggatttgaagaaagtttctggaagcagttggattgaagtgaagaagaaaaagtacaaattctcgtcaggatcaatagtacagagcgagtttgagaccatctacccggttcttgaagatttggttagtcatatgttgaaaaaaggccctacacatgatgggaacaattatgaggatgatctagacctatggacagcataa

SEQ ID NO: 81881 - protein, 731 aa, Arabidopsis thaliana
  peptide (1)..(731): Ceres Seq. ID no. 12661890
MVHASLWQFRLQIIPWRLRNFCFLTSQCPYTSISSPDTVSVSSYYSLTSNNDQSLFHYFDHLLGLCLTAQQCRQVHAQVLLSDFIFRSGSLAANLISVYARLGLLLDARNVFETVSLVLLSDLRLWNSILKANVSHGLYENALELYRGMRQRGLTGDGYILPLILRACRYLGRFGLCRAFHTQVIQIGLKENLHVVNELLTLYPKAGRMGDAYNLFVEMPVRNRMSWNVMIKGFSQEYDCESAVKIFEWMQREEFKPDEVTWTSVLSCHSQCGKFEDVLKYFHLMRMSGNAVSGEALAVFFSVCAELEALSIAEKVHGYVIKGGFEEYLPSRNALIHVYGKQGKVKDAEHLFRQIRNKGIESWNSLITSFVDAGKLDEALSLFSELEEMNHVCNVKANVVTWTSVIKGCNVQGRGDDSLEYFRQMQFSKVLANSVTICCILSICAELPALNLGREIHGHVIRTSMSENILVQNALVNMYAKCGLLSEGSLVFEAIRDKDLISWNSIIKGYGMHGFAEKALSMFDRMISSGFHPDGIALVAVLSACSHAGLVEKGREIFYSMSKRFGLEPQQEHYACIVDLLGRVGFLKEASEIVKNMPMEPKVCVLGALLNSCRMHKNVDIAEGIASQLSVLEPERTGSYMLLSNIYSAGGRWEESANVRALAKKKDLKKVSGSSWIEVKKKKYKFSSGSIVQSEFETIYPVLEDLVSHMLKKGPTHDGNNYEDDLDLWTA

SEQ ID NO: 81882 - protein, 583 aa, Arabidopsis thaliana
  peptide (1)..(583): Ceres Seq. ID no. 12661891
MRQRGLTGDGYILPLILRACRYLGRFGLCRAFHTQVIQIGLKENLHVVNELLTLYPKAGRMGDAYNLFVEMPVRNRMSWNVMIKGFSQEYDCESAVKIFEWMQREEFKPDEVTWTSVLSCHSQCGKFEDVLKYFHLMRMSGNAVSGEALAVFFSVCAELEALSIAEKVHGYVIKGGFEEYLPSRNALIHVYGKQGKVKDAEHLFRQIRNKGIESWNSLITSFVDAGKLDEALSLFSELEEMNHVCNVKANVVTWTSVIKGCNVQGRGDDSLEYFRQMQFSKVLANSVTICCILSICAELPALNLGREIHGHVIRTSMSENILVQNALVNMYAKCGLLSEGSLVFEAIRDKDLISWNSIIKGYGMHGFAEKALSMFDRMISSGFHPDGIALVAVLSACSHAGLVEKGREIFYSMSKRFGLEPQQEHYACIVDLLGRVGFLKEASEIVKNMPMEPKVCVLGALLNSCRMHKNVDIAEGIASQLSVLEPERTGSYMLLSNIYSAGGRWEESANVRALAKKKDLKKVSGSSWIEVKKKKYKFSSGSIVQSEFETIYPVLEDLVSHMLKKGPTHDGNNYEDDLDLWTA

SEQ ID NO: 81883 - protein, 523 aa, Arabidopsis thaliana
  peptide (1)..(523): Ceres Seq. ID no. 12661892
MGDAYNLFVEMPVRNRMSWNVMIKGFSQEYDCESAVKIFEWMQREEFKPDEVTWTSVLSCHSQCGKFEDVLKYFHLMRMSGNAVSGEALAVFFSVCAELEALSIAEKVHGYVIKGGFEEYLPSRNALIHVYGKQGKVKDAEHLFRQIRNKGIESWNSLITSFVDAGKLDEALSLFSELEEMNHVCNVKANVVTWTSVIKGCNVQGRGDDSLEYFRQMQFSKVLANSVTICCILSICAELPALNLGREIHGHVIRTSMSENILVQNALVNMYAKCGLLSEGSLVFEAIRDKDLISWNSIIKGYGMHGFAEKALSMFDRMISSGFHPDGIALVAVLSACSHAGLVEKGREIFYSMSKRFGLEPQQEHYACIVDLLGRVGFLKEASEIVKNMPMEPKVCVLGALLNSCRMHKNVDIAEGIASQLSVLEPERTGSYMLLSNIYSAGGRWEESANVRALAKKKDLKKVSGSSWIEVKKKKYKFSSGSIVQSEFETIYPVLEDLVSHMLKKGPTHDGNNYEDDLDLWTA

SEQ ID NO: 81884 - DNA, 1110 bp, Arabidopsis thaliana
  misc_feature (1)..(1110): Ceres Seq. ID no. 12661893
  misc_feature (1)..(1110): Ortholog of  Ceres SEQ ID NO 14312605 as cited in SEQ ID NO 0
atggattataactcagatcgtggttatgatgactcttaccatcatcacgtacacgacgaacaattaccacaatcggattttgaagtggagacctttgatgaccggaggaacggtggtgcagccgttgatactggtgggattcagatgaagcattccgttgaccatcgccattcttcttcgtccatgtcttctcctgggaaactgttcgtaggtggagtttcttgggaaacaactgcagaaacttttgcgaattactttggaaagtttggagaagttgtcgactctgtaatcatgacagatagaataactgggaacccaagggggtttgggtttgtcacttttgctgattcagctgttgctgagaaagttttggaggaagatcatgtaatagatgaccgaaaggttgatctgaaaaggacacttcctagaggggacaaggatactgatatcaaagcggtatcaaagaccaggaaaatctttgttggtggacttccaccacttttggaagaagatgaactgaagaattatttctgtgtatatggtgacataattgagcatcagatcatgtatgaccaccacacgggaaggtcaaggggatttggttttgtaaccttccagaccgaagattctgttgatagacttttctccgatggaaaagttcacgagctcggtgacaaacaggtggaaataaaaagggccgaaccaaagagaaccgggagagataacagctttcgatcctatggtgctagtggcaagtatgatcaggaagatagttatagtgggaaagctaatgaagattacagtatgtattcgggttatggtggttatggcggttatggagcctacgcagggaactccatggttaaccctgctggtttttatggttatggtggtgggtatggctatggttatggctatggaggtcaaatgttcaacatgggctatggagctggcggttatagccatatgggtagtggctatggtgttgctgcggctgctgcttatggaggtggaaaatctcatggaaacggaaataacggctcaagtagtggcaaaggaaatgggactaatggttctgggccagatcgataccatccttatcaaaagtag

SEQ ID NO: 81885 - protein, 369 aa, Arabidopsis thaliana
  peptide (1)..(369): Ceres Seq. ID no. 12661894
MDYNSDRGYDDSYHHHVHDEQLPQSDFEVETFDDRRNGGAAVDTGGIQMKHSVDHRHSSSSMSSPGKLFVGGVSWETTAETFANYFGKFGEVVDSVIMTDRITGNPRGFGFVTFADSAVAEKVLEEDHVIDDRKVDLKRTLPRGDKDTDIKAVSKTRKIFVGGLPPLLEEDELKNYFCVYGDIIEHQIMYDHHTGRSRGFGFVTFQTEDSVDRLFSDGKVHELGDKQVEIKRAEPKRTGRDNSFRSYGASGKYDQEDSYSGKANEDYSMYSGYGGYGGYGAYAGNSMVNPAGFYGYGGGYGYGYGYGGQMFNMGYGAGGYSHMGSGYGVAAAAAYGGGKSHGNGNNGSSSGKGNGTNGSGPDRYHPYQK

SEQ ID NO: 81886 - protein, 321 aa, Arabidopsis thaliana
  peptide (1)..(321): Ceres Seq. ID no. 12661895
MKHSVDHRHSSSSMSSPGKLFVGGVSWETTAETFANYFGKFGEVVDSVIMTDRITGNPRGFGFVTFADSAVAEKVLEEDHVIDDRKVDLKRTLPRGDKDTDIKAVSKTRKIFVGGLPPLLEEDELKNYFCVYGDIIEHQIMYDHHTGRSRGFGFVTFQTEDSVDRLFSDGKVHELGDKQVEIKRAEPKRTGRDNSFRSYGASGKYDQEDSYSGKANEDYSMYSGYGGYGGYGAYAGNSMVNPAGFYGYGGGYGYGYGYGGQMFNMGYGAGGYSHMGSGYGVAAAAAYGGGKSHGNGNNGSSSGKGNGTNGSGPDRYHPYQK

SEQ ID NO: 81887 - protein, 308 aa, Arabidopsis thaliana
  peptide (1)..(308): Ceres Seq. ID no. 12661896
MSSPGKLFVGGVSWETTAETFANYFGKFGEVVDSVIMTDRITGNPRGFGFVTFADSAVAEKVLEEDHVIDDRKVDLKRTLPRGDKDTDIKAVSKTRKIFVGGLPPLLEEDELKNYFCVYGDIIEHQIMYDHHTGRSRGFGFVTFQTEDSVDRLFSDGKVHELGDKQVEIKRAEPKRTGRDNSFRSYGASGKYDQEDSYSGKANEDYSMYSGYGGYGGYGAYAGNSMVNPAGFYGYGGGYGYGYGYGGQMFNMGYGAGGYSHMGSGYGVAAAAAYGGGKSHGNGNNGSSSGKGNGTNGSGPDRYHPYQK

SEQ ID NO: 81888 - DNA, 1355 bp, Arabidopsis thaliana
  misc_feature (1)..(1355): Ceres Seq. ID no. 12661921
  misc_feature (1)..(1355): Ortholog of  Ceres SEQ ID NO 15170403 as cited in SEQ ID NO 53457
  misc_feature (1)..(1355): Ortholog of  Ceres SEQ ID NO 13660872 as cited in SEQ ID NO 60830
  misc_feature (1)..(1355): Ortholog of  Ceres SEQ ID NO 12616221 as cited in SEQ ID NO 63291
aaaaagaaagattactaacgccgactctctaaaactctctcaaaccataaaaaatattctccgatcatcattttaatggagagtacagattcttccggtggtcctccgccgccgcaaccaaacctccctccaggattccggtttcatccaacagacgaagaacttgtaattcattacctcaaacgcaaagcagattctgttcctttaccagtcgcgatcatcgccgacgttgatctttacaaatttgatccatgggaacttcccgcgaaagcttcgtttggagaacaagaatggtattttttcagtccaagagatcggaaatatcccaacggagctagacctaaccgagctgcgacttccggttattggaaagcgactggtacagataaaccggtgatttcaaccggcggtggtggtagtaaaaaagtgggagttaaaaaggctctagtgttttacagtggtaaaccaccaaaaggagttaaatcagattggattatgcatgaatatcggttaactgataataaacctactcatatttgtgacttcggcaacaagaaaaactctctcaggcttgatgattgggtgttgtgtcgtatctacaagaaaaacaatagtacagcatctagacatcatcatcatcttcatcatattcatctagataatgatcatcatcgtcatgatatgatgattgatgatgatcgattccgtcatgttcctcctggtcttcacttcccggcgattttttctgacaataatgatccgacggctatatatgatggtggcggcggcggatacggaggtggaagttactcgatgaatcattgtttcgcatctggatcaaagcaggagcagttgtttccaccggtgatgatgatgactagtctaaatcaagattccggtattggatcgtcgtcgtcacctagcaagagatttaacggcggcggcgttggagattgttcgacttctatggcggcgacgccgttaatgcagaaccaaggtgggatttaccaattgcctggtttgaattggtattcttgaaaacaatttacgatgaagaatttttaaaatttgtgtatatatatacggtttgagtgattagggggcattgggggatttatttacggttgattattattgtagtgttatagaactaaggagattaaattaaatagattggaggagaggtataaggtaacatatagaaattatacaacaatagtttaaatattcttttcttttctttttcatgttattatttttactaatgtataggtgatgattatacttagatgtttgtagcttgtataaattaatgcatgcatatatataaaaatatattaacagttatagaaact

SEQ ID NO: 81889 - protein, 320 aa, Arabidopsis thaliana; identical to SEQ ID NO: 34954
  peptide (1)..(320): Ceres Seq. ID no. 12661922

SEQ ID NO: 81890 - protein, 180 aa, Arabidopsis thaliana; identical to SEQ ID NO: 34955
  peptide (1)..(180): Ceres Seq. ID no. 12661923

SEQ ID NO: 81891 - DNA, 846 bp, Arabidopsis thaliana
  misc_feature (1)..(846): Ceres Seq. ID no. 12661928
  misc_feature (1)..(846): Ortholog of  Ceres SEQ ID NO 15179055 as cited in SEQ ID NO 0
atttgggtgatgtttaggcactgagaggtgcaacgaagcgctagaaaagctggagaagaagtatgatgtcgttgttaacattcaaggagatgaaccacttattgagcctgagattatagacggtgtagtcaaagcacttcaggtctcgtaaactgctcagtgagatgatgtcttatatgtttcatcgtggattatgatcctactacttagaagtctttcgaatgctgttgaatagtgttcctatggttgtggtttctaggtaacaccggatgcagtgtttagcacagcggtgacatcattgaaaccagaagacgggcttgatcctaaccgagttaaatgtgtggtggacaatcgtggctatgctatctatttctcaaggggtttgattccttataacaagagtggtaaagtcaatccagattttccgtacatgcttcatcttggaattcagagctttgattcgaagtttctgaaggtatattcagagcttcaaccaacgccattgcagcaagaagaggatctagaacagctcaaagttcttgagaatggctacaaaatgaaggttataaaggtagatcatgaagctcatggagttgacacacccgatgatgtcgaaaagattgaatctttaatgcgcgaaagaaacatgtcctagtccacaaaatcattttcctttcttttctttttttccctttcattaggagtacgtgataaacgccttgaaagagttgtggcattgtgtgtgagacatcgaaggtttactgatacgacatcgaaggtttactatcatttacctaaagaaagtatcgtgttactttttgatagtatcgatctttttattttccc

SEQ ID NO: 81892 - protein, 74 aa, Arabidopsis thaliana
  peptide (1)..(74): Ceres Seq. ID no. 12661929
MLHLGIQSFDSKFLKVYSELQPTPLQQEEDLEQLKVLENGYKMKVIKVDHEAHGVDTPDDVEKIESLMRERNMS

SEQ ID NO: 81893 - DNA, 2169 bp, Arabidopsis thaliana
  misc_feature (1)..(2169): Ceres Seq. ID no. 12661943
  misc_feature (1)..(2169): Ortholog of  Ceres SEQ ID NO 13596857 as cited in SEQ ID NO 62924
atggatgatactacgtataagccaaagaacattctcattactggagctgctggatttattgcttctcatgttgccaacagattaatccgtaactatcctgattacaagatcgttgttcttgacaagcttgattactgttcagatctgaagaatcttgatccttctttttcttcaccaaatttcaagtttgtcaaaggagatatcgcgagtgatgatctcgttaactaccttctcatcactgaaaacattgatacgataatgcattttgctgctcaaactcatgttgataactcttttggtaatagctttgagtttaccaagaacaatatttatggtactcatgttcttttggaagcctgtaaagttacaggacagatcaggaggtttatccatgtgagtaccgatgaagtctatggagaaaccgatgaggatgctgctgtaggaaaccatgaagcttctcagctgttaccgacgaatccttactctgcaactaaggctggtgctgagatgcttgtgatggcttatggtagatcatatggattgcctgttattacgactcgcgggaacaatgtttatgggcctaaccagtttcctgaaaaaatgattcctaagttcatcttgttggctatgagtgggaagccgcttcccatccatggagatggatctaatgtccggagttacttgtactgcgaagacgttgctgaggcttttgaggttgttcttcacaaaggagaaatcggtcatgtctacaatgtcggcacaaaaagagaaaggagagtgatcgatgtggctagagacatctgcaaacttttcgggaaagaccctgagtcaagcattcagtttgtggagaaccggccctttaatgatcaaaggtacttccttgatgatcagaagctgaagaaattggggtggcaagagcgaacaaattgggaagatggattgaagaagacaatggactggtacactcagaatcctgagtggtggggtgatgtttctggagctttgcttcctcatccgagaatgcttatgatgcccggtggaagactttctgatggatctagtgagaagaaagacgtttcaagcaacacggtccagacatttacggttgtaacacctaagaatggtgattctggtgacaaagcttcgttgaagtttttgatctatggtaagactggttggcttggtggtcttctagggaaactatgtgagaagcaagggattacatatgagtatgggaaaggacgtctggaggatagagcttctcttgtggcggatattcgtagcatcaaacctactcatgtgtttaatgctgctggtttaactggcagacccaacgttgactggtgtgaatctcacaaaccagagaccattcgtgtaaatgtcgcaggtactttgactctagctgatgtttgcagagagaatgatctcttgatgatgaacttcgccaccggttgcatctttgagtatgacgctacacatcctgagggttcgggtataggtttcaaggaagaagacaagccaaatttctttggttctttctactcgaaaaccaaagccatggttgaggagctcttgagagaatttgacaatgtatgtaccttgagagtccggatgccaatctcctcagacctaaacaacccgagaaacttcatcacgaagatctcgcgctacaacaaagtggtggacatcccgaacagcatgaccgtactagacgagcttctcccaatctctatcgagatggcgaagagaaacctaagaggcatatggaatttcaccaacccaggggtggtgagccacaacgagatattggagatgtacaagaattacatcgagccaggttttaaatggtccaacttcacagtggaagaacaagcaaaggtcattgttgctgctcgaagcaacaacgaaatggatggatctaaactaagcaaggagttcccagagatgctctccatcaaagagtcactgctcaaatacgtctttgaaccaaacaagagaacctaagccttcaatgaacatcacactcttccacaagtgcttactttaaactgttttgttttgtttttttttctttttgccttttcttccaacagatatatcttttttatatttactcatcgtcttatgatccttgtaggtagtttcactatattgattctactaaaatat

SEQ ID NO: 81894 - protein, 667 aa, Arabidopsis thaliana
  peptide (1)..(667): Ceres Seq. ID no. 12661944
MDDTTYKPKNILITGAAGFIASHVANRLIRNYPDYKIVVLDKLDYCSDLKNLDPSFSSPNFKFVKGDIASDDLVNYLLITENIDTIMHFAAQTHVDNSFGNSFEFTKNNIYGTHVLLEACKVTGQIRRFIHVSTDEVYGETDEDAAVGNHEASQLLPTNPYSATKAGAEMLVMAYGRSYGLPVITTRGNNVYGPNQFPEKMIPKFILLAMSGKPLPIHGDGSNVRSYLYCEDVAEAFEVVLHKGEIGHVYNVGTKRERRVIDVARDICKLFGKDPESSIQFVENRPFNDQRYFLDDQKLKKLGWQERTNWEDGLKKTMDWYTQNPEWWGDVSGALLPHPRMLMMPGGRLSDGSSEKKDVSSNTVQTFTVVTPKNGDSGDKASLKFLIYGKTGWLGGLLGKLCEKQGITYEYGKGRLEDRASLVADIRSIKPTHVFNAAGLTGRPNVDWCESHKPETIRVNVAGTLTLADVCRENDLLMMNFATGCIFEYDATHPEGSGIGFKEEDKPNFFGSFYSKTKAMVEELLREFDNVCTLRVRMPISSDLNNPRNFITKISRYNKVVDIPNSMTVLDELLPISIEMAKRNLRGIWNFTNPGVVSHNEILEMYKNYIEPGFKWSNFTVEEQAKVIVAARSNNEMDGSKLSKEFPEMLSIKESLLKYVFEPNKRT

SEQ ID NO: 81895 - protein, 581 aa, Arabidopsis thaliana
  peptide (1)..(581): Ceres Seq. ID no. 12661945
MHFAAQTHVDNSFGNSFEFTKNNIYGTHVLLEACKVTGQIRRFIHVSTDEVYGETDEDAAVGNHEASQLLPTNPYSATKAGAEMLVMAYGRSYGLPVITTRGNNVYGPNQFPEKMIPKFILLAMSGKPLPIHGDGSNVRSYLYCEDVAEAFEVVLHKGEIGHVYNVGTKRERRVIDVARDICKLFGKDPESSIQFVENRPFNDQRYFLDDQKLKKLGWQERTNWEDGLKKTMDWYTQNPEWWGDVSGALLPHPRMLMMPGGRLSDGSSEKKDVSSNTVQTFTVVTPKNGDSGDKASLKFLIYGKTGWLGGLLGKLCEKQGITYEYGKGRLEDRASLVADIRSIKPTHVFNAAGLTGRPNVDWCESHKPETIRVNVAGTLTLADVCRENDLLMMNFATGCIFEYDATHPEGSGIGFKEEDKPNFFGSFYSKTKAMVEELLREFDNVCTLRVRMPISSDLNNPRNFITKISRYNKVVDIPNSMTVLDELLPISIEMAKRNLRGIWNFTNPGVVSHNEILEMYKNYIEPGFKWSNFTVEEQAKVIVAARSNNEMDGSKLSKEFPEMLSIKESLLKYVFEPNKRT

SEQ ID NO: 81896 - protein, 498 aa, Arabidopsis thaliana
  peptide (1)..(498): Ceres Seq. ID no. 12661946
MLVMAYGRSYGLPVITTRGNNVYGPNQFPEKMIPKFILLAMSGKPLPIHGDGSNVRSYLYCEDVAEAFEVVLHKGEIGHVYNVGTKRERRVIDVARDICKLFGKDPESSIQFVENRPFNDQRYFLDDQKLKKLGWQERTNWEDGLKKTMDWYTQNPEWWGDVSGALLPHPRMLMMPGGRLSDGSSEKKDVSSNTVQTFTVVTPKNGDSGDKASLKFLIYGKTGWLGGLLGKLCEKQGITYEYGKGRLEDRASLVADIRSIKPTHVFNAAGLTGRPNVDWCESHKPETIRVNVAGTLTLADVCRENDLLMMNFATGCIFEYDATHPEGSGIGFKEEDKPNFFGSFYSKTKAMVEELLREFDNVCTLRVRMPISSDLNNPRNFITKISRYNKVVDIPNSMTVLDELLPISIEMAKRNLRGIWNFTNPGVVSHNEILEMYKNYIEPGFKWSNFTVEEQAKVIVAARSNNEMDGSKLSKEFPEMLSIKESLLKYVFEPNKRT

SEQ ID NO: 81897 - DNA, 914 bp, Arabidopsis thaliana
  misc_feature (1)..(914): Ceres Seq. ID no. 12661947
  misc_feature (1)..(914): Ortholog of  Ceres SEQ ID NO 13583691 as cited in SEQ ID NO 68890
aactctagactggaccgagttcgctaccttcgtctcgccttcggcctttttctggttcttcacttcttctgacgagattcgcttttaccagagagagagagagatgagaatgacatttttgagttatctgaagcaatggcgtggaacagcgaaagaagcattcgagaatgtatcaatcgtcgccaagtttctctgtttgcttcatgtcaccgatcgatacataatctccacgacccacgttcacgggccgagcatgcttccgacgcttaatctaaccggcgatgtaatattggcggaacatttatcacaccggtttggtaagattggactcggtgacgttgtattggttcgatctcctagagacccaaaaaggatggtgacaaagcgaatcttgggtttagaaggcgatagactcactttttctgctgacccattggtcggtgatgcttcagtgagcgttttggttccgaaaggtcatgtttggattcagggagataacttgtatgcttcaactgattcacgtcattttgggcctgtaccttacagtctcattgaaggaaaagctcttctacgggtctggccaccagaatactttgggtcattgagatgacgattatatacacatacacattcaggtaatcaggttgtctgcctactgtatacgtcaagagatcactccaacgattttgttgcactgtaactcatgcgagtaatgtatcattcatgtgggataagcattttcgtctactctcctttttggcagtaatagaagaaaagccatggtcctgatattgtttctgaaacccgaacttcaatatcaaatgttaagattcatattgttggtatcgaaaaagctggtgcgttatgggatgataattgtgtccttgatacaaagttttatagatgttttgatt

SEQ ID NO: 81898 - protein, 202 aa, Arabidopsis thaliana
  peptide (1)..(202): Ceres Seq. ID no. 12661948
TLDWTEFATFVSPSAFFWFFTSSDEIRFYQREREMRMTFLSYLKQWRGTAKEAFENVSIVAKFLCLLHVTDRYIISTTHVHGPSMLPTLNLTGDVILAEHLSHRFGKIGLGDVVLVRSPRDPKRMVTKRILGLEGDRLTFSADPLVGDASVSVLVPKGHVWIQGDNLYASTDSRHFGPVPYSLIEGKALLRVWPPEYFGSLR

SEQ ID NO: 81899 - protein, 168 aa, Arabidopsis thaliana; identical to SEQ ID NO: 21418
  peptide (1)..(168): Ceres Seq. ID no. 12661949

SEQ ID NO: 81900 - protein, 166 aa, Arabidopsis thaliana; identical to SEQ ID NO: 21419
  peptide (1)..(166): Ceres Seq. ID no. 12661950

SEQ ID NO: 81901 - DNA, 2300 bp, Arabidopsis thaliana
  misc_feature (1)..(2300): Ceres Seq. ID no. 12661959
  misc_feature (1)..(2300): Ortholog of  Ceres SEQ ID NO 13596198 as cited in SEQ ID NO 68488
gaaatcttcatctttcgtatctctcctccttctcatgccctaaatttcatctcctctcttgtattgattctgttaaaaatctcacctttcaattcaaaaccccttccatttttgtgattaatatgcctacttggtggggaagaaagtcctgcaagaacaaggacgataatcacagaggaatcatctccacagatagagatatcaagagctctgctgttgttgttgatcctcctctcactcctactcgtggtggtacacctcgttgcagtcgtgaattcgctggagcttcttctgctttctctggttttgactctgattctaccgagaagaaaggtcaccctcttcctcgtcctttgctctctcctgtttcgatccatcatcaagatcatgtaagcggatccacttctggatctacatctgtttctagcgttagctcatctggatcagctgatgatcagagtcaacttgttgcttctaggggtcgtggtgatgtgaaattcaatgtagcagcagcaccacgtagtcctgagagagtttctccaaaggcagctactattactactaggcccacgtctccacggcatcagcgtttgtctggagttgtgagcttagagtcttctacagggaggaatgatgatggaaggtcctcctctgagtgtcatcctttgcctcgaccacctacttctcctacaagcccttctgctgtgcatggttccaggattggaggaggctacgagacctctccttcggggttttccacgtggaaaaaagggaaatttcttgggagtggcacctttggtcaagtctatcttggtttcaacagtgagaaagggaaaatgtgtgctattaaagaggtcaaggtcatttctgacgatcaaacatcaaaagaatgtctgaagcaactaaatcaggagataaatttgcttaaccagctttgtcatccgaatattgtccagtattacggaagtgaactgagtgaagaaaccttgtccgtctacttggagtacgtgtcaggtggttcaatccataaactacttaaggattatggttctttcactgaacccgttatccaaaactacacgcggcagattcttgctgggcttgcctatttacatggacgaaatacagtacatagggacatcaaaggagcaaatatattagtggatccgaatggtgaaatcaagttggcagactttgggatggccaaacatgtaacagccttttctactatgctttcttttaaagggagtccttactggatggcacccgaggttgtgatgagccaaaatggctacactcatgcagtcgatatctggagtttgggttgtactattctggaaatggcaacatcaaagccaccttggagccagtttgaaggggttgctgcgattttcaaaatcggaaacagtaaagacaccccggaaatacctgatcacctttcaaatgatgcaaagaattttataaggctttgtctgcaacgaaatccgacagtacgtcctacagcttctcagcttctagaacacccttttctacgtaacacaacaagagtggctagtactagtttgcccaaagacttccccccacgttcctatgatggaaacttctcactgcctacaagggaaccctatccagggagactgagccatgataattatgcaaaacagccattgtctagaactataaagagcccgagcagagaaaacgtaagagctatcacatccttaccagtatctccatgttcaagccctttacgccaacttgggccagcatacaaaagttgtttcctgtcacctcctcacccgtcttacgcatttcctgggcaagacagtgggtacaacctagcagagtttgctgcaagccctttcaggatgaagaaagacgcaatgatggaaccatctagtttcaggactcaaacaccgaattcaccattgagatcaagactggtgtagaaatggagcaaagattgagagactgaaagccacatactataaacaaggcccaatgaccatgtataaaacagtgtctacccctagttttggccttctccttctcaacacccagggaaatatgaagttatgagaccttagttgtgtgtgtgtggagcatctcctagaagtggagatttttggaacaagaaggagaaatttggggggaaaacagaaagatgtaaagagaaacatgaaaatgaatacaaagtttatagagtgtgagaagtatagatagtaagttgtgttgtcacacaaagataatattcaaccatttgttttcaacctacagtgtgaatatacttttcagaaagt

SEQ ID NO: 81902 - protein, 648 aa, Arabidopsis thaliana
  peptide (1)..(648): Ceres Seq. ID no. 12661960
NLHLSYLSSFSCPKFHLLSCIDSVKNLTFQFKTPSIFVINMPTWWGRKSCKNKDDNHRGIISTDRDIKSSAVVVDPPLTPTRGGTPRCSREFAGASSAFSGFDSDSTEKKGHPLPRPLLSPVSIHHQDHVSGSTSGSTSVSSVSSSGSADDQSQLVASRGRGDVKFNVAAAPRSPERVSPKAATITTRPTSPRHQRLSGVVSLESSTGRNDDGRSSSECHPLPRPPTSPTSPSAVHGSRIGGGYETSPSGFSTWKKGKFLGSGTFGQVYLGFNSEKGKMCAIKEVKVISDDQTSKECLKQLNQEINLLNQLCHPNIVQYYGSELSEETLSVYLEYVSGGSIHKLLKDYGSFTEPVIQNYTRQILAGLAYLHGRNTVHRDIKGANILVDPNGEIKLADFGMAKHVTAFSTMLSFKGSPYWMAPEVVMSQNGYTHAVDIWSLGCTILEMATSKPPWSQFEGVAAIFKIGNSKDTPEIPDHLSNDAKNFIRLCLQRNPTVRPTASQLLEHPFLRNTTRVASTSLPKDFPPRSYDGNFSLPTREPYPGRLSHDNYAKQPLSRTIKSPSRENVRAITSLPVSPCSSPLRQLGPAYKSCFLSPPHPSYAFPGQDSGYNLAEFAASPFRMKKDAMMEPSSFRTQTPNSPLRSRLV

SEQ ID NO: 81903 - protein, 608 aa, Arabidopsis thaliana
  peptide (1)..(608): Ceres Seq. ID no. 12661961
MPTWWGRKSCKNKDDNHRGIISTDRDIKSSAVVVDPPLTPTRGGTPRCSREFAGASSAFSGFDSDSTEKKGHPLPRPLLSPVSIHHQDHVSGSTSGSTSVSSVSSSGSADDQSQLVASRGRGDVKFNVAAAPRSPERVSPKAATITTRPTSPRHQRLSGVVSLESSTGRNDDGRSSSECHPLPRPPTSPTSPSAVHGSRIGGGYETSPSGFSTWKKGKFLGSGTFGQVYLGFNSEKGKMCAIKEVKVISDDQTSKECLKQLNQEINLLNQLCHPNIVQYYGSELSEETLSVYLEYVSGGSIHKLLKDYGSFTEPVIQNYTRQILAGLAYLHGRNTVHRDIKGANILVDPNGEIKLADFGMAKHVTAFSTMLSFKGSPYWMAPEVVMSQNGYTHAVDIWSLGCTILEMATSKPPWSQFEGVAAIFKIGNSKDTPEIPDHLSNDAKNFIRLCLQRNPTVRPTASQLLEHPFLRNTTRVASTSLPKDFPPRSYDGNFSLPTREPYPGRLSHDNYAKQPLSRTIKSPSRENVRAITSLPVSPCSSPLRQLGPAYKSCFLSPPHPSYAFPGQDSGYNLAEFAASPFRMKKDAMMEPSSFRTQTPNSPLRSRLV

SEQ ID NO: 81904 - protein, 370 aa, Arabidopsis thaliana
  peptide (1)..(370): Ceres Seq. ID no. 12661962
MCAIKEVKVISDDQTSKECLKQLNQEINLLNQLCHPNIVQYYGSELSEETLSVYLEYVSGGSIHKLLKDYGSFTEPVIQNYTRQILAGLAYLHGRNTVHRDIKGANILVDPNGEIKLADFGMAKHVTAFSTMLSFKGSPYWMAPEVVMSQNGYTHAVDIWSLGCTILEMATSKPPWSQFEGVAAIFKIGNSKDTPEIPDHLSNDAKNFIRLCLQRNPTVRPTASQLLEHPFLRNTTRVASTSLPKDFPPRSYDGNFSLPTREPYPGRLSHDNYAKQPLSRTIKSPSRENVRAITSLPVSPCSSPLRQLGPAYKSCFLSPPHPSYAFPGQDSGYNLAEFAASPFRMKKDAMMEPSSFRTQTPNSPLRSRLV

SEQ ID NO: 81905 - DNA, 1799 bp, Arabidopsis thaliana
  misc_feature (1)..(1799): Ceres Seq. ID no. 12661980
  misc_feature (1)..(1799): Ortholog of  Ceres SEQ ID NO 13638331 as cited in SEQ ID NO 58047
  misc_feature (1)..(1799): Ortholog of  Ceres SEQ ID NO 15170135 as cited in SEQ ID NO 67647
aaccattaggtgatttttttctctgatcttcgagttctgataattgctcttttttctctggctttgttatcgataatttctctggattttctttctggggtgaatttttgcgcagagatgggttcggcgaacaacgagtacgagtttctgagtgagattgggctgacttctcacaacttgggatcttacgttgctggcaaatggcaagccaacggacctcttgtttcaactctcaatcctgctaacaatcagccaattgctcaagttgtggaagcttctctagaggattacgagcaaggtttgaaagcttgcgaggaagcagctaaaatatggatgcaggttacggctcctaagagaggtgatatcgtcagacagattggggatgcactaagatccaaacttgactatcttggtcgtcttctttctcttgaaatgggaaagatccttgctgaaggtattggagaagttcaggaagtaattgacatgtgtgattttgctgttggtttgagccgacaactcaatggatcggttataccttcagaacgccctaaccacatgatgttggagatgtggaatcctcttggcattgttggtgttatcacagcgtttaattttccctgtgcagttcttggttggaatgcttgtattgctcttgtctgtggaaactgtgtagtctggaaaggtgctccaactacaccgttaataactatcgcaatgaccaagctagtagctgaagttttagagaaaaacaacttacccggtgccatttttacggccatgtgtggtggtgctgaaattggtgaagcaatagccaaagacacacgcattcccttagtatcctttactggaagctccagggtgggctcaatggtacaacaaacagtgaatgcgagatctgggaaaactttgcttgagttgagtggaaacaatgcaatcatagtcatggacgatgctgatatacagttagcggctcgatctgttctattcgctgcggttggaactgctggtcaacgttgcacaacttgccgtaggctgcttttgcatgagagtgtctatgacaaagtactcgagcaactgcttacctcatacaaacaagtcaaaatcggcaatcctcttgagaaagggacattgttaggaccattacatactcctgaatcaaaaaagaactttgagaaaggaattgaagtcatcaaatcccagggtggtaaaatactaacgggaggtaaagcagtcgaaggtgaaggaaactttgtggagcctacgataatcgagatatcagcagatgctgctgtcgtcaaagaagagctatttgctccggttctatatgttctaaagtttaagtcatttggagaggctgttgcgataaacaactcggttcctcaaggtctaagcagctcgatattcactcggaaccctgaaaacatcttcaggtggatcggaccactgggaagtgactgtggcattgtgaatgtgaacataccgacgaatggagctgagattggtggagcttttggaggcgagaaagcgactggtggtggtcgtgaagctggaagcgactcatggaaacagtacatgcgtcgatcgacttgtaccatcaactatggaaacgagttacctctagcgcaaggaattaacttcggttagatttttcagagatttactcgttaattaataatgttatgttggttcgatttcgatacttgtattgtatgccttgttctctccaagcctttgacttaagatgattacgcttttaatatatataaaaaaatattgaatatattttgattgttaatttg

SEQ ID NO: 81906 - protein, 508 aa, Arabidopsis thaliana; identical to SEQ ID NO: 24267
  peptide (1)..(508): Ceres Seq. ID no. 12661981

SEQ ID NO: 81907 - protein, 436 aa, Arabidopsis thaliana; identical to SEQ ID NO: 24268
  peptide (1)..(436): Ceres Seq. ID no. 12661982

SEQ ID NO: 81908 - protein, 403 aa, Arabidopsis thaliana; identical to SEQ ID NO: 25418
  peptide (1)..(403): Ceres Seq. ID no. 12661983

SEQ ID NO: 81909 - DNA, 731 bp, Arabidopsis thaliana
  misc_feature (1)..(731): Ceres Seq. ID no. 12661984
  misc_feature (1)..(731): Ortholog of  Ceres SEQ ID NO 15170135 as cited in SEQ ID NO 67647
ctcgagcaactgcttacctcatacaaacaagtcaaaatcggcaatcctcttgagaaagggacattgttaggaccattacatactcctgaatcaaaaaagaactttgagaaaggaattgaagtcatcaaatcccagggtggtaaaatactaacgggaggtaaagcagtcgaaggtgaaggaaactttgtggagcctacgataatcgagatatcagcagatgctgctgtcgtcaaagaagagctatttgctccggttctatatgttctaaagtttaagtcatttggagaggctgttgcgataaacaactcggttcctcaaggtctaagcagctcgatattcactcggaaccctgaaaacatcttcaggtggatcggaccactgggaagtgactgtggcattgtgaatgtgaacataccgacgaatggagctgagattggtggagcttttggaggcgagaaagcgactggtggtggtcgtgaagctggaagcgactcatggaaacagtacatgcgtcgatcgacttgtaccatcaactatggaaacgagttacctctagcgcaaggaattaacttcggttagatttttcagagatttactcgttaattaataatgttatgttggttcgatttcgatacttgtattgtatgccttgttctctccaagcctttgacttaagatgattacgcttttaatatatataaaaaaatattgaatatattttgattgttaat

SEQ ID NO: 81910 - protein, 192 aa, Arabidopsis thaliana
  peptide (1)..(192): Ceres Seq. ID no. 12661985
LEQLLTSYKQVKIGNPLEKGTLLGPLHTPESKKNFEKGIEVIKSQGGKILTGGKAVEGEGNFVEPTIIEISADAAVVKEELFAPVLYVLKFKSFGEAVAINNSVPQGLSSSIFTRNPENIFRWIGPLGSDCGIVNVNIPTNGAEIGGAFGGEKATGGGREAGSDSWKQYMRRSTCTINYGNELPLAQGINFG

SEQ ID NO: 81911 - DNA, 771 bp, Arabidopsis thaliana
  misc_feature (1)..(771): Ceres Seq. ID no. 12662002
  misc_feature (1)..(771): Ortholog of  Ceres SEQ ID NO 14304408 as cited in SEQ ID NO 58051
  misc_feature (1)..(771): Ortholog of  Ceres SEQ ID NO 13661769 as cited in SEQ ID NO 61435
  misc_feature (1)..(771): Ortholog of  Ceres SEQ ID NO 13600585 as cited in SEQ ID NO 0
atgggaaaacaaatcaacatagagagtagtgctactcatcatcaagacaatattgtttccgttataacagccacgatatcctcctcctccgtcgtaacgtcttcgtcagactcttggtctacctccaaaagatcgttagtgcaagacaatgactccggagggaaacggcggaagagcaacgttagtgatgataacaagaatccgacgtcgtatagaggagtgaggatgaggagttggggaaaatgggtgtcggagattagagagccgaggaagaaatcaagaatatggcttggcacttatccaacggcagagatggcagctcgtgctcatgatgtggcggctttagctattaaaggcaactccggttttcttaatttccctgaattatccggtttgcttcctcgtccggttagctgctctcctaaggatatacaagctgcagctaccaaagccgccgaagcaaccacgtggcacaaaccggttatcgataagaaattagctgatgagctaagccactctgagttgttgtctaccgctcagtcttcgacttctagtagtttcgtgttttcttcggacacgtcggagacttctagtacggacaaggaaagcaacgaagagacggtgtttgatttgccggaccttttcacggacgggcttatgaacccaaacgatgcgttttgtttatgcaacggcacctttacgtggcagctttacggagaggaggatgtagggttcaggtttgaagagccgtttaattggcaaaatgactaa

SEQ ID NO: 81912 - protein, 256 aa, Arabidopsis thaliana
  peptide (1)..(256): Ceres Seq. ID no. 12662003
MGKQINIESSATHHQDNIVSVITATISSSSVVTSSSDSWSTSKRSLVQDNDSGGKRRKSNVSDDNKNPTSYRGVRMRSWGKWVSEIREPRKKSRIWLGTYPTAEMAARAHDVAALAIKGNSGFLNFPELSGLLPRPVSCSPKDIQAAATKAAEATTWHKPVIDKKLADELSHSELLSTAQSSTSSSFVFSSDTSETSSTDKESNEETVFDLPDLFTDGLMNPNDAFCLCNGTFTWQLYGEEDVGFRFEEPFNWQND

SEQ ID NO: 81913 - protein, 181 aa, Arabidopsis thaliana
  peptide (1)..(181): Ceres Seq. ID no. 12662004
MRSWGKWVSEIREPRKKSRIWLGTYPTAEMAARAHDVAALAIKGNSGFLNFPELSGLLPRPVSCSPKDIQAAATKAAEATTWHKPVIDKKLADELSHSELLSTAQSSTSSSFVFSSDTSETSSTDKESNEETVFDLPDLFTDGLMNPNDAFCLCNGTFTWQLYGEEDVGFRFEEPFNWQND

SEQ ID NO: 81914 - protein, 152 aa, Arabidopsis thaliana
  peptide (1)..(152): Ceres Seq. ID no. 12662005
MAARAHDVAALAIKGNSGFLNFPELSGLLPRPVSCSPKDIQAAATKAAEATTWHKPVIDKKLADELSHSELLSTAQSSTSSSFVFSSDTSETSSTDKESNEETVFDLPDLFTDGLMNPNDAFCLCNGTFTWQLYGEEDVGFRFEEPFNWQND

SEQ ID NO: 81915 - DNA, 1491 bp, Arabidopsis thaliana
  misc_feature (1)..(1491): Ceres Seq. ID no. 12662034
  misc_feature (1)..(1491): Ortholog of  Ceres SEQ ID NO 13594037 as cited in SEQ ID NO 55666
  misc_feature (1)..(1491): Ortholog of  Ceres SEQ ID NO 13657707 as cited in SEQ ID NO 66407
atgtccacgtttgtaaaagtcaccgacttaatcactatcatgttctttctagccattgctgccgtcataaccgcctcaaacacagccgagttggatgtacttgaaatggctagaactgctgtggttgaagccaagactagttttgggtcaatggctgtgactgaggcaactagtgaagttgctggtagttattataaattggggttaagtgaatgcgagaagctctacgatgagagtgaagctaggctatcgaaactggtcgtagatcatgagaatttcaccgttgaagatgttagaacgtggctaagtggcgtgcttgcgaatcatcacacttgtttagacggtttaattcagcaacgtcaaggtcataagcctttggtccatagcaacgtcacgttcgtgctccatgaagctttggctttctacaaaaagtctagagcgagacagggccatggaccaacgagaccaaaacatagaccaacgagaccaaatcatggaccaggaagatcacaccatggaccatcaagaccaaaccaaaacggtggaatgttagtgtcatggaatccaacaagttcaagggcagatttcgtggtggctcgggacggttcggcgactcatcggacgataaaccaagcattagccgccgtttcaagaatgggtaaaagtcggttgaatagagtgataatatacataaaagctggtgtttataacgaaaaaatcgaaatagatagacacatgaaaaacatcatgctagttggtgatggtatggaccgtacaattgtcaccaataaccgaaacgtcccggacggttccacgacttatggatcagcgacattcggagtgtccggggatggattttgggcacgggacataacgttcgagaatactgcaggaccacataaacatcaagctgtggcgttgagagtgagctcagacttgtctttattctatcggtgtagtttcaaaggatatcaagatactcttttcacgcactcacttcgtcaattctaccgcgattgtcatatttatggtacgattgatttcatatttggagatgcggcagctgtttttcagaactgtgatatatttgtgaggcggcctatggatcatcaaggcaacatgatcacagctcaaggaagagacgacccacatacaaattcagaattcgaagcagttaaaggccggtttaagagctacttgggccggccatggaagaagtactcacggacagtgtttctcaaaacagatatcgacgagttgattgacccgagagggtggagagaatggagtggcagttatgctttgtcgacgttgtattacggcgagtttatgaacaccggagctggagcagggactggtagaagggtgaactggccgggatttcacgtcctacgcggtgaggaagaggcttctccgtttaccgtcagccgattcatacaaggagattcttggatccctatcaccggtgtgccgttttcagctggggtttga

SEQ ID NO: 81916 - protein, 496 aa, Arabidopsis thaliana
  peptide (1)..(496): Ceres Seq. ID no. 12662035
MSTFVKVTDLITIMFFLAIAAVITASNTAELDVLEMARTAVVEAKTSFGSMAVTEATSEVAGSYYKLGLSECEKLYDESEARLSKLVVDHENFTVEDVRTWLSGVLANHHTCLDGLIQQRQGHKPLVHSNVTFVLHEALAFYKKSRARQGHGPTRPKHRPTRPNHGPGRSHHGPSRPNQNGGMLVSWNPTSSRADFVVARDGSATHRTINQALAAVSRMGKSRLNRVIIYIKAGVYNEKIEIDRHMKNIMLVGDGMDRTIVTNNRNVPDGSTTYGSATFGVSGDGFWARDITFENTAGPHKHQAVALRVSSDLSLFYRCSFKGYQDTLFTHSLRQFYRDCHIYGTIDFIFGDAAAVFQNCDIFVRRPMDHQGNMITAQGRDDPHTNSEFEAVKGRFKSYLGRPWKKYSRTVFLKTDIDELIDPRGWREWSGSYALSTLYYGEFMNTGAGAGTGRRVNWPGFHVLRGEEEASPFTVSRFIQGDSWIPITGVPFSAGV

SEQ ID NO: 81917 - protein, 483 aa, Arabidopsis thaliana
  peptide (1)..(483): Ceres Seq. ID no. 12662036
MFFLAIAAVITASNTAELDVLEMARTAVVEAKTSFGSMAVTEATSEVAGSYYKLGLSECEKLYDESEARLSKLVVDHENFTVEDVRTWLSGVLANHHTCLDGLIQQRQGHKPLVHSNVTFVLHEALAFYKKSRARQGHGPTRPKHRPTRPNHGPGRSHHGPSRPNQNGGMLVSWNPTSSRADFVVARDGSATHRTINQALAAVSRMGKSRLNRVIIYIKAGVYNEKIEIDRHMKNIMLVGDGMDRTIVTNNRNVPDGSTTYGSATFGVSGDGFWARDITFENTAGPHKHQAVALRVSSDLSLFYRCSFKGYQDTLFTHSLRQFYRDCHIYGTIDFIFGDAAAVFQNCDIFVRRPMDHQGNMITAQGRDDPHTNSEFEAVKGRFKSYLGRPWKKYSRTVFLKTDIDELIDPRGWREWSGSYALSTLYYGEFMNTGAGAGTGRRVNWPGFHVLRGEEEASPFTVSRFIQGDSWIPITGVPFSAGV

SEQ ID NO: 81918 - protein, 461 aa, Arabidopsis thaliana
  peptide (1)..(461): Ceres Seq. ID no. 12662037
MARTAVVEAKTSFGSMAVTEATSEVAGSYYKLGLSECEKLYDESEARLSKLVVDHENFTVEDVRTWLSGVLANHHTCLDGLIQQRQGHKPLVHSNVTFVLHEALAFYKKSRARQGHGPTRPKHRPTRPNHGPGRSHHGPSRPNQNGGMLVSWNPTSSRADFVVARDGSATHRTINQALAAVSRMGKSRLNRVIIYIKAGVYNEKIEIDRHMKNIMLVGDGMDRTIVTNNRNVPDGSTTYGSATFGVSGDGFWARDITFENTAGPHKHQAVALRVSSDLSLFYRCSFKGYQDTLFTHSLRQFYRDCHIYGTIDFIFGDAAAVFQNCDIFVRRPMDHQGNMITAQGRDDPHTNSEFEAVKGRFKSYLGRPWKKYSRTVFLKTDIDELIDPRGWREWSGSYALSTLYYGEFMNTGAGAGTGRRVNWPGFHVLRGEEEASPFTVSRFIQGDSWIPITGVPFSAGV

SEQ ID NO: 81919 - DNA, 3114 bp, Arabidopsis thaliana
  misc_feature (1)..(3114): Ceres Seq. ID no. 12662074
  misc_feature (1)..(3114): Ortholog of  Ceres SEQ ID NO 13660487 as cited in SEQ ID NO 60849
atgagcgtagatgttcagagaatcactgacttcatttggtatgtaaacagcatatggatgttacctatacagattttctcagcgatttatatcttgcaaaaacatctgggacttggagctttagctgcattggtcacaactttaatggtgatggcttgcaactacccattgacaaggcttcagagaaactaccaatcagatatcatgaatgccaaagatgatagaatgaaagcaacttcagagattcttaaaaacatgaagattctgaagcttcaagcatgggataaccagtttctcaacaaggttaaaacattaagaaagaaagagtatgattgtttatggaagtctttgaggttacaagatttcacaactttcatactttggggagctccttcattgatctctgtggtgacttttgttacttgtatgttaatgggagtgaagctaacagctggagcagtcttatctgctcttgcaacgtttcaaatgttacaaagtccgattttcggtttacctgatctcctctcagcgcttgttcagagcaaggtttctgcagatagaatagcttcttacttgcaacaaagcgagactcagaaagatgcagttgagtattgctcaaatgatcatacagaatttagtgttgaaatagaaaatggagcatttagttgggaacctgagtcaagcagaccaactcttgatgacatcgaactgaaagtaaaaagcggaatgaaagtggcgatctgcggagctgtaggatcaggaaaatcaagcttaccctcttcaatcttaggggagattcagaagctgaagggaacagtcagagtcagtggtaaacaagcttatgttccacaatcaccatggatactaagcgggactataagagataacattttgtttggaagcatttatgaaagcgaaaagtatgagagaactgttaaagcatgtgctttgataaaggactttgagcttttctcgaatggagacttgacagagattggagagagagggataaacatgagtggaggtcagaagcaaaggatacagattgctcgagcggtatatcagaacgctgatatatatctacttgatgatccttttagcgccgttgatgctcatacaggaagagaactctttgaagattgcttaatggggatactgaaagacaaaactgtactttacgttacccatcaagtcgagtttcttccagcagcagatctaatcctggtgatgcaaaacggaagagtgatgcaagcaggaaagtttgaagagcttctaaagcaaaacataggttttgaagttcttactcagtgtgactcagagcataacatttcaacagagaataaaaagaaagaagcaaagctagtgcaagatgaagaaacagagaaaggagtaattggcaaagaagtttacttgacatatttaacaacggtaaaaggcggattgcttgtgccattcataatattggctcagtcttgcttccaaatgctacagattgctagcaattactggatggcatggactgctcctccaactgctgaatccataccaaagttaggaatgggtcggattttacttgtttatgcacttcttgctgcaggaagttcactttgtgttttagcacggactattctagtcgcgataggtggactttcaacagcagagacgttcttctcaaggatgctctgcagcattttcagagctccaatgtcatatttcgattcaactccaacaggaagaatcttgaacagggcatccacagatcaaagtgtcctggatttggaaatggcagtcaaactaggttggtgtgctttctcgatcattcagattgttggaaccatcttcgtcatgtcgcaagttgcttggcaaagatattacacaccaacagagagagaactgtcacgcatgtcaggagtagaaagagctccaatcctccaccatttcgctgaatcgcttgctggtgcaacaacaatacgtgcttttgatcaacgagatcgcttcattagctcaaaccttgttctaatagatagccactcaaggccatggttccatgttgcatcagcaatggagtggctttccttcaggttgaatttgctgtctcattttgtctttgctttttccttggtgttacttgtgactctccctgaaggtgtcatcaatccaagtattgctggtcttggggtcacatatggcttaagtctgaatgttctacaagccacagtgatatggaatatatgcaatgcagaaaacaagatgatttctgtagaaagaattcttcagcactctaagatccccagtgaagcacctctagtaattgatgatcagagacctcttgataactggccaaatgtaggatcaatcgtcttcagagacctacaggtccgttatgcagaacatttcccagctgtcttgaagaacatcacttgtgcgtttccaggaggaaaaaagattggagtagtaggaagaacaggaagcggcaaatcaactttaattcaggcattgtttaggattgtagagccaagtcatggaaccatagttattgataatgtggatataaccaagataggtctacatgacctgagatcaaggcttgggattattcctcaagataatgcactatttgatggaacaatcagattgaatctagatcctctagctcagtatactgatcgcgaaatatgggaggctcttgataaatgtcaactgggagatgttattcgtgcaaaggatgagaagctggatgctacagtggttgaaaatggagaaaattggagcgtaggacaaagacagttagtctgtcttgggagggtgttgttgaagaaaagcaacattctggtgcttgatgaagccactgcttcagttgattctgcaactgatggtgtaatacaaaagatcatcaatcaagagtttaaagatcggacagtggtgactattgcacacagaatccacacagtgatagagagtgatcttgttctggttctgagtgatggacgaatcgcagagtttgattcacctgcaaaactgctacagagagaagattctttcttctccaaactcataaaagagtattcgctgagatctaatcactttgccggctcgaatgatcttctcagctaa

SEQ ID NO: 81920 - protein, 1037 aa, Arabidopsis thaliana
  peptide (1)..(1037): Ceres Seq. ID no. 12662075
MSVDVQRITDFIWYVNSIWMLPIQIFSAIYILQKHLGLGALAALVTTLMVMACNYPLTRLQRNYQSDIMNAKDDRMKATSEILKNMKILKLQAWDNQFLNKVKTLRKKEYDCLWKSLRLQDFTTFILWGAPSLISVVTFVTCMLMGVKLTAGAVLSALATFQMLQSPIFGLPDLLSALVQSKVSADRIASYLQQSETQKDAVEYCSNDHTEFSVEIENGAFSWEPESSRPTLDDIELKVKSGMKVAICGAVGSGKSSLPSSILGEIQKLKGTVRVSGKQAYVPQSPWILSGTIRDNILFGSIYESEKYERTVKACALIKDFELFSNGDLTEIGERGINMSGGQKQRIQIARAVYQNADIYLLDDPFSAVDAHTGRELFEDCLMGILKDKTVLYVTHQVEFLPAADLILVMQNGRVMQAGKFEELLKQNIGFEVLTQCDSEHNISTENKKKEAKLVQDEETEKGVIGKEVYLTYLTTVKGGLLVPFIILAQSCFQMLQIASNYWMAWTAPPTAESIPKLGMGRILLVYALLAAGSSLCVLARTILVAIGGLSTAETFFSRMLCSIFRAPMSYFDSTPTGRILNRASTDQSVLDLEMAVKLGWCAFSIIQIVGTIFVMSQVAWQRYYTPTERELSRMSGVERAPILHHFAESLAGATTIRAFDQRDRFISSNLVLIDSHSRPWFHVASAMEWLSFRLNLLSHFVFAFSLVLLVTLPEGVINPSIAGLGVTYGLSLNVLQATVIWNICNAENKMISVERILQHSKIPSEAPLVIDDQRPLDNWPNVGSIVFRDLQVRYAEHFPAVLKNITCAFPGGKKIGVVGRTGSGKSTLIQALFRIVEPSHGTIVIDNVDITKIGLHDLRSRLGIIPQDNALFDGTIRLNLDPLAQYTDREIWEALDKCQLGDVIRAKDEKLDATVVENGENWSVGQRQLVCLGRVLLKKSNILVLDEATASVDSATDGVIQKIINQEFKDRTVVTIAHRIHTVIESDLVLVLSDGRIAEFDSPAKLLQREDSFFSKLIKEYSLRSNHFAGSNDLLS

SEQ ID NO: 81921 - protein, 1018 aa, Arabidopsis thaliana
  peptide (1)..(1018): Ceres Seq. ID no. 12662076
MLPIQIFSAIYILQKHLGLGALAALVTTLMVMACNYPLTRLQRNYQSDIMNAKDDRMKATSEILKNMKILKLQAWDNQFLNKVKTLRKKEYDCLWKSLRLQDFTTFILWGAPSLISVVTFVTCMLMGVKLTAGAVLSALATFQMLQSPIFGLPDLLSALVQSKVSADRIASYLQQSETQKDAVEYCSNDHTEFSVEIENGAFSWEPESSRPTLDDIELKVKSGMKVAICGAVGSGKSSLPSSILGEIQKLKGTVRVSGKQAYVPQSPWILSGTIRDNILFGSIYESEKYERTVKACALIKDFELFSNGDLTEIGERGINMSGGQKQRIQIARAVYQNADIYLLDDPFSAVDAHTGRELFEDCLMGILKDKTVLYVTHQVEFLPAADLILVMQNGRVMQAGKFEELLKQNIGFEVLTQCDSEHNISTENKKKEAKLVQDEETEKGVIGKEVYLTYLTTVKGGLLVPFIILAQSCFQMLQIASNYWMAWTAPPTAESIPKLGMGRILLVYALLAAGSSLCVLARTILVAIGGLSTAETFFSRMLCSIFRAPMSYFDSTPTGRILNRASTDQSVLDLEMAVKLGWCAFSIIQIVGTIFVMSQVAWQRYYTPTERELSRMSGVERAPILHHFAESLAGATTIRAFDQRDRFISSNLVLIDSHSRPWFHVASAMEWLSFRLNLLSHFVFAFSLVLLVTLPEGVINPSIAGLGVTYGLSLNVLQATVIWNICNAENKMISVERILQHSKIPSEAPLVIDDQRPLDNWPNVGSIVFRDLQVRYAEHFPAVLKNITCAFPGGKKIGVVGRTGSGKSTLIQALFRIVEPSHGTIVIDNVDITKIGLHDLRSRLGIIPQDNALFDGTIRLNLDPLAQYTDREIWEALDKCQLGDVIRAKDEKLDATVVENGENWSVGQRQLVCLGRVLLKKSNILVLDEATASVDSATDGVIQKIINQEFKDRTVVTIAHRIHTVIESDLVLVLSDGRIAEFDSPAKLLQREDSFFSKLIKEYSLRSNHFAGSNDLLS

SEQ ID NO: 81922 - protein, 989 aa, Arabidopsis thaliana
  peptide (1)..(989): Ceres Seq. ID no. 12662077
MVMACNYPLTRLQRNYQSDIMNAKDDRMKATSEILKNMKILKLQAWDNQFLNKVKTLRKKEYDCLWKSLRLQDFTTFILWGAPSLISVVTFVTCMLMGVKLTAGAVLSALATFQMLQSPIFGLPDLLSALVQSKVSADRIASYLQQSETQKDAVEYCSNDHTEFSVEIENGAFSWEPESSRPTLDDIELKVKSGMKVAICGAVGSGKSSLPSSILGEIQKLKGTVRVSGKQAYVPQSPWILSGTIRDNILFGSIYESEKYERTVKACALIKDFELFSNGDLTEIGERGINMSGGQKQRIQIARAVYQNADIYLLDDPFSAVDAHTGRELFEDCLMGILKDKTVLYVTHQVEFLPAADLILVMQNGRVMQAGKFEELLKQNIGFEVLTQCDSEHNISTENKKKEAKLVQDEETEKGVIGKEVYLTYLTTVKGGLLVPFIILAQSCFQMLQIASNYWMAWTAPPTAESIPKLGMGRILLVYALLAAGSSLCVLARTILVAIGGLSTAETFFSRMLCSIFRAPMSYFDSTPTGRILNRASTDQSVLDLEMAVKLGWCAFSIIQIVGTIFVMSQVAWQRYYTPTERELSRMSGVERAPILHHFAESLAGATTIRAFDQRDRFISSNLVLIDSHSRPWFHVASAMEWLSFRLNLLSHFVFAFSLVLLVTLPEGVINPSIAGLGVTYGLSLNVLQATVIWNICNAENKMISVERILQHSKIPSEAPLVIDDQRPLDNWPNVGSIVFRDLQVRYAEHFPAVLKNITCAFPGGKKIGVVGRTGSGKSTLIQALFRIVEPSHGTIVIDNVDITKIGLHDLRSRLGIIPQDNALFDGTIRLNLDPLAQYTDREIWEALDKCQLGDVIRAKDEKLDATVVENGENWSVGQRQLVCLGRVLLKKSNILVLDEATASVDSATDGVIQKIINQEFKDRTVVTIAHRIHTVIESDLVLVLSDGRIAEFDSPAKLLQREDSFFSKLIKEYSLRSNHFAGSNDLLS

SEQ ID NO: 81923 - DNA, 1031 bp, Arabidopsis thaliana
  misc_feature (1)..(1031): Ceres Seq. ID no. 12662104
  misc_feature (1)..(1031): Ortholog of  Ceres SEQ ID NO 15170627 as cited in SEQ ID NO 52703
  misc_feature (1)..(1031): Ortholog of  Ceres SEQ ID NO 13655124 as cited in SEQ ID NO 62896
  misc_feature (1)..(1031): Ortholog of  Ceres SEQ ID NO 13597493 as cited in SEQ ID NO 64613
  misc_feature (1)..(1031): Ortholog of  Ceres SEQ ID NO 14313540 as cited in SEQ ID NO 68110
  misc_feature (1)..(1031): Ortholog of  Ceres SEQ ID NO 13596175 as cited in SEQ ID NO 68297
attctttgtctaaaacccagaaataaaaaggttcgaaaatggcagaggaaactccaagatatgctgtagttactggagcaaacagagggattggatttgagatatgcagacaattagctagtgaagggattagagttgttttgacctctagagacgaaaacagaggacttgaagctgttgagacactgaagaaagagcttgagatttctgatcaaagccttctttttcatcagcttgatgtcgctgatcctgctagtatcacatctcttgctgagtttgtgaaaacccaatttgggaaactcgatatcttggtcaataatgcagggattggtggtataatcactgatgctgaagctttaagagctggggcagggaaagaaggtttcaagtgggatgaaatcatcacggagacttatgagttaactgaagaatgcatcaagataaactactatggaccaaagagaatgtgtgaggcgtttattcctcttttgaagttatctgattcaccaagaatcgtcaatgtatcatcctccatgggtcaactaaagaatgtactaaacgaatgggcaaaaggaatcctgagcgacgcagagaatctcactgaggaaagaatcgaccaagtgatcaaccaacttctcaatgatttcaaagaaggtacagttaaggaaaaaaactgggctaaatttatgtcggcttatgtggtttcaaaggcaagtttgaatggttacacgagggtcctggcgaagaaacatcccgagtttcgcgtaaacgctgtgtgtcctggatttgttaagacagatatgaacttcaagactggagtcttgtctgtggaagaaggagcttcaagtcctgtgaggttggctttacttccgcatcaagaaactccttctggttgtttctttagtcgcaagcaagtttcagaattctgaatcttcttttgtgtgagaataataagccaaaaatgtagtaatttaatgagaggattatcgtttgaatgtcgaacatatactcttagataaacaaaaactttt

SEQ ID NO: 81924 - protein, 296 aa, Arabidopsis thaliana
  peptide (1)..(296): Ceres Seq. ID no. 12662105
MAEETPRYAVVTGANRGIGFEICRQLASEGIRVVLTSRDENRGLEAVETLKKELEISDQSLLFHQLDVADPASITSLAEFVKTQFGKLDILVNNAGIGGIITDAEALRAGAGKEGFKWDEIITETYELTEECIKINYYGPKRMCEAFIPLLKLSDSPRIVNVSSSMGQLKNVLNEWAKGILSDAENLTEERIDQVINQLLNDFKEGTVKEKNWAKFMSAYVVSKASLNGYTRVLAKKHPEFRVNAVCPGFVKTDMNFKTGVLSVEEGASSPVRLALLPHQETPSGCFFSRKQVSEF

SEQ ID NO: 81925 - protein, 154 aa, Arabidopsis thaliana
  peptide (1)..(154): Ceres Seq. ID no. 12662106
MCEAFIPLLKLSDSPRIVNVSSSMGQLKNVLNEWAKGILSDAENLTEERIDQVINQLLNDFKEGTVKEKNWAKFMSAYVVSKASLNGYTRVLAKKHPEFRVNAVCPGFVKTDMNFKTGVLSVEEGASSPVRLALLPHQETPSGCFFSRKQVSEF

SEQ ID NO: 81926 - DNA, 1047 bp, Arabidopsis thaliana
  misc_feature (1)..(1047): Ceres Seq. ID no. 12662115
  misc_feature (1)..(1047): Ortholog of  Ceres SEQ ID NO 14308803 as cited in SEQ ID NO 55038
  misc_feature (1)..(1047): Ortholog of  Ceres SEQ ID NO 13595437 as cited in SEQ ID NO 56562
atggcgttatccgggtcgggttcttactatatccaaagaggaatccccggttctggtcctcctcctcctcaaactcaaccaacgtttcacggatcacaaggatttcatcatttcaccaattccatctctccttttgggtcaaacccaaacccaaatccaaaccctggaggtgtctctactggattcgtgtctcctcctttacccgttgactcttctccggctgattcgtcagcggcggcggcgggagctttggttgctcctccttcaggtgacacgtctgtgaagcggaagagaggacggcctagaaaatatggacaagatggtggttctgtttcgttggcattgtctccttctatctccaacgtttccccgaactctaacaaacgtggccgtggaagacctcctggctccggcaagaagcaacggctatcttccattggtgaaatgatgccttcatcaactgggatgagcttcacaccgcatgtaatcgtagtttccattggtgaagacattgcttcaaaggttatatcgttctcgcatcaaggtccacgagcgatatgtgtcttatccgcaagtggtgctgtctctactgcaactcttcttcagccagcaccttctcatggaactattatatacgagggtctattcgagctcatatctctctcaacttcttatctgaacacaactgacaatgactacccaaaccgcactggaagtctagcggtctcacttgctagccccgatggtcgtgtcattggtggtggaattggaggtcctctaatagcagcaagccaagtccaggtcattgttggcagcttcatttgggcaattccgaaagggaagattaaaaaacgtgaagaaacttctgaagatgtccaagatactgatgctttggaaaacaacaacgataacacagcagcaacgtcacctcctgttcctcagcaaagtcagaacattgttcagactcctgtaggcatttggtcaactggttcaaggtcaatggatatgcatcacccccatatggacattgatctaatgcgtggatga

SEQ ID NO: 81927 - protein, 348 aa, Arabidopsis thaliana; identical to SEQ ID NO: 47287
  peptide (1)..(348): Ceres Seq. ID no. 12662116

SEQ ID NO: 81928 - protein, 200 aa, Arabidopsis thaliana; identical to SEQ ID NO: 47288
  peptide (1)..(200): Ceres Seq. ID no. 12662117

SEQ ID NO: 81929 - protein, 199 aa, Arabidopsis thaliana
  peptide (1)..(199): Ceres Seq. ID no. 12662118
MPSSTGMSFTPHVIVVSIGEDIASKVISFSHQGPRAICVLSASGAVSTATLLQPAPSHGTIIYEGLFELISLSTSYLNTTDNDYPNRTGSLAVSLASPDGRVIGGGIGGPLIAASQVQVIVGSFIWAIPKGKIKKREETSEDVQDTDALENNNDNTAATSPPVPQQSQNIVQTPVGIWSTGSRSMDMHHPHMDIDLMRG

SEQ ID NO: 81930 - DNA, 1113 bp, Arabidopsis thaliana
  misc_feature (1)..(1113): Ceres Seq. ID no. 12662146
  misc_feature (1)..(1113): Ortholog of  Ceres SEQ ID NO 12636774 as cited in SEQ ID NO 372
  misc_feature (1)..(1113): Ortholog of  Ceres SEQ ID NO 12578315 as cited in SEQ ID NO 62451
  misc_feature (1)..(1113): Ortholog of  Ceres SEQ ID NO 12617090 as cited in SEQ ID NO 64005
  misc_feature (1)..(1113): Ortholog of  Ceres SEQ ID NO 13597233 as cited in SEQ ID NO 64370
  misc_feature (1)..(1113): Ortholog of  Ceres SEQ ID NO 13584577 as cited in SEQ ID NO 65298
atggattcaacagccaccgttgcaagtgatcgtcttagtcaactaaactctttcgaggagactatgacaggcgtgaaaggccttgttgattccggaatcaaagaggttccagctatgttccgtgagcctccagctattttagcaagccgaaaaccaccactagctttgcagttcacgatcccaaccatcgatctgaacggaggagtagtgtactacaagaatcaagattcagttacacggagaagcatggttgagaagataggagatgcagcggagaaatggggtttcttccaggtggttaaccacgggatcccgctcgacgtgctggagaaggtgaaagaagggattcgcgcgtttcacgagcaggatgctgaattgaagaaacggttctactctcgtgatcacactcgaaaaatggtttactatagtaacttggatctcttcaccgctatgaaagcgagttggagagataccatgtgtgcctatatggccccggatcctcccacatcggaggacttgcccgaggtttgtggggagattatgatggagtatgcaaaggaaataatgaatttaggtgaattgatctttgagcttctatcagaggctctagggttgaataattctaatcacctcaaagacatggattgcagcaagtctttggtcttgttcggccagtactatccaccttgtccgcagcctgaccatactttaggcttaagcaagcacaccgatttttcttttctcaccattgttcttcaggggaatctcggtgggcttcaagttctccatgataaacaatattggatcgatattcctcccgtccctggggctcttgtcgttaacctcggagatcttctccagcttataagcaatggcaagttcataagcgtggagcacagggtgatagcaaatagagcggctgaaccgcggatttcagtgccatgtttcttcagcaccgtgatgagggagagccatcgagtatatggacccataaaagagcttctgtcagaacaaaaccctcccaagtatagggacaccaccatctccgagttcgcaagcatgtacgcgtctaaagagatcaatacctctgcgttactccgtttagagatctga

SEQ ID NO: 81931 - protein, 370 aa, Arabidopsis thaliana
  peptide (1)..(370): Ceres Seq. ID no. 12662147
MDSTATVASDRLSQLNSFEETMTGVKGLVDSGIKEVPAMFREPPAILASRKPPLALQFTIPTIDLNGGVVYYKNQDSVTRRSMVEKIGDAAEKWGFFQVVNHGIPLDVLEKVKEGIRAFHEQDAELKKRFYSRDHTRKMVYYSNLDLFTAMKASWRDTMCAYMAPDPPTSEDLPEVCGEIMMEYAKEIMNLGELIFELLSEALGLNNSNHLKDMDCSKSLVLFGQYYPPCPQPDHTLGLSKHTDFSFLTIVLQGNLGGLQVLHDKQYWIDIPPVPGALVVNLGDLLQLISNGKFISVEHRVIANRAAEPRISVPCFFSTVMRESHRVYGPIKELLSEQNPPKYRDTTISEFASMYASKEINTSALLRLEI

SEQ ID NO: 81932 - protein, 349 aa, Arabidopsis thaliana
  peptide (1)..(349): Ceres Seq. ID no. 12662148
MTGVKGLVDSGIKEVPAMFREPPAILASRKPPLALQFTIPTIDLNGGVVYYKNQDSVTRRSMVEKIGDAAEKWGFFQVVNHGIPLDVLEKVKEGIRAFHEQDAELKKRFYSRDHTRKMVYYSNLDLFTAMKASWRDTMCAYMAPDPPTSEDLPEVCGEIMMEYAKEIMNLGELIFELLSEALGLNNSNHLKDMDCSKSLVLFGQYYPPCPQPDHTLGLSKHTDFSFLTIVLQGNLGGLQVLHDKQYWIDIPPVPGALVVNLGDLLQLISNGKFISVEHRVIANRAAEPRISVPCFFSTVMRESHRVYGPIKELLSEQNPPKYRDTTISEFASMYASKEINTSALLRLEI

SEQ ID NO: 81933 - protein, 332 aa, Arabidopsis thaliana
  peptide (1)..(332): Ceres Seq. ID no. 12662149
MFREPPAILASRKPPLALQFTIPTIDLNGGVVYYKNQDSVTRRSMVEKIGDAAEKWGFFQVVNHGIPLDVLEKVKEGIRAFHEQDAELKKRFYSRDHTRKMVYYSNLDLFTAMKASWRDTMCAYMAPDPPTSEDLPEVCGEIMMEYAKEIMNLGELIFELLSEALGLNNSNHLKDMDCSKSLVLFGQYYPPCPQPDHTLGLSKHTDFSFLTIVLQGNLGGLQVLHDKQYWIDIPPVPGALVVNLGDLLQLISNGKFISVEHRVIANRAAEPRISVPCFFSTVMRESHRVYGPIKELLSEQNPPKYRDTTISEFASMYASKEINTSALLRLEI

SEQ ID NO: 81934 - DNA, 1314 bp, Arabidopsis thaliana
  misc_feature (1)..(1314): Ceres Seq. ID no. 12662175
  misc_feature (1)..(1314): Ortholog of  Ceres SEQ ID NO 15168502 as cited in SEQ ID NO 60095
atggcctctctattctcttcagttctcttgtctctttgtttactctcttcactttttctctcaaatgcaaacgctaagccaaaactaggcttcaccgcggatctaatccaccgtgattctcctaaatcgccgttctataacccgatggaaacctcttcccagcgtctacgaaacgcgatccaccgatccgttaaccgtgttttccatttcactgaaaaggataacacaccacaaccacagattgacctcacctcaaatagcggtgaatatctcatgaacgtatccattggaacacctcctttcccgatcatggccatcgccgacaccggaagtgatctcctctggacgcagtgcgcaccatgcgatgattgttacactcaagttgatcctctctttgaccctaaaacgtcttccacatacaaagacgtttcttgctcctcaagtcaatgtactgccctagaaaatcaagcctcttgttccacaaatgacaacacttgttcttactcattgtcttacggggataactcatacacaaagggtaacatcgccgtggataccttaacgctcggctccagcgatacccgccctatgcagcttaagaatattattatcggttgtggtcacaacaacgctggaacgtttaacaagaaaggctctggaatcgtcggactaggtggtggtccggtttcgcttatcaagcaacttggcgactccatcgacggtaaattctcatactgcttggttcctctaacttccaaaaaggatcaaacgagtaaaatcaacttcggaaccaatgccatcgtgtcgggatcaggagttgtctcaactcctctgatcgcaaaggcgtctcaagagaccttctattacctaaccctaaaatccattagcgtgggaagcaagcaaatccaatactcaggctcagattctgaaagcagcgagggaaacatcatcatcgattcaggcacaactttaacgttattaccgactgaattttactccgagctcgaggatgcggttgcatcctctatcgatgctgagaagaagcaagatccacaaagcggtttgagtctatgttacagtgcaaccggagatctaaaagttccagtcattactatgcattttgatggagccgatgtgaagcttgactcctccaatgcctttgtacaagtctcggaggatttggtttgctttgccttccgcggaagcccgagtttctccatatacggtaatgtggcgcagatgaactttcttgttggatacgacactgtttccaaaacggtgtcatttaagccaacagattgtgcaaagatgtag

SEQ ID NO: 81935 - protein, 437 aa, Arabidopsis thaliana
  peptide (1)..(437): Ceres Seq. ID no. 12662176
MASLFSSVLLSLCLLSSLFLSNANAKPKLGFTADLIHRDSPKSPFYNPMETSSQRLRNAIHRSVNRVFHFTEKDNTPQPQIDLTSNSGEYLMNVSIGTPPFPIMAIADTGSDLLWTQCAPCDDCYTQVDPLFDPKTSSTYKDVSCSSSQCTALENQASCSTNDNTCSYSLSYGDNSYTKGNIAVDTLTLGSSDTRPMQLKNIIIGCGHNNAGTFNKKGSGIVGLGGGPVSLIKQLGDSIDGKFSYCLVPLTSKKDQTSKINFGTNAIVSGSGVVSTPLIAKASQETFYYLTLKSISVGSKQIQYSGSDSESSEGNIIIDSGTTLTLLPTEFYSELEDAVASSIDAEKKQDPQSGLSLCYSATGDLKVPVITMHFDGADVKLDSSNAFVQVSEDLVCFAFRGSPSFSIYGNVAQMNFLVGYDTVSKTVSFKPTDCAKM

SEQ ID NO: 81936 - protein, 389 aa, Arabidopsis thaliana
  peptide (1)..(389): Ceres Seq. ID no. 12662177
METSSQRLRNAIHRSVNRVFHFTEKDNTPQPQIDLTSNSGEYLMNVSIGTPPFPIMAIADTGSDLLWTQCAPCDDCYTQVDPLFDPKTSSTYKDVSCSSSQCTALENQASCSTNDNTCSYSLSYGDNSYTKGNIAVDTLTLGSSDTRPMQLKNIIIGCGHNNAGTFNKKGSGIVGLGGGPVSLIKQLGDSIDGKFSYCLVPLTSKKDQTSKINFGTNAIVSGSGVVSTPLIAKASQETFYYLTLKSISVGSKQIQYSGSDSESSEGNIIIDSGTTLTLLPTEFYSELEDAVASSIDAEKKQDPQSGLSLCYSATGDLKVPVITMHFDGADVKLDSSNAFVQVSEDLVCFAFRGSPSFSIYGNVAQMNFLVGYDTVSKTVSFKPTDCAKM

SEQ ID NO: 81937 - protein, 346 aa, Arabidopsis thaliana
  peptide (1)..(346): Ceres Seq. ID no. 12662178
MNVSIGTPPFPIMAIADTGSDLLWTQCAPCDDCYTQVDPLFDPKTSSTYKDVSCSSSQCTALENQASCSTNDNTCSYSLSYGDNSYTKGNIAVDTLTLGSSDTRPMQLKNIIIGCGHNNAGTFNKKGSGIVGLGGGPVSLIKQLGDSIDGKFSYCLVPLTSKKDQTSKINFGTNAIVSGSGVVSTPLIAKASQETFYYLTLKSISVGSKQIQYSGSDSESSEGNIIIDSGTTLTLLPTEFYSELEDAVASSIDAEKKQDPQSGLSLCYSATGDLKVPVITMHFDGADVKLDSSNAFVQVSEDLVCFAFRGSPSFSIYGNVAQMNFLVGYDTVSKTVSFKPTDCAKM

SEQ ID NO: 81938 - DNA, 970 bp, Arabidopsis thaliana
  misc_feature (1)..(970): Ceres Seq. ID no. 12662411
  misc_feature (1)..(970): Ortholog of  Ceres SEQ ID NO 13595569 as cited in SEQ ID NO 56778
  misc_feature (1)..(970): Ortholog of  Ceres SEQ ID NO 12611159 as cited in SEQ ID NO 59821
ttctcaacacaacactaaagacaattgtaccaaccacacaaccacaagagagagaaaagtgagaatgggaaagagagcaactactagtgtgaggagagaagagttaaacagaggagcttggactgatcatgaagacaagatccttagagattacatcaccactcacggcgaaggcaaatggagcactctccctaaccaagctggtctcaagaggtgtggcaaaagctgtagacttcggtggaagaactacctaagaccggggataaagcgcggtaacatctcatctgatgaagaagaactcataatccgtctccataatcttcttggaaacagatggtcgttgatagctgggaggcttccaggccgaacagacaatgaaataaagaatcattggaactcaaacctccgcaaaagacttcccaaaactcaaaccaagcaaccaaaacgtataaaacattcgacgaacaacgagaataatgtatgtgttatacgtacaaaggcgattaggtgctcaaagactcttctcttctcggatctctctcttcagaagaagagtagtactagtccactacctctgaaagaacaagagatggatcaaggtggatcttcgttgatgggagatctcgaattcgatttcgataggatccattcggagtttcacttcccggatttgatggattttgatggtttggactgtggaaacgttacatctcttgtttcatctaacgagattttgggagagttggttcctgctcaaggtaatctcgatctcaatagacctttcacttcttgtcatcatcgtggcgacgatgaagattggctccgagacttcacttgttgagcctatattgcaaaaacctacgttaatacatatttctctatacggacaaaagtatatctgtatttgtctgaacgcttctaattactaacttactaaggagaccaagaaatacaaataattatacgatcc

SEQ ID NO: 81939 - protein, 279 aa, Arabidopsis thaliana
  peptide (1)..(279): Ceres Seq. ID no. 12662412
SQHNTKDNCTNHTTTRERKVRMGKRATTSVRREELNRGAWTDHEDKILRDYITTHGEGKWSTLPNQAGLKRCGKSCRLRWKNYLRPGIKRGNISSDEEELIIRLHNLLGNRWSLIAGRLPGRTDNEIKNHWNSNLRKRLPKTQTKQPKRIKHSTNNENNVCVIRTKAIRCSKTLLFSDLSLQKKSSTSPLPLKEQEMDQGGSSLMGDLEFDFDRIHSEFHFPDLMDFDGLDCGNVTSLVSSNEILGELVPAQGNLDLNRPFTSCHHRGDDEDWLRDFTC

SEQ ID NO: 81940 - protein, 258 aa, Arabidopsis thaliana
  peptide (1)..(258): Ceres Seq. ID no. 12662413
MGKRATTSVRREELNRGAWTDHEDKILRDYITTHGEGKWSTLPNQAGLKRCGKSCRLRWKNYLRPGIKRGNISSDEEELIIRLHNLLGNRWSLIAGRLPGRTDNEIKNHWNSNLRKRLPKTQTKQPKRIKHSTNNENNVCVIRTKAIRCSKTLLFSDLSLQKKSSTSPLPLKEQEMDQGGSSLMGDLEFDFDRIHSEFHFPDLMDFDGLDCGNVTSLVSSNEILGELVPAQGNLDLNRPFTSCHHRGDDEDWLRDFTC

SEQ ID NO: 81941 - DNA, 1302 bp, Arabidopsis thaliana
  misc_feature (1)..(1302): Ceres Seq. ID no. 12662449
  misc_feature (1)..(1302): Ortholog of  Ceres SEQ ID NO 13594209 as cited in SEQ ID NO 59089
  misc_feature (1)..(1302): Ortholog of  Ceres SEQ ID NO 13502874 as cited in SEQ ID NO 66298
  misc_feature (1)..(1302): Ortholog of  Ceres SEQ ID NO 12614124 as cited in SEQ ID NO 68392
atggttgttatctcttccaaggaagcagctaaacaagttctaaagtctcgcgatctagagacatgctcccgacctaagctggttgcgaacgggttgtttactcgcaacttcaaagacattgctttcgctcagtatggtgaggactggcgagagatgaaaaagctcgtggggcttgagctcttcaatccaaagaagcacaaatttttcaggtatatcagagaggaagagggtgacttgctggtcaagaaactatccaaatcttctcaaacacaaactttagtggatttgagaaaagcctttttctccttcaccgcgggtatcatatttagagtctcctttggacagaacttccgcgagtgcgatttcatcgatatggacagacttgaagagttggtgcaagagtcagagaccaacgtattcagcttcgcattcactgacttcttcccaacgggtctcggttggcttgtagaccggatctccggtcaacattcgaggatcgagaaagccttttcaaaactcaccaagttctttcaacatgtaatcgatgaggagttgaagattggacaatcccaagatcactcaaacctcgtcagttccatgttggatatgatcaatagatccactgaatacggttctttcaagatcacttctgatcatctcatagcaatgatgacggacatagttttggggggagtgaacgcaggaacaatcacaatgatatggacgatgacagagctaaccagacatccaagagtgatgaagaaactccgagaagagattcgagcaacacttggacccaacaaagagagaatcacagaagaagatctagagaaagttgagtacttgaagttggtgatcaaagaaactttcagattacatccaccaggtcctttcttgctcccaagacaagtaatgtccgacatagagattcaaggctaccacattcccaagaacgcacatatcaagatcagcacttacgccataggacgtgatcccaaatgttggactaatcctgaagaattcaatcctgagaggtttgcaaatacctcaatcaactacaaaggtcagcattacgagcttttaccctttggagccggtcgtaggagctgtcctggtatgactttgggaatcaccattcttgagctaggccttcttaacattctttactacttcgattggagtttacccaatggaatgaccattaaagacattgacatggaagaagatggagctttgaccatcgccaagaaagtccctcttgagctcatacctacgctcccagcatcactatgcattaaataa

SEQ ID NO: 81942 - protein, 433 aa, Arabidopsis thaliana
  peptide (1)..(433): Ceres Seq. ID no. 12662450
MVVISSKEAAKQVLKSRDLETCSRPKLVANGLFTRNFKDIAFAQYGEDWREMKKLVGLELFNPKKHKFFRYIREEEGDLLVKKLSKSSQTQTLVDLRKAFFSFTAGIIFRVSFGQNFRECDFIDMDRLEELVQESETNVFSFAFTDFFPTGLGWLVDRISGQHSRIEKAFSKLTKFFQHVIDEELKIGQSQDHSNLVSSMLDMINRSTEYGSFKITSDHLIAMMTDIVLGGVNAGTITMIWTMTELTRHPRVMKKLREEIRATLGPNKERITEEDLEKVEYLKLVIKETFRLHPPGPFLLPRQVMSDIEIQGYHIPKNAHIKISTYAIGRDPKCWTNPEEFNPERFANTSINYKGQHYELLPFGAGRRSCPGMTLGITILELGLLNILYYFDWSLPNGMTIKDIDMEEDGALTIAKKVPLELIPTLPASLCIK

SEQ ID NO: 81943 - protein, 382 aa, Arabidopsis thaliana
  peptide (1)..(382): Ceres Seq. ID no. 12662451
MKKLVGLELFNPKKHKFFRYIREEEGDLLVKKLSKSSQTQTLVDLRKAFFSFTAGIIFRVSFGQNFRECDFIDMDRLEELVQESETNVFSFAFTDFFPTGLGWLVDRISGQHSRIEKAFSKLTKFFQHVIDEELKIGQSQDHSNLVSSMLDMINRSTEYGSFKITSDHLIAMMTDIVLGGVNAGTITMIWTMTELTRHPRVMKKLREEIRATLGPNKERITEEDLEKVEYLKLVIKETFRLHPPGPFLLPRQVMSDIEIQGYHIPKNAHIKISTYAIGRDPKCWTNPEEFNPERFANTSINYKGQHYELLPFGAGRRSCPGMTLGITILELGLLNILYYFDWSLPNGMTIKDIDMEEDGALTIAKKVPLELIPTLPASLCIK

SEQ ID NO: 81944 - protein, 309 aa, Arabidopsis thaliana
  peptide (1)..(309): Ceres Seq. ID no. 12662452
MDRLEELVQESETNVFSFAFTDFFPTGLGWLVDRISGQHSRIEKAFSKLTKFFQHVIDEELKIGQSQDHSNLVSSMLDMINRSTEYGSFKITSDHLIAMMTDIVLGGVNAGTITMIWTMTELTRHPRVMKKLREEIRATLGPNKERITEEDLEKVEYLKLVIKETFRLHPPGPFLLPRQVMSDIEIQGYHIPKNAHIKISTYAIGRDPKCWTNPEEFNPERFANTSINYKGQHYELLPFGAGRRSCPGMTLGITILELGLLNILYYFDWSLPNGMTIKDIDMEEDGALTIAKKVPLELIPTLPASLCIK

SEQ ID NO: 81945 - DNA, 1290 bp, Arabidopsis thaliana
  misc_feature (1)..(1290): Ceres Seq. ID no. 12662525
  misc_feature (1)..(1290): Ortholog of  Ceres SEQ ID NO 13502874 as cited in SEQ ID NO 66298
  misc_feature (1)..(1290): Ortholog of  Ceres SEQ ID NO 12614124 as cited in SEQ ID NO 68392
atgtccctccgacttggatcccgtctagtctacgtggtgtcgtcacataaggttgcggcagaggagtgctttggcaagaacgacgtcgttctagctaaccggccacaggtgatcatcggaaaacatgttggttataacaatacaaacatgatcgctgcaccttacggtgatcactggcgtaacctccgtcgcctctgcactatcgagatcttttcaacacaccgccttaactgctttctttatgtccgtaccgacgaagtacgtcgccttataagccgcctctctcgtctcgcaggaaccaaaaaaactgttgtggaattgaaaccaatgcttatggacttgacattcaacaacataatgagaatgatgaccggaaaacgatactacggtgaagaaacaaccgatgaggaagaagcaaagcgtgtccgtaagttggtagcagatgttggggctaacacgagttcaggcaacgccgttgactacgtccccatcctcagactgttttcaagttatgaaaatagggttaaaaagttaggagaggagacagataagtttttacaaggtctcattgacgataaacgtgggcaacaagaaaccggtactacaatgatcgatcatttgcttgtcctccaaaaatctgatattgagtattacactgatcaaatcatcaaaggcatcatactgataatggtaatagcagggactaacacatcagcagtcactctagaatgggcactttccaatttgcttaaccatcctgacgtaatatctaaagcgagagacgaaatcgataaccgggttggtttagaccggcttatcgaagaagcagatcttagcgagctaccatatctaaagaacattgtccttgagacccttaggctacacccagctacaccattgctagtcccacacatggcatcagaagattgcaagataggatcctacgatatgccacgtggtacaacgttgttggtgaatgcatgggccatacatagggatccaaacacgtgggatgatccggatagctttaaaccagagcggtttgagaaagaagaggaagcacaaaagcttctggcgtttggattaggtagaagagcgtgtcctggatcgggtctggcccaacgaatcgtgggactagctctcgggtcattgatacaatgctttgaatgggagagagttgggaatgtggaagtggatatgaaggaaggagttgggaatactgtacccaaagcgattcctttgaaagctatttgcaaagctcgtccatttctacataagattatttcctaa

SEQ ID NO: 81946 - protein, 429 aa, Arabidopsis thaliana; identical to SEQ ID NO: 42884
  peptide (1)..(429): Ceres Seq. ID no. 12662526

SEQ ID NO: 81947 - protein, 380 aa, Arabidopsis thaliana
  peptide (1)..(380): Ceres Seq. ID no. 12662527
MIAAPYGDHWRNLRRLCTIEIFSTHRLNCFLYVRTDEVRRLISRLSRLAGTKKTVVELKPMLMDLTFNNIMRMMTGKRYYGEETTDEEEAKRVRKLVADVGANTSSGNAVDYVPILRLFSSYENRVKKLGEETDKFLQGLIDDKRGQQETGTTMIDHLLVLQKSDIEYYTDQIIKGIILIMVIAGTNTSAVTLEWALSNLLNHPDVISKARDEIDNRVGLDRLIEEADLSELPYLKNIVLETLRLHPATPLLVPHMASEDCKIGSYDMPRGTTLLVNAWAIHRDPNTWDDPDSFKPERFEKEEEAQKLLAFGLGRRACPGSGLAQRIVGLALGSLIQCFEWERVGNVEVDMKEGVGNTVPKAIPLKAICKARPFLHKIIS

SEQ ID NO: 81948 - protein, 320 aa, Arabidopsis thaliana
  peptide (1)..(320): Ceres Seq. ID no. 12662528
MLMDLTFNNIMRMMTGKRYYGEETTDEEEAKRVRKLVADVGANTSSGNAVDYVPILRLFSSYENRVKKLGEETDKFLQGLIDDKRGQQETGTTMIDHLLVLQKSDIEYYTDQIIKGIILIMVIAGTNTSAVTLEWALSNLLNHPDVISKARDEIDNRVGLDRLIEEADLSELPYLKNIVLETLRLHPATPLLVPHMASEDCKIGSYDMPRGTTLLVNAWAIHRDPNTWDDPDSFKPERFEKEEEAQKLLAFGLGRRACPGSGLAQRIVGLALGSLIQCFEWERVGNVEVDMKEGVGNTVPKAIPLKAICKARPFLHKIIS

SEQ ID NO: 81949 - DNA, 1011 bp, Arabidopsis thaliana
  misc_feature (1)..(1011): Ceres Seq. ID no. 12662573
  misc_feature (1)..(1011): Ortholog of  Ceres SEQ ID NO 13596030 as cited in SEQ ID NO 62043
atggtggtggattcgtctgcacttaacgtggagaatgattggaaacctgagagaactctagttttactcggtcgaacgggtaatggtaaaagtgcaacgggaaacagcatcctaggtaaaactatgtttcagtcaaaggcaagaggaaaattcattaccaaagaatgtaagctacataaatccaagctaccaaatggtctaaccatcaatgttatcgacactcctggtctgtttagtgcttcctccacaacggatttcaccatcagagaaatcgttagatgcttacttctagctaaaggcggtatcgatgcagtgcttcttgttttctctttaaggaatcggttaacagaagaagaacaatcaacgcttcgtacattaaagatccttttcggaagtcaaatcgttgactatatcatcgttgttttcaccaatgaggatgcacttgagtgtggagaaactctggatgattatttggaagattgtcctgagtttcaggagattctcgaagaatgtgatgatcgtaaagtgttgtttgacaatagttataatgcccccgtgagcaagaaagacagacaagtccatgatcttctcaacctcgttgaacaaatctcaaagaagaacaatggaaaatcttatatggctgacttatcacatgaactaagggagaatgaggccactataaaggaaaagcagaagcagattgaagaaatgaaaggttggtcttcaaaacaagagatatctcaaatgaaaaaggaactagagaaatcgcataacgaaatgcttgaggggataaaagagaagatctctaatcagctgaaggaatcattggaggatgtgaaggagcaattagctaaagcacaagccgagagagaggaaacggagaaaaagatgaatgaaattcagaaactatcttctgatgagatcaggaggctaagagaacaactcaacaaagctgagaaagaaactgcttcgttacgcaccgaactcaacaagaaatgtactgttctttga

SEQ ID NO: 81950 - protein, 336 aa, Arabidopsis thaliana
  peptide (1)..(336): Ceres Seq. ID no. 12662574
MVVDSSALNVENDWKPERTLVLLGRTGNGKSATGNSILGKTMFQSKARGKFITKECKLHKSKLPNGLTINVIDTPGLFSASSTTDFTIREIVRCLLLAKGGIDAVLLVFSLRNRLTEEEQSTLRTLKILFGSQIVDYIIVVFTNEDALECGETLDDYLEDCPEFQEILEECDDRKVLFDNSYNAPVSKKDRQVHDLLNLVEQISKKNNGKSYMADLSHELRENEATIKEKQKQIEEMKGWSSKQEISQMKKELEKSHNEMLEGIKEKISNQLKESLEDVKEQLAKAQAEREETEKKMNEIQKLSSDEIRRLREQLNKAEKETASLRTELNKKCTVL

SEQ ID NO: 81951 - protein, 295 aa, Arabidopsis thaliana
  peptide (1)..(295): Ceres Seq. ID no. 12662575
MFQSKARGKFITKECKLHKSKLPNGLTINVIDTPGLFSASSTTDFTIREIVRCLLLAKGGIDAVLLVFSLRNRLTEEEQSTLRTLKILFGSQIVDYIIVVFTNEDALECGETLDDYLEDCPEFQEILEECDDRKVLFDNSYNAPVSKKDRQVHDLLNLVEQISKKNNGKSYMADLSHELRENEATIKEKQKQIEEMKGWSSKQEISQMKKELEKSHNEMLEGIKEKISNQLKESLEDVKEQLAKAQAEREETEKKMNEIQKLSSDEIRRLREQLNKAEKETASLRTELNKKCTVL

SEQ ID NO: 81952 - DNA, 2178 bp, Arabidopsis thaliana
  misc_feature (1)..(2178): Ceres Seq. ID no. 12662591
  misc_feature (1)..(2178): Ortholog of  Ceres SEQ ID NO 14313963 as cited in SEQ ID NO 59547
atgacggaggaagattttgttgttatctctacgccgcctgtcgatctcaagcgaaagctcgacgaagttgagcttaatggaaatatcgtggatgatagcaatcaaacatctgattcttctcaggctaaacgagcgaagctagaagatgaagctcaagatggtttagattatgggaatacacaagaaaatgggtcttcaatggaggtaaaagaggaagaacagcttcaggaacctaaggaagagaatcaagattctgtaccacttgttgaggaagttcaggatcctattcatgctgatgagtctgaaaataagatttgtagtgtagatcagccaacagatgatcaggttaagcctgaggataaccaacaaggttgtattgaggatgtcaatggtggtgaacatcagaaggtgattgatgacgatagtaaggaagtgaatgatggtagttctcaagagaatggtaaagaagaaaataaggaagtggatggtgaaaaatctcagaaggaggttgatggcacacagtcgacaactcgtaggatagatgtcccaagttcaaaggtaggtgtgttgattggtaaaggtggggagactatacggtatcttcagtttaactctggtgccaaaatccaaattttgagggattcagaagctgatccgagctcagcgttaagaccagtggagataattggaagtgttgcatgcattgaaagtgctgagaagcttatcagtgcagtcatagcagaggctgaagcaggaggttcacctgccctagttgctaggggccatccttccactcatgcgatagggatcccagaacagatagagattaaagttccaaatgataaggttggtctgattattggccgaggtggcgagacaatcaagaatatgcagacaaggtcaggagcacgtactcagttaataccacaacatgcagaaggtgatggattgaaggagaggactgtccgtatatctggagataagatgcagattgatatagcaactgacatgataaaagatgttatgaaccagaatgcaaggccatcatcctattccggtggctataatcagcctgcctaccgtccccaagggccaggcggtccacctcaatggggttcacgaggtcctcatgctccccatccctatgattaccaccctcgtggaccatattcatctcaaggttcatattacaattctcccggtttcggtggctatcctccacagcatatgcctcctagaggtggatatggtactgattgggaccaaagacctccgtattctggtccgtacaattattatggaagacaaggagctcaaagcgctggcccagttccacctccttctggccctgtaccctcccctgcctttggtggtccccctctttcgcaggtaagttatggttacggtcagagccatggcccagagtatggacatgctgctccttactcccagaccggttatcagcagacttacgggcagacgtatgaacagcctaagtatgacagtaatcctccgatgcagccaccttatggaggttcatatccaccagcaggtggtggtcagtcaggctattaccaaatgcagcaacctggtgttaggccttatgggatgcaacaaggtcctgtccagcaaggatatgggcctccacagcctgcagcagcagcttcttccggtgatgtgccttaccaaggtgcaactccagcagcaccgtcatatggcagtactaacatggctccacaacaacaacaatatggctacacgtcaagtgatgggccagtgcaacagcaaacatatccttcctatagttccgctccaccatctgacgcttacaacaatggtacacaaacacctgcaactggtccagcttaccagcagcaaagtgttcagccagcttcttccacctatgaccagactggtgcacagcaggctgcagcagctgggtacggtgggcaagtagctccaaccggtggatacacatatccaacctcacagcctgcttatggaagccaagccgcttattcacaagcagcacctactcaaacaggatatgagcaacagcctgcaactcaagctgcagtgtatgcgactgctccagggaccgcaccagtgaaaacccaatcaccccagtccgcgtatgctcaatacgatgcaagccaggtttacgcaactccacgttaa

SEQ ID NO: 81953 - protein, 725 aa, Arabidopsis thaliana
  peptide (1)..(725): Ceres Seq. ID no. 12662592
MTEEDFVVISTPPVDLKRKLDEVELNGNIVDDSNQTSDSSQAKRAKLEDEAQDGLDYGNTQENGSSMEVKEEEQLQEPKEENQDSVPLVEEVQDPIHADESENKICSVDQPTDDQVKPEDNQQGCIEDVNGGEHQKVIDDDSKEVNDGSSQENGKEENKEVDGEKSQKEVDGTQSTTRRIDVPSSKVGVLIGKGGETIRYLQFNSGAKIQILRDSEADPSSALRPVEIIGSVACIESAEKLISAVIAEAEAGGSPALVARGHPSTHAIGIPEQIEIKVPNDKVGLIIGRGGETIKNMQTRSGARTQLIPQHAEGDGLKERTVRISGDKMQIDIATDMIKDVMNQNARPSSYSGGYNQPAYRPQGPGGPPQWGSRGPHAPHPYDYHPRGPYSSQGSYYNSPGFGGYPPQHMPPRGGYGTDWDQRPPYSGPYNYYGRQGAQSAGPVPPPSGPVPSPAFGGPPLSQVSYGYGQSHGPEYGHAAPYSQTGYQQTYGQTYEQPKYDSNPPMQPPYGGSYPPAGGGQSGYYQMQQPGVRPYGMQQGPVQQGYGPPQPAAAASSGDVPYQGATPAAPSYGSTNMAPQQQQYGYTSSDGPVQQQTYPSYSSAPPSDAYNNGTQTPATGPAYQQQSVQPASSTYDQTGAQQAAAAGYGGQVAPTGGYTYPTSQPAYGSQAAYSQAAPTQTGYEQQPATQAAVYATAPGTAPVKTQSPQSAYAQYDASQVYATPR

SEQ ID NO: 81954 - protein, 659 aa, Arabidopsis thaliana
  peptide (1)..(659): Ceres Seq. ID no. 12662593
MEVKEEEQLQEPKEENQDSVPLVEEVQDPIHADESENKICSVDQPTDDQVKPEDNQQGCIEDVNGGEHQKVIDDDSKEVNDGSSQENGKEENKEVDGEKSQKEVDGTQSTTRRIDVPSSKVGVLIGKGGETIRYLQFNSGAKIQILRDSEADPSSALRPVEIIGSVACIESAEKLISAVIAEAEAGGSPALVARGHPSTHAIGIPEQIEIKVPNDKVGLIIGRGGETIKNMQTRSGARTQLIPQHAEGDGLKERTVRISGDKMQIDIATDMIKDVMNQNARPSSYSGGYNQPAYRPQGPGGPPQWGSRGPHAPHPYDYHPRGPYSSQGSYYNSPGFGGYPPQHMPPRGGYGTDWDQRPPYSGPYNYYGRQGAQSAGPVPPPSGPVPSPAFGGPPLSQVSYGYGQSHGPEYGHAAPYSQTGYQQTYGQTYEQPKYDSNPPMQPPYGGSYPPAGGGQSGYYQMQQPGVRPYGMQQGPVQQGYGPPQPAAAASSGDVPYQGATPAAPSYGSTNMAPQQQQYGYTSSDGPVQQQTYPSYSSAPPSDAYNNGTQTPATGPAYQQQSVQPASSTYDQTGAQQAAAAGYGGQVAPTGGYTYPTSQPAYGSQAAYSQAAPTQTGYEQQPATQAAVYATAPGTAPVKTQSPQSAYAQYDASQVYATPR

SEQ ID NO: 81955 - protein, 429 aa, Arabidopsis thaliana
  peptide (1)..(429): Ceres Seq. ID no. 12662594
MQTRSGARTQLIPQHAEGDGLKERTVRISGDKMQIDIATDMIKDVMNQNARPSSYSGGYNQPAYRPQGPGGPPQWGSRGPHAPHPYDYHPRGPYSSQGSYYNSPGFGGYPPQHMPPRGGYGTDWDQRPPYSGPYNYYGRQGAQSAGPVPPPSGPVPSPAFGGPPLSQVSYGYGQSHGPEYGHAAPYSQTGYQQTYGQTYEQPKYDSNPPMQPPYGGSYPPAGGGQSGYYQMQQPGVRPYGMQQGPVQQGYGPPQPAAAASSGDVPYQGATPAAPSYGSTNMAPQQQQYGYTSSDGPVQQQTYPSYSSAPPSDAYNNGTQTPATGPAYQQQSVQPASSTYDQTGAQQAAAAGYGGQVAPTGGYTYPTSQPAYGSQAAYSQAAPTQTGYEQQPATQAAVYATAPGTAPVKTQSPQSAYAQYDASQVYATPR

SEQ ID NO: 81956 - DNA, 1056 bp, Arabidopsis thaliana
  misc_feature (1)..(1056): Ceres Seq. ID no. 12662623
  misc_feature (1)..(1056): Ortholog of  Ceres SEQ ID NO 13582619 as cited in SEQ ID NO 56520
  misc_feature (1)..(1056): Ortholog of  Ceres SEQ ID NO 14315846 as cited in SEQ ID NO 58094
  misc_feature (1)..(1056): Ortholog of  Ceres SEQ ID NO 13660872 as cited in SEQ ID NO 60830
  misc_feature (1)..(1056): Ortholog of  Ceres SEQ ID NO 15226831 as cited in SEQ ID NO 62916
  misc_feature (1)..(1056): Ortholog of  Ceres SEQ ID NO 12616221 as cited in SEQ ID NO 63291
atgggttcttcgtcgaacggaggagtgccacctggtttccggtttcatccgacggacgaagagcttctccattactacttgaagaagaaaatctcttaccaaaagtttgagatggaagtcatcagagaggttgacttaaacaagcttgagccttgggatttgcaagagagatgcaagataggatcaacaccacaaaacgaatggtacttcttcagccacaaggacaggaaatatccgacggggtcaaggaccaaccgtgctactcatgcagggttctggaaggcgacgggacgtgacaagtgcataaggaactcttacaaaaagataggaatgaggaagacacttgtgttctacaaaggtagagctcctcatggccaaaagactgattggatcatgcatgagtaccgtcttgaagacgctgatgatcctcaagccaaccctagtgaagatggatgggtggtatgtagagtgtttatgaagaaaaatttgttcaaggtagtaaatgaaggtagctcaagcattaactcattggaccaacacaaccatgacgcatctaacaacaaccatgcacttcaagctcgtagctttatgcaccgagacagtccataccagctagtacgtaaccacggagccatgacattcgaacttaacaagcctgaccttgctcttcatcaatacccaccaatcttccacaagccaccttcacttggatttgactactcttcaggacttgcaagggacagtgagagtgcggctagtgaagggttacaataccagcaagcgtgtgagccgggtttagacgttggtacatgtgagacagtggctagtcataatcatcaacaaggtctaggtgaatgggcaatgatggatagacttgtgacttgtcacatgggaaatgaagattcctctagagggattacgtatgaggatggtaacaacaattcgtcctctgtggttcagccagttcccgcgacgaaccagctaacattgcgtagtgagatggatttctggggttattctaaatagatgtttatatgtctttcttatgagtctacg

SEQ ID NO: 81957 - protein, 341 aa, Arabidopsis thaliana
  peptide (1)..(341): Ceres Seq. ID no. 12662624
MGSSSNGGVPPGFRFHPTDEELLHYYLKKKISYQKFEMEVIREVDLNKLEPWDLQERCKIGSTPQNEWYFFSHKDRKYPTGSRTNRATHAGFWKATGRDKCIRNSYKKIGMRKTLVFYKGRAPHGQKTDWIMHEYRLEDADDPQANPSEDGWVVCRVFMKKNLFKVVNEGSSSINSLDQHNHDASNNNHALQARSFMHRDSPYQLVRNHGAMTFELNKPDLALHQYPPIFHKPPSLGFDYSSGLARDSESAASEGLQYQQACEPGLDVGTCETVASHNHQQGLGEWAMMDRLVTCHMGNEDSSRGITYEDGNNNSSSVVQPVPATNQLTLRSEMDFWGYSK

SEQ ID NO: 81958 - protein, 304 aa, Arabidopsis thaliana
  peptide (1)..(304): Ceres Seq. ID no. 12662625
MEVIREVDLNKLEPWDLQERCKIGSTPQNEWYFFSHKDRKYPTGSRTNRATHAGFWKATGRDKCIRNSYKKIGMRKTLVFYKGRAPHGQKTDWIMHEYRLEDADDPQANPSEDGWVVCRVFMKKNLFKVVNEGSSSINSLDQHNHDASNNNHALQARSFMHRDSPYQLVRNHGAMTFELNKPDLALHQYPPIFHKPPSLGFDYSSGLARDSESAASEGLQYQQACEPGLDVGTCETVASHNHQQGLGEWAMMDRLVTCHMGNEDSSRGITYEDGNNNSSSVVQPVPATNQLTLRSEMDFWGYSK

SEQ ID NO: 81959 - protein, 231 aa, Arabidopsis thaliana
  peptide (1)..(231): Ceres Seq. ID no. 12662626
MRKTLVFYKGRAPHGQKTDWIMHEYRLEDADDPQANPSEDGWVVCRVFMKKNLFKVVNEGSSSINSLDQHNHDASNNNHALQARSFMHRDSPYQLVRNHGAMTFELNKPDLALHQYPPIFHKPPSLGFDYSSGLARDSESAASEGLQYQQACEPGLDVGTCETVASHNHQQGLGEWAMMDRLVTCHMGNEDSSRGITYEDGNNNSSSVVQPVPATNQLTLRSEMDFWGYSK

SEQ ID NO: 81960 - DNA, 1505 bp, Arabidopsis thaliana
  misc_feature (1)..(1505): Ceres Seq. ID no. 12662627
  misc_feature (1)..(1505): Ortholog of  Ceres SEQ ID NO 13584744 as cited in SEQ ID NO 69137
aaaacctttccttcttctttctttacaaatccaacaatctcaatgtctccaaatccataactttcttcgatccccttgttcttcctctgtctgctgttacattttttacaaaaccctaatcaaacccattttcttctatcaatcttaaccctagaatcaaataaagactcaatctttctttgctttgctctgttctgctctgtttttgctctgtttttataatggcttgtttcttgaattgtgttagatttgatgtctccaagacgatcaccgacaaacccacaagtcaaggatctggtgtgacttgttataacagctgggatgatgttgaaactctcacttccaatttctctagattgattggttctggtggctatagcagtatctacatggctcgcttctctggctctgataaagcggctctcaaggttcatgttagtagtcaccgtctttatcaagtctttagacttgagcttgatattttgcttcgtcttcaacatcctaacattgtcaagcttcttggctatttcgatgattcagaggaaaatggtgctcttcttcttgagtatcttcctcaaggaaatctacaagagaagctccaaagcaatagcaagcaagtcttgcaatggaggaaccgtgtagcgattgcgttacagttagttcaagctattgaacatattcatgagaaatgtagcccgcagatagtgcacggggacatcaaatcttccaacgttcttctagacaaaaactttgattgcaagctttgcgatttcgggtcagctaaagtcgggttctcttcgatggttcagcctcctacgatgtcgcctagatctagacaagtgaagatggtgggatctccaggttacacagaccctcattatttaagaaccgggattgcttcgaagaagatggatatgtatgggtttggagttgtggttcttgagttggtttcaggaaaagaagcgttttctgctgagagaggtgagatgctggtgcatatagctgctccacttatgaatgagattttggattcgagtgtagacatttcagaggacaaggtcagacagttcttggacccgaggttgttaagggatagtcttgatatcgatgaggtcaagacaatgttgagtgttgctgcggtctgtatcagtagcaagctatctctaagaccttcggctgctcaagtagcggatactcttataaaggaaataccatcattgagtttcctcggttgcggtaaaggagtgtgagttatcggtgtcgatggtttttgttgtagtgtggtaaggctgcgtgaacgacactgtaaagttggtgtgcatttaggagtttcttggaaaaccagcaagaagaataaccatgtaaatactcttgttttgttttgtgaatagaagcaggaaataacattttgtctaattatcattcatcaacatttcctaggaaatgtaattttgattgttgttttgtcttgaaatcttagagagaaagagaagttctgttcatgt

SEQ ID NO: 81961 - protein, 342 aa, Arabidopsis thaliana
  peptide (1)..(342): Ceres Seq. ID no. 12662628
MACFLNCVRFDVSKTITDKPTSQGSGVTCYNSWDDVETLTSNFSRLIGSGGYSSIYMARFSGSDKAALKVHVSSHRLYQVFRLELDILLRLQHPNIVKLLGYFDDSEENGALLLEYLPQGNLQEKLQSNSKQVLQWRNRVAIALQLVQAIEHIHEKCSPQIVHGDIKSSNVLLDKNFDCKLCDFGSAKVGFSSMVQPPTMSPRSRQVKMVGSPGYTDPHYLRTGIASKKMDMYGFGVVVLELVSGKEAFSAERGEMLVHIAAPLMNEILDSSVDISEDKVRQFLDPRLLRDSLDIDEVKTMLSVAAVCISSKLSLRPSAAQVADTLIKEIPSLSFLGCGKGV

SEQ ID NO: 81962 - protein, 286 aa, Arabidopsis thaliana
  peptide (1)..(286): Ceres Seq. ID no. 12662629
MARFSGSDKAALKVHVSSHRLYQVFRLELDILLRLQHPNIVKLLGYFDDSEENGALLLEYLPQGNLQEKLQSNSKQVLQWRNRVAIALQLVQAIEHIHEKCSPQIVHGDIKSSNVLLDKNFDCKLCDFGSAKVGFSSMVQPPTMSPRSRQVKMVGSPGYTDPHYLRTGIASKKMDMYGFGVVVLELVSGKEAFSAERGEMLVHIAAPLMNEILDSSVDISEDKVRQFLDPRLLRDSLDIDEVKTMLSVAAVCISSKLSLRPSAAQVADTLIKEIPSLSFLGCGKGV

SEQ ID NO: 81963 - DNA, 1902 bp, Arabidopsis thaliana
  misc_feature (1)..(1902): Ceres Seq. ID no. 12662630
  misc_feature (1)..(1902): Ortholog of  Ceres SEQ ID NO 14312180 as cited in SEQ ID NO 59480
atggcgaaagagaacagtggtcatcatcaccaaacagaagcaagaagaaagaaactaactttgattcttggtgtaagtggactctgcattttgttctatgttttaggtgcatggcaagccaataccgtcccatcttctatctcgaagctcggatgcgagacgcaatcaaacccttcttcgtcctcttcctcttcctcatcttcagagtcagctgaactagatttcaaaagccataatcagattgagttaaaggaaacaaaccaaaccattaagtactttgaaccatgtgaattatctctcagtgagtacactccttgtgaagaccgacaaagaggaagaagattcgataggaacatgatgaaatatagagaaagacattgtcctgtaaaagatgagcttctttattgtttgattcctcctccaccaaactacaagattccatttaaatggccacaaagtagagactatgcttggtatgacaatatccctcacaaggaacttagtgttgagaaagcagttcaaaactggattcaagttgaaggtgaccgctttagattccctggtggtggtactatgtttcctcgtggagctgatgcttatatcgatgatattgctaggcttattcctcttactgatggtggaatcagaacagctattgacactggatgtggtgttgcaagttttggtgcttacctcttgaagagagacattatggctgtgtcttttgctccaagagacactcatgaagctcaggtacagtttgctttagaacgcggagttcctgcgataatcgggattatgggatcaagaagacttccttatccagctagagcttttgatcttgctcattgttctcgttgtttgatcccttggtttaaaaatgatggtttgtaccttatggaggtcgaccgggttttaagaccgggcggttactggatcctctcgggaccaccgattaactggaaacagtactggagagggtgggagagaacagaggaggatttgaagaaagagcaagattcaatagaagatgtagcaaagagtctttgctggaagaaagtaactgaaaaaggtgacttatcaatttggcaaaagcctctcaatcacattgagtgtaaaaagctcaaacaaaacaataagtcacctccgatatgcagctcagataacgcggattccgcttggtacaaagacttggaaacttgtataacaccattaccagaaacaaacaatccagatgattcagcaggcggtgcactcgaggattggccagaccgagcattcgcggtacctccaagaatcatcagaggaactataccagaaatgaacgcggagaaatttagagaagacaacgaggtttggaaagagagaatagcacattacaagaagatagtccctgagctttcacatggaagattcaggaacattatggacatgaacgcttttctcggcggattcgctgcttccatgctgaaatatccctcatgggtcatgaacgttgtcccggtcgatgcagagaaacaaacgttaggtgtgatctacgaacgtggattgatagggacgtatcaagattggtgtgaaggattctcaacgtatccaagaacttatgatatgattcatgcaggaggattgttcagcttatacgaacataggtgtgatttgacgttgatattgttggagatggatcgaattttgagaccagaaggaacagttgtgttgagagataatgtggagacgttgaataaggtagagaagatagtgaagggaatgaagtggaagagtcaaattgttgatcatgagaaaggtccttttaatcctgagaagattcttgttgctgttaaaacttattggactggtcaaccttctgacaagaacaacaacaacaacaacaacaacaacaactag

SEQ ID NO: 81964 - protein, 633 aa, Arabidopsis thaliana
  peptide (1)..(633): Ceres Seq. ID no. 12662631
MAKENSGHHHQTEARRKKLTLILGVSGLCILFYVLGAWQANTVPSSISKLGCETQSNPSSSSSSSSSSESAELDFKSHNQIELKETNQTIKYFEPCELSLSEYTPCEDRQRGRRFDRNMMKYRERHCPVKDELLYCLIPPPPNYKIPFKWPQSRDYAWYDNIPHKELSVEKAVQNWIQVEGDRFRFPGGGTMFPRGADAYIDDIARLIPLTDGGIRTAIDTGCGVASFGAYLLKRDIMAVSFAPRDTHEAQVQFALERGVPAIIGIMGSRRLPYPARAFDLAHCSRCLIPWFKNDGLYLMEVDRVLRPGGYWILSGPPINWKQYWRGWERTEEDLKKEQDSIEDVAKSLCWKKVTEKGDLSIWQKPLNHIECKKLKQNNKSPPICSSDNADSAWYKDLETCITPLPETNNPDDSAGGALEDWPDRAFAVPPRIIRGTIPEMNAEKFREDNEVWKERIAHYKKIVPELSHGRFRNIMDMNAFLGGFAASMLKYPSWVMNVVPVDAEKQTLGVIYERGLIGTYQDWCEGFSTYPRTYDMIHAGGLFSLYEHRCDLTLILLEMDRILRPEGTVVLRDNVETLNKVEKIVKGMKWKSQIVDHEKGPFNPEKILVAVKTYWTGQPSDKNNNNNNNNNN

SEQ ID NO: 81965 - protein, 515 aa, Arabidopsis thaliana
  peptide (1)..(515): Ceres Seq. ID no. 12662632
MMKYRERHCPVKDELLYCLIPPPPNYKIPFKWPQSRDYAWYDNIPHKELSVEKAVQNWIQVEGDRFRFPGGGTMFPRGADAYIDDIARLIPLTDGGIRTAIDTGCGVASFGAYLLKRDIMAVSFAPRDTHEAQVQFALERGVPAIIGIMGSRRLPYPARAFDLAHCSRCLIPWFKNDGLYLMEVDRVLRPGGYWILSGPPINWKQYWRGWERTEEDLKKEQDSIEDVAKSLCWKKVTEKGDLSIWQKPLNHIECKKLKQNNKSPPICSSDNADSAWYKDLETCITPLPETNNPDDSAGGALEDWPDRAFAVPPRIIRGTIPEMNAEKFREDNEVWKERIAHYKKIVPELSHGRFRNIMDMNAFLGGFAASMLKYPSWVMNVVPVDAEKQTLGVIYERGLIGTYQDWCEGFSTYPRTYDMIHAGGLFSLYEHRCDLTLILLEMDRILRPEGTVVLRDNVETLNKVEKIVKGMKWKSQIVDHEKGPFNPEKILVAVKTYWTGQPSDKNNNNNNNNNN

SEQ ID NO: 81966 - protein, 514 aa, Arabidopsis thaliana
  peptide (1)..(514): Ceres Seq. ID no. 12662633
MKYRERHCPVKDELLYCLIPPPPNYKIPFKWPQSRDYAWYDNIPHKELSVEKAVQNWIQVEGDRFRFPGGGTMFPRGADAYIDDIARLIPLTDGGIRTAIDTGCGVASFGAYLLKRDIMAVSFAPRDTHEAQVQFALERGVPAIIGIMGSRRLPYPARAFDLAHCSRCLIPWFKNDGLYLMEVDRVLRPGGYWILSGPPINWKQYWRGWERTEEDLKKEQDSIEDVAKSLCWKKVTEKGDLSIWQKPLNHIECKKLKQNNKSPPICSSDNADSAWYKDLETCITPLPETNNPDDSAGGALEDWPDRAFAVPPRIIRGTIPEMNAEKFREDNEVWKERIAHYKKIVPELSHGRFRNIMDMNAFLGGFAASMLKYPSWVMNVVPVDAEKQTLGVIYERGLIGTYQDWCEGFSTYPRTYDMIHAGGLFSLYEHRCDLTLILLEMDRILRPEGTVVLRDNVETLNKVEKIVKGMKWKSQIVDHEKGPFNPEKILVAVKTYWTGQPSDKNNNNNNNNNN

SEQ ID NO: 81967 - DNA, 1050 bp, Arabidopsis thaliana
  misc_feature (1)..(1050): Ceres Seq. ID no. 12662638
  misc_feature (1)..(1050): Ortholog of  Ceres SEQ ID NO 12636774 as cited in SEQ ID NO 372
  misc_feature (1)..(1050): Ortholog of  Ceres SEQ ID NO 14311866 as cited in SEQ ID NO 51178
  misc_feature (1)..(1050): Ortholog of  Ceres SEQ ID NO 15174842 as cited in SEQ ID NO 53054
  misc_feature (1)..(1050): Ortholog of  Ceres SEQ ID NO 13582350 as cited in SEQ ID NO 56734
  misc_feature (1)..(1050): Ortholog of  Ceres SEQ ID NO 12476493 as cited in SEQ ID NO 58163
  misc_feature (1)..(1050): Ortholog of  Ceres SEQ ID NO 13596470 as cited in SEQ ID NO 62158
  misc_feature (1)..(1050): Ortholog of  Ceres SEQ ID NO 12578315 as cited in SEQ ID NO 62451
  misc_feature (1)..(1050): Ortholog of  Ceres SEQ ID NO 12615466 as cited in SEQ ID NO 62761
  misc_feature (1)..(1050): Ortholog of  Ceres SEQ ID NO 13597295 as cited in SEQ ID NO 63743
  misc_feature (1)..(1050): Ortholog of  Ceres SEQ ID NO 12617090 as cited in SEQ ID NO 64005
  misc_feature (1)..(1050): Ortholog of  Ceres SEQ ID NO 13597439 as cited in SEQ ID NO 64081
  misc_feature (1)..(1050): Ortholog of  Ceres SEQ ID NO 13597233 as cited in SEQ ID NO 64370
  misc_feature (1)..(1050): Ortholog of  Ceres SEQ ID NO 13598327 as cited in SEQ ID NO 68040
atggcaacttctgcaatatctaagctcttagtgtctgatttcgcctcctccgttcacatcccttcaaactatgtccgaccaatctccgaccgtccgaacttgtccgaggtcgagagttctggcgattccatccctctgatcgatctccgggacctccatggacctaatcgagccgtaattgtccaacaacttgctagtgcgtgttccacttatggtttctttcagatcaagaatcatggagtaccagatacaaccgtcaataaaatgcaaaccgttgcgagagagttcttccatcaacccgagagcgaaagagtcaaacactactccgcagatccaacaaagacaacgagactctccaccagtttcaacgtcggcgcagacaaagtcttgaactggagagacttccttagactccattgctttcccatagaagatttcatcgaagaatggccatctagtcccatctctttcagagaagtcacagctgaatatgccacgagcgtaagagctttggttttgagacttcttgaggccatctcagagagtttaggccttgaaagcgaccatataagcaatatattaggcaaacacgctcaacacatggcgtttaactactatccgccgtgtccagaacccgagctaacttacggacttcccggacataaagacccaaccgttatcactgtccttcttcaagaccaagtctctggtttgcaagtctttaaggatgataaatgggtcgctgttagtccaattcccaacactttcatcgtcaatatcggcgaccaaatgcaggtcataagcaatgataaatacaagagtgtgctccatagagccgtagtaaacaccgagaacgagcggttatcgattccgactttctatttcccttcaacagatgcagtgattggtccagcacacgagctggtcaatgaacaagactctcttgccatttacagaacctacccgtttgttgagtattgggacaagttttggaacagatcacttgctactgcgagctgtctagacgccttcaaagctccaacaacctaa

SEQ ID NO: 81968 - protein, 349 aa, Arabidopsis thaliana
  peptide (1)..(349): Ceres Seq. ID no. 12662639
MATSAISKLLVSDFASSVHIPSNYVRPISDRPNLSEVESSGDSIPLIDLRDLHGPNRAVIVQQLASACSTYGFFQIKNHGVPDTTVNKMQTVAREFFHQPESERVKHYSADPTKTTRLSTSFNVGADKVLNWRDFLRLHCFPIEDFIEEWPSSPISFREVTAEYATSVRALVLRLLEAISESLGLESDHISNILGKHAQHMAFNYYPPCPEPELTYGLPGHKDPTVITVLLQDQVSGLQVFKDDKWVAVSPIPNTFIVNIGDQMQVISNDKYKSVLHRAVVNTENERLSIPTFYFPSTDAVIGPAHELVNEQDSLAIYRTYPFVEYWDKFWNRSLATASCLDAFKAPTT

SEQ ID NO: 81969 - protein, 261 aa, Arabidopsis thaliana
  peptide (1)..(261): Ceres Seq. ID no. 12662640
MQTVAREFFHQPESERVKHYSADPTKTTRLSTSFNVGADKVLNWRDFLRLHCFPIEDFIEEWPSSPISFREVTAEYATSVRALVLRLLEAISESLGLESDHISNILGKHAQHMAFNYYPPCPEPELTYGLPGHKDPTVITVLLQDQVSGLQVFKDDKWVAVSPIPNTFIVNIGDQMQVISNDKYKSVLHRAVVNTENERLSIPTFYFPSTDAVIGPAHELVNEQDSLAIYRTYPFVEYWDKFWNRSLATASCLDAFKAPTT

SEQ ID NO: 81970 - DNA, 2560 bp, Arabidopsis thaliana
  misc_feature (1)..(2560): Ceres Seq. ID no. 12662680
  misc_feature (1)..(2560): Ortholog of  Ceres SEQ ID NO 14306279 as cited in SEQ ID NO 56860
gaagaagactagaagatagctttgtcagattcacatctccccaaaaaaaaaacagagcaagaagaagaagaagaagacaaccatggaagaatcagaacaagttcttcctctattaacaaacccaaaagatctgacaaacccatcatatgcgtcatcatcttcatcttcatctgaaccaagagatgaaacagaggatcttcttttaccaatctccgacgagaatgaggaggaagaagaagagaactcaccaatccgacaagtagcactcactgttccgacaacagatgatccttcattacctgtcttaacatttcgcatgtgggtcttaggaactctctcttgcatcctcttgtcgtttctcaatcagttcttctggtatagaacagaacctctcactatctctgccatctccgctcaaatcgccgtcgtaccacttggtcgtctcatggctgctaaaatcaccgatagagtcttcttccaaggatcaaagtggcagtttacgttgaatccaggtccgtttaatgtgaaagagcatgtgttgatcactattttcgctaacgcgggagctggatctgtttacgcaatacacgttgttaccgtggtcaaagcgttttacatgaagaacataacgttctttgtgtctttcatcgttatcgttaccacccaagtgttaggttttggatgggctggaatatttaggaaataccttgttgaaccggcggcgatgtggtggccggcgaatcttgttcaagtctcactatttagagctttgcacgagaaagaagaacggaccaaaggagggctgacacgtacacaattcttcgtgatagcattcgtttgcagtttcgcttattatgtctttccgggctacttatttcagatcatgacgtcgttgtcgtgggtttgttggttctttccatcatcagttatggcccaacagatcgggtctggtcttcacgggttaggtgttggggccataggacttgactggtcaaccatttcctcttacttgggtagtccactcgctagtccatggtttgctacggctaatgtgggtgtgggatttgtgctggtgatatatgtcttggtaccaatatgctattggctcgatgtgtacaaggccaagaccttccccatattttcgagctcacttttttcgagccagggttcaaagtacaacatcacatccattatagactctaatttccaccttgacctcccagcctacgagcgtcaaggccctttgtatctttgcactttcttcgccattagttacggtgttggttttgccgctttaagcgctaccatcatgcatgttgctctcttccacggaagggagatatgggagcagagtaaggagagttttaaagaaaagaaattggatgtacacgcgaggctaatgcaaaggtacaaacaagttccagagtggtggttttggtgcatactcgttaccaacgttggagccacaatctttgcttgtgagtattacaatgaccaacttcaattaccatggtggggtgttctattggcatgtaccgtcgccattatctttacacttcctatcggtatcatcaccgccatcaccaatcaggcgccaggattgaacattattacagaatatatcataggatatatctatccaggatatccagttgcaaatatgtgctttaaagtatatggatacataagcatgcaacaagccatcacgtttcttcaagactttaagcttggtcactacatgaagataccacctagaaccatgttcatggcacagattgttggaacactcatctcatgttttgtttacctcacaacggcttggtggctaatggagaccatccccaacatatgtgattcggttactaactcggtttggacatgtccatcggataaagtcttttatgatgcatcggtgatatggggacttattggacctcgtagaatctttggagatcttggtttatacaaatccgttaattggttcttccttgtgggcgctatagcccctattcttgtatggttagcttcaaggatgtttcctagacaagagtggatcaagcttataaacatgccggttcttataagcgcgacaagctcgatgccgcccgcaacagccgtgaactacacaacatgggttcttgctggattcttatccggatttgttgtgtttaggtacaggccaaatctatggcagaggtataattatgttttgtcaggagcattggatgctggattagcatttatgggtgtgttgctttatatgtgtttgggacttgagaatgtgagtttggattggtggggaaatgagcttgatggttgtcctttggcctcttgtccaaccgcgcctggtattattgttgaaggatgcccgctttatacgtaaaacgcgtttgcgcggcgaaggcatttccaatgctaaagtttggtggttggatttggtacctatgtttgtaaagatcattttttacattcattctcatattcagtgtgtgagattgctgtgtatagtaaggatgattcattagtagggtggggtatttattcaattattcggattgat

SEQ ID NO: 81971 - protein, 766 aa, Arabidopsis thaliana
  peptide (1)..(766): Ceres Seq. ID no. 12662681
MEESEQVLPLLTNPKDLTNPSYASSSSSSSEPRDETEDLLLPISDENEEEEEENSPIRQVALTVPTTDDPSLPVLTFRMWVLGTLSCILLSFLNQFFWYRTEPLTISAISAQIAVVPLGRLMAAKITDRVFFQGSKWQFTLNPGPFNVKEHVLITIFANAGAGSVYAIHVVTVVKAFYMKNITFFVSFIVIVTTQVLGFGWAGIFRKYLVEPAAMWWPANLVQVSLFRALHEKEERTKGGLTRTQFFVIAFVCSFAYYVFPGYLFQIMTSLSWVCWFFPSSVMAQQIGSGLHGLGVGAIGLDWSTISSYLGSPLASPWFATANVGVGFVLVIYVLVPICYWLDVYKAKTFPIFSSSLFSSQGSKYNITSIIDSNFHLDLPAYERQGPLYLCTFFAISYGVGFAALSATIMHVALFHGREIWEQSKESFKEKKLDVHARLMQRYKQVPEWWFWCILVTNVGATIFACEYYNDQLQLPWWGVLLACTVAIIFTLPIGIITAITNQAPGLNIITEYIIGYIYPGYPVANMCFKVYGYISMQQAITFLQDFKLGHYMKIPPRTMFMAQIVGTLISCFVYLTTAWWLMETIPNICDSVTNSVWTCPSDKVFYDASVIWGLIGPRRIFGDLGLYKSVNWFFLVGAIAPILVWLASRMFPRQEWIKLINMPVLISATSSMPPATAVNYTTWVLAGFLSGFVVFRYRPNLWQRYNYVLSGALDAGLAFMGVLLYMCLGLENVSLDWWGNELDGCPLASCPTAPGIIVEGCPLYT

SEQ ID NO: 81972 - protein, 688 aa, Arabidopsis thaliana
  peptide (1)..(688): Ceres Seq. ID no. 12662682
MWVLGTLSCILLSFLNQFFWYRTEPLTISAISAQIAVVPLGRLMAAKITDRVFFQGSKWQFTLNPGPFNVKEHVLITIFANAGAGSVYAIHVVTVVKAFYMKNITFFVSFIVIVTTQVLGFGWAGIFRKYLVEPAAMWWPANLVQVSLFRALHEKEERTKGGLTRTQFFVIAFVCSFAYYVFPGYLFQIMTSLSWVCWFFPSSVMAQQIGSGLHGLGVGAIGLDWSTISSYLGSPLASPWFATANVGVGFVLVIYVLVPICYWLDVYKAKTFPIFSSSLFSSQGSKYNITSIIDSNFHLDLPAYERQGPLYLCTFFAISYGVGFAALSATIMHVALFHGREIWEQSKESFKEKKLDVHARLMQRYKQVPEWWFWCILVTNVGATIFACEYYNDQLQLPWWGVLLACTVAIIFTLPIGIITAITNQAPGLNIITEYIIGYIYPGYPVANMCFKVYGYISMQQAITFLQDFKLGHYMKIPPRTMFMAQIVGTLISCFVYLTTAWWLMETIPNICDSVTNSVWTCPSDKVFYDASVIWGLIGPRRIFGDLGLYKSVNWFFLVGAIAPILVWLASRMFPRQEWIKLINMPVLISATSSMPPATAVNYTTWVLAGFLSGFVVFRYRPNLWQRYNYVLSGALDAGLAFMGVLLYMCLGLENVSLDWWGNELDGCPLASCPTAPGIIVEGCPLYT

SEQ ID NO: 81973 - protein, 645 aa, Arabidopsis thaliana
  peptide (1)..(645): Ceres Seq. ID no. 12662683
MAAKITDRVFFQGSKWQFTLNPGPFNVKEHVLITIFANAGAGSVYAIHVVTVVKAFYMKNITFFVSFIVIVTTQVLGFGWAGIFRKYLVEPAAMWWPANLVQVSLFRALHEKEERTKGGLTRTQFFVIAFVCSFAYYVFPGYLFQIMTSLSWVCWFFPSSVMAQQIGSGLHGLGVGAIGLDWSTISSYLGSPLASPWFATANVGVGFVLVIYVLVPICYWLDVYKAKTFPIFSSSLFSSQGSKYNITSIIDSNFHLDLPAYERQGPLYLCTFFAISYGVGFAALSATIMHVALFHGREIWEQSKESFKEKKLDVHARLMQRYKQVPEWWFWCILVTNVGATIFACEYYNDQLQLPWWGVLLACTVAIIFTLPIGIITAITNQAPGLNIITEYIIGYIYPGYPVANMCFKVYGYISMQQAITFLQDFKLGHYMKIPPRTMFMAQIVGTLISCFVYLTTAWWLMETIPNICDSVTNSVWTCPSDKVFYDASVIWGLIGPRRIFGDLGLYKSVNWFFLVGAIAPILVWLASRMFPRQEWIKLINMPVLISATSSMPPATAVNYTTWVLAGFLSGFVVFRYRPNLWQRYNYVLSGALDAGLAFMGVLLYMCLGLENVSLDWWGNELDGCPLASCPTAPGIIVEGCPLYT

SEQ ID NO: 81974 - DNA, 1203 bp, Arabidopsis thaliana
  misc_feature (1)..(1203): Ceres Seq. ID no. 12662710
  misc_feature (1)..(1203): Ortholog of  Ceres SEQ ID NO 13597380 as cited in SEQ ID NO 64054
  misc_feature (1)..(1203): Ortholog of  Ceres SEQ ID NO 12625474 as cited in SEQ ID NO 64169
  misc_feature (1)..(1203): Ortholog of  Ceres SEQ ID NO 13597502 as cited in SEQ ID NO 64681
atgtcgatcaagcttctcgttcttgttttctctcttctgataatcttcacgagacccaaattgatcgccgatcatcacttaactacaagaatctcgccgatttatccttcgatttctacgtttcagccttcgattccgccgtttttacctccatcgccgtcgcgcagagcacaatctccgacggtgaagccgtctttgccatttgtaccggcgttgttcgttttcggagattcctcagtcgatagcggaaccaataactttcttggaaccttagcgagagcagatcggcttccctacggtcgcgatttcgatacgcatcaaccaacgggaaggttttgcaatggaagaatcccagttgattatctaggcttaccattcgttcctagctatcttggacaaactgggactgttgaagacatgtttcaaggagtaaactatgcatcagctggtgctggaatcatcttatcaagtggatctgaattgggccagcgggtttcatttgcgatgcaagttgagcagtttgttgatacgtttcagcagatgatactgagtattggggagaaagcttcggaacgtttagtgtcaaactcggttttctacatatcgattggagtgaatgattacatacatttctacatcagaaacatctccaatgtgcagaatctctatactccatggaattttaatcagttcttggcttctaatatgagacaggagctcaagaccttgtacaatgtcaaggtgaggaggatggtggtgatgggactgccacctattggctgtgcaccatactacatgtggaaatacagaagccagaacggagaatgtgcagaagaagtgaacagcatgatcatggaatccaactttgtcatgagatacactgtagataaactcaaccgtgagcttccaggggcatccattatctactgtgacgtgttccaaagcgctatggacattctcaggaaccaccaacactacggttttaatgagacgacagatgcgtgttgtgggctagggaggtacaaaggatggcttccatgcatctcgccggagatggcttgctctgacgcctccggtcacctctggtgggaccagtttcatcctacagacgccgttaacgccattctagccgacaatgtatggaatggtcgccacgtggacatgtgttaccctactaacctagaaactatgcttcattcttaa

SEQ ID NO: 81975 - protein, 400 aa, Arabidopsis thaliana
  peptide (1)..(400): Ceres Seq. ID no. 12662711
MSIKLLVLVFSLLIIFTRPKLIADHHLTTRISPIYPSISTFQPSIPPFLPPSPSRRAQSPTVKPSLPFVPALFVFGDSSVDSGTNNFLGTLARADRLPYGRDFDTHQPTGRFCNGRIPVDYLGLPFVPSYLGQTGTVEDMFQGVNYASAGAGIILSSGSELGQRVSFAMQVEQFVDTFQQMILSIGEKASERLVSNSVFYISIGVNDYIHFYIRNISNVQNLYTPWNFNQFLASNMRQELKTLYNVKVRRMVVMGLPPIGCAPYYMWKYRSQNGECAEEVNSMIMESNFVMRYTVDKLNRELPGASIIYCDVFQSAMDILRNHQHYGFNETTDACCGLGRYKGWLPCISPEMACSDASGHLWWDQFHPTDAVNAILADNVWNGRHVDMCYPTNLETMLHS

SEQ ID NO: 81976 - protein, 261 aa, Arabidopsis thaliana
  peptide (1)..(261): Ceres Seq. ID no. 12662712
MFQGVNYASAGAGIILSSGSELGQRVSFAMQVEQFVDTFQQMILSIGEKASERLVSNSVFYISIGVNDYIHFYIRNISNVQNLYTPWNFNQFLASNMRQELKTLYNVKVRRMVVMGLPPIGCAPYYMWKYRSQNGECAEEVNSMIMESNFVMRYTVDKLNRELPGASIIYCDVFQSAMDILRNHQHYGFNETTDACCGLGRYKGWLPCISPEMACSDASGHLWWDQFHPTDAVNAILADNVWNGRHVDMCYPTNLETMLHS

SEQ ID NO: 81977 - protein, 232 aa, Arabidopsis thaliana
  peptide (1)..(232): Ceres Seq. ID no. 12662713
MQVEQFVDTFQQMILSIGEKASERLVSNSVFYISIGVNDYIHFYIRNISNVQNLYTPWNFNQFLASNMRQELKTLYNVKVRRMVVMGLPPIGCAPYYMWKYRSQNGECAEEVNSMIMESNFVMRYTVDKLNRELPGASIIYCDVFQSAMDILRNHQHYGFNETTDACCGLGRYKGWLPCISPEMACSDASGHLWWDQFHPTDAVNAILADNVWNGRHVDMCYPTNLETMLHS

SEQ ID NO: 81978 - DNA, 1083 bp, Arabidopsis thaliana
  misc_feature (1)..(1083): Ceres Seq. ID no. 12662714
  misc_feature (1)..(1083): Ortholog of  Ceres SEQ ID NO 15168355 as cited in SEQ ID NO 57246
atgtttagtggtacagaagaagagaaaggaatgatgattagtgaaagagatgattttagtctcactggaccattacacttaacatctatagattgggctaatgaacatcatcgacgatccgtagctggatctttggttcaaggaatctatgtagctgagcgtgaccgtcagctacaaagagaaggtcctgagttagctttatctccaatatggtctgagtttttccatttccgcctcattcgtaagtttgtcgatgacgcggataactctatcttcggaggaatctatgagtacaaactgccgcaacagctctctcaaaccgtcaaatcaatggaatttagtccacgttttgtgattgctttcagaggaacggttacaaaagtggactccatttcccgtgacatcgagcatgacatccatgttattagaaacgggcttcacacgacaacacggtttgagatagctatccaagcagtgagaaacattgttgcttcggttggtggttctagtgtttggcttgctggtcattctcttggtgcatctatggcattacttaccgggaaaaccatcgctagaaccgggttttttcctgagtgtttcgcattcaatccgccgtttttgtctgcccctatcgaaaaaattaaggataagaggattaaacatgggatacgcattgcaggcagtgtgatcacagctggacttgctctagccaaaaaagccacccaacactacagccaaaacgaccgtgcattacccgcacctcctgatccatttgaagctttatccgactggttcccgcggctgtatgtcaaccctggtgaccacttatgctcagagtatgttggttactttgagcaccgaaacaagatggaagaaatcgggattgggtttgtagagcgggtagcgacgcagcactcgttgggcggtatgctgttaggaggacaagagccggtacatctgattccatcttcggttttgacggtgaacttaagctcctcgagagatttcaaacaagctcatgggattcatcagtggtggagggaagataacaagtttgagactaaagtttaccagtacaaatga

SEQ ID NO: 81979 - protein, 360 aa, Arabidopsis thaliana
  peptide (1)..(360): Ceres Seq. ID no. 12662715
MFSGTEEEKGMMISERDDFSLTGPLHLTSIDWANEHHRRSVAGSLVQGIYVAERDRQLQREGPELALSPIWSEFFHFRLIRKFVDDADNSIFGGIYEYKLPQQLSQTVKSMEFSPRFVIAFRGTVTKVDSISRDIEHDIHVIRNGLHTTTRFEIAIQAVRNIVASVGGSSVWLAGHSLGASMALLTGKTIARTGFFPECFAFNPPFLSAPIEKIKDKRIKHGIRIAGSVITAGLALAKKATQHYSQNDRALPAPPDPFEALSDWFPRLYVNPGDHLCSEYVGYFEHRNKMEEIGIGFVERVATQHSLGGMLLGGQEPVHLIPSSVLTVNLSSSRDFKQAHGIHQWWREDNKFETKVYQYK

SEQ ID NO: 81980 - protein, 350 aa, Arabidopsis thaliana
  peptide (1)..(350): Ceres Seq. ID no. 12662716
MMISERDDFSLTGPLHLTSIDWANEHHRRSVAGSLVQGIYVAERDRQLQREGPELALSPIWSEFFHFRLIRKFVDDADNSIFGGIYEYKLPQQLSQTVKSMEFSPRFVIAFRGTVTKVDSISRDIEHDIHVIRNGLHTTTRFEIAIQAVRNIVASVGGSSVWLAGHSLGASMALLTGKTIARTGFFPECFAFNPPFLSAPIEKIKDKRIKHGIRIAGSVITAGLALAKKATQHYSQNDRALPAPPDPFEALSDWFPRLYVNPGDHLCSEYVGYFEHRNKMEEIGIGFVERVATQHSLGGMLLGGQEPVHLIPSSVLTVNLSSSRDFKQAHGIHQWWREDNKFETKVYQYK

SEQ ID NO: 81981 - protein, 349 aa, Arabidopsis thaliana
  peptide (1)..(349): Ceres Seq. ID no. 12662717
MISERDDFSLTGPLHLTSIDWANEHHRRSVAGSLVQGIYVAERDRQLQREGPELALSPIWSEFFHFRLIRKFVDDADNSIFGGIYEYKLPQQLSQTVKSMEFSPRFVIAFRGTVTKVDSISRDIEHDIHVIRNGLHTTTRFEIAIQAVRNIVASVGGSSVWLAGHSLGASMALLTGKTIARTGFFPECFAFNPPFLSAPIEKIKDKRIKHGIRIAGSVITAGLALAKKATQHYSQNDRALPAPPDPFEALSDWFPRLYVNPGDHLCSEYVGYFEHRNKMEEIGIGFVERVATQHSLGGMLLGGQEPVHLIPSSVLTVNLSSSRDFKQAHGIHQWWREDNKFETKVYQYK

SEQ ID NO: 81982 - DNA, 2001 bp, Arabidopsis thaliana
  misc_feature (1)..(2001): Ceres Seq. ID no. 12662729
  misc_feature (1)..(2001): Ortholog of  Ceres SEQ ID NO 14312594 as cited in SEQ ID NO 58686
  misc_feature (1)..(2001): Ortholog of  Ceres SEQ ID NO 13597706 as cited in SEQ ID NO 65326
atgacgtcgcagaaaagattcatctttgaggtggaagccgctaaggaagccacagatggaaatccctcggttggtcctgtctatcgtagtacttttgctcagaacggattcccgaacccgatcgatggtatccaaagctgctgggatattttccgcacggctgttgagaagtatccaaacaatcgaatgcttggtcgccgtgagatttcgaacgggaaggcaggaaagtacgtgtggaaaacatacaaagaagtatacgacattgtcataaaacttggaaattctctacgtagttgcgggattaaggagggagaaaaatgtggtatatatggtataaattgttgtgagtggatcattagcatggaggcatgtaatgcacatggcctttattgtgtccctttatacgatacgttaggcgctggtgcagtggaattcatcatttctcatgcagaggtttcaattgctttcgtggaggagaagaagatccctgagctttttaagacttgtccaaactcaacaaaatatatgaagactgttgtgagctttggcggtgtcaaaccggaacaaaaagaagaagctgaaaaattgggattggtaatacattcgtgggatgagtttttgaagctgggtgagggtaagcaatatgagcttcccattaaaaagccaagcgacatatgcacgattatgtatactagcggaacaactggtgacccgaagggagttatgatttcaaatgaaagcattgttactataactactggagtgatgcatttcctagggaatgtgaatgcaagcctatctgagaaggatgtgtatatttcttatcttcctctcgcgcacgtctttgatcgggcaatcgaggaatgtattattcaagtaggtggttcaattggtttctggcgcggggatgtcaaattgttgattgaagaccttggtgagctaaaaccaagtatcttttgcgccgttcctcgtgtcctagatcgagtatacacaggactacagcagaaactatctggtggtggtttcttcaaaaagaaggtgtttgatgttgctttttcctataaatttggaaatatgaagaaaggacagtctcatgtggcagcttctccattttgtgacaaacttgtattcaacaaggttaaacaaggacttggaggcaatgtgaggattattctgtctggagcggctcctctcgctagtcacatagaatcttttctaagagttgttgcatgttgtaatgttctacaaggatatggtctaactgagagttgtgctggaacttttgcaacgttcccagacgaactagacatgcttgggactgttggtccacccgtgccaaacgtcgatatacgccttgaatctgtcccggaaatgaattatgatgctcttggaagtactccgcgaggcgaaatatgcatacgaggaaaaactttattttcagggtactacaaacgtgaagacctcacaaaagaggtttttatcgacggatggttgcacacaggtgatgttggtgagtggcaaccaaatggaagcatgaagataattgaccggaaaaagaacatcttcaaactcgcgcaaggagagtatgtcgctgttgagaatttagaaaatgtctacagtcaagtagaagttattgaatcgatatgggtatatggaaacagctttgagtccttccttgtcgcaatcgctaacccggcccaacaaactcttgaacgatgggctgtggagaatggagtgaatggagacttcaactccatctgccaaaacgcaaaggcaaaagcattcatacttggagaactcgttaaaacagccaaagagaacaagttgaagggttttgagatcataaaagatgttcatctggaaccagtggcgttcgacatggaacgagaccttcttactccaacctacaaaaagaagaggcctcaattgctcaaatactatcagaatgtgatccatgaaatgtacaagacaacaaaggaaagtctagcttccggacagtaa

SEQ ID NO: 81983 - protein, 666 aa, Arabidopsis thaliana
  peptide (1)..(666): Ceres Seq. ID no. 12662730
MTSQKRFIFEVEAAKEATDGNPSVGPVYRSTFAQNGFPNPIDGIQSCWDIFRTAVEKYPNNRMLGRREISNGKAGKYVWKTYKEVYDIVIKLGNSLRSCGIKEGEKCGIYGINCCEWIISMEACNAHGLYCVPLYDTLGAGAVEFIISHAEVSIAFVEEKKIPELFKTCPNSTKYMKTVVSFGGVKPEQKEEAEKLGLVIHSWDEFLKLGEGKQYELPIKKPSDICTIMYTSGTTGDPKGVMISNESIVTITTGVMHFLGNVNASLSEKDVYISYLPLAHVFDRAIEECIIQVGGSIGFWRGDVKLLIEDLGELKPSIFCAVPRVLDRVYTGLQQKLSGGGFFKKKVFDVAFSYKFGNMKKGQSHVAASPFCDKLVFNKVKQGLGGNVRIILSGAAPLASHIESFLRVVACCNVLQGYGLTESCAGTFATFPDELDMLGTVGPPVPNVDIRLESVPEMNYDALGSTPRGEICIRGKTLFSGYYKREDLTKEVFIDGWLHTGDVGEWQPNGSMKIIDRKKNIFKLAQGEYVAVENLENVYSQVEVIESIWVYGNSFESFLVAIANPAQQTLERWAVENGVNGDFNSICQNAKAKAFILGELVKTAKENKLKGFEIIKDVHLEPVAFDMERDLLTPTYKKKRPQLLKYYQNVIHEMYKTTKESLASGQ

SEQ ID NO: 81984 - protein, 604 aa, Arabidopsis thaliana
  peptide (1)..(604): Ceres Seq. ID no. 12662731
MLGRREISNGKAGKYVWKTYKEVYDIVIKLGNSLRSCGIKEGEKCGIYGINCCEWIISMEACNAHGLYCVPLYDTLGAGAVEFIISHAEVSIAFVEEKKIPELFKTCPNSTKYMKTVVSFGGVKPEQKEEAEKLGLVIHSWDEFLKLGEGKQYELPIKKPSDICTIMYTSGTTGDPKGVMISNESIVTITTGVMHFLGNVNASLSEKDVYISYLPLAHVFDRAIEECIIQVGGSIGFWRGDVKLLIEDLGELKPSIFCAVPRVLDRVYTGLQQKLSGGGFFKKKVFDVAFSYKFGNMKKGQSHVAASPFCDKLVFNKVKQGLGGNVRIILSGAAPLASHIESFLRVVACCNVLQGYGLTESCAGTFATFPDELDMLGTVGPPVPNVDIRLESVPEMNYDALGSTPRGEICIRGKTLFSGYYKREDLTKEVFIDGWLHTGDVGEWQPNGSMKIIDRKKNIFKLAQGEYVAVENLENVYSQVEVIESIWVYGNSFESFLVAIANPAQQTLERWAVENGVNGDFNSICQNAKAKAFILGELVKTAKENKLKGFEIIKDVHLEPVAFDMERDLLTPTYKKKRPQLLKYYQNVIHEMYKTTKESLASGQ

SEQ ID NO: 81985 - protein, 546 aa, Arabidopsis thaliana
  peptide (1)..(546): Ceres Seq. ID no. 12662732
MEACNAHGLYCVPLYDTLGAGAVEFIISHAEVSIAFVEEKKIPELFKTCPNSTKYMKTVVSFGGVKPEQKEEAEKLGLVIHSWDEFLKLGEGKQYELPIKKPSDICTIMYTSGTTGDPKGVMISNESIVTITTGVMHFLGNVNASLSEKDVYISYLPLAHVFDRAIEECIIQVGGSIGFWRGDVKLLIEDLGELKPSIFCAVPRVLDRVYTGLQQKLSGGGFFKKKVFDVAFSYKFGNMKKGQSHVAASPFCDKLVFNKVKQGLGGNVRIILSGAAPLASHIESFLRVVACCNVLQGYGLTESCAGTFATFPDELDMLGTVGPPVPNVDIRLESVPEMNYDALGSTPRGEICIRGKTLFSGYYKREDLTKEVFIDGWLHTGDVGEWQPNGSMKIIDRKKNIFKLAQGEYVAVENLENVYSQVEVIESIWVYGNSFESFLVAIANPAQQTLERWAVENGVNGDFNSICQNAKAKAFILGELVKTAKENKLKGFEIIKDVHLEPVAFDMERDLLTPTYKKKRPQLLKYYQNVIHEMYKTTKESLASGQ

SEQ ID NO: 81986 - DNA, 973 bp, Arabidopsis thaliana
  misc_feature (1)..(973): Ceres Seq. ID no. 12662741
  misc_feature (1)..(973): Ortholog of  Ceres SEQ ID NO 14304593 as cited in SEQ ID NO 52961
  misc_feature (1)..(973): Ortholog of  Ceres SEQ ID NO 14303440 as cited in SEQ ID NO 59496
  misc_feature (1)..(973): Ortholog of  Ceres SEQ ID NO 13642436 as cited in SEQ ID NO 59680
atggaaatgatgaattgggagcggaggagtttgctaaacgagctaattcatggactaaaagcggccaagcagcttcagggttcgtcttctccatcgttgtcagcttcttcttcatatttgacgacggagataaaggagaatctcttacataacatagtttcttccttcaaaaaagctattttgatgctcaacggatccaccacacaacacaatccaacgatagagcttgcgcctgatcccctagctcatcccggaaaggttccaggatctccagcatcgatcaccggaaatccgagaagcgaagagtttttcaatgtaagatcgaaagaattcaacttaagttctaaaaagaggaagatgttgccaaagtggacagagcaagtgagaattagcccagagagaggcttagaaggacctcatgacgatatcttcagctggagaaaatatggccagaaagacattttgggcgccaaattcccaaggagttattacagatgcacatttcgtaacacacagtactgttgggctacgaaacaagtccaaagatcggacggtgatccaacgatcttcgaagtaacatacagaggaacacacacttgttcacaggggatcccacttccagagaaacgagaaaccaaaccaaaacacacagtagcagtaaattaccagaatctcagggccagtcttaccgtacgtaccggcggacttggaagcgaagctttctcattccccgtcacgtcgccgttatacacttacgagtccatcaacggtggtggaacgttttaccaccacgtgggaagttctggtccgtcggatttcactggattgatctcaacaaatacttccacaggaagttctccaatcttcgacgttaattttcaatttgatccaacggctgagattaacacaggcttccccacttttttccacaattcgatttaagtagtacagtattgaatattcttgagattaa

SEQ ID NO: 81987 - protein, 313 aa, Arabidopsis thaliana
  peptide (1)..(313): Ceres Seq. ID no. 12662742
MEMMNWERRSLLNELIHGLKAAKQLQGSSSPSLSASSSYLTTEIKENLLHNIVSSFKKAILMLNGSTTQHNPTIELAPDPLAHPGKVPGSPASITGNPRSEEFFNVRSKEFNLSSKKRKMLPKWTEQVRISPERGLEGPHDDIFSWRKYGQKDILGAKFPRSYYRCTFRNTQYCWATKQVQRSDGDPTIFEVTYRGTHTCSQGIPLPEKRETKPKHTVAVNYQNLRASLTVRTGGLGSEAFSFPVTSPLYTYESINGGGTFYHHVGSSGPSDFTGLISTNTSTGSSPIFDVNFQFDPTAEINTGFPTFFHNSI

SEQ ID NO: 81988 - protein, 311 aa, Arabidopsis thaliana
  peptide (1)..(311): Ceres Seq. ID no. 12662743
MMNWERRSLLNELIHGLKAAKQLQGSSSPSLSASSSYLTTEIKENLLHNIVSSFKKAILMLNGSTTQHNPTIELAPDPLAHPGKVPGSPASITGNPRSEEFFNVRSKEFNLSSKKRKMLPKWTEQVRISPERGLEGPHDDIFSWRKYGQKDILGAKFPRSYYRCTFRNTQYCWATKQVQRSDGDPTIFEVTYRGTHTCSQGIPLPEKRETKPKHTVAVNYQNLRASLTVRTGGLGSEAFSFPVTSPLYTYESINGGGTFYHHVGSSGPSDFTGLISTNTSTGSSPIFDVNFQFDPTAEINTGFPTFFHNSI

SEQ ID NO: 81989 - protein, 310 aa, Arabidopsis thaliana
  peptide (1)..(310): Ceres Seq. ID no. 12662744
MNWERRSLLNELIHGLKAAKQLQGSSSPSLSASSSYLTTEIKENLLHNIVSSFKKAILMLNGSTTQHNPTIELAPDPLAHPGKVPGSPASITGNPRSEEFFNVRSKEFNLSSKKRKMLPKWTEQVRISPERGLEGPHDDIFSWRKYGQKDILGAKFPRSYYRCTFRNTQYCWATKQVQRSDGDPTIFEVTYRGTHTCSQGIPLPEKRETKPKHTVAVNYQNLRASLTVRTGGLGSEAFSFPVTSPLYTYESINGGGTFYHHVGSSGPSDFTGLISTNTSTGSSPIFDVNFQFDPTAEINTGFPTFFHNSI

SEQ ID NO: 81990 - DNA, 1701 bp, Arabidopsis thaliana
  misc_feature (1)..(1701): Ceres Seq. ID no. 12662804
  misc_feature (1)..(1701): Ortholog of  Ceres SEQ ID NO 13657677 as cited in SEQ ID NO 66119
atggcggcaaaatcccagaaaaccctcgttctgctagcgaatttaatcaagtttcctccattaaaagctttttctctcttaaattctccaaatttccatgaatttcaacacacacacgaatcaatctcaatccttcttcgtctccttctctctgggaacttattctctcacgctcaatcacttcttctacaagtaatctccggaaaaatccactcccaattcttcacatcttcctctctgttacactatttgacagaatcagaaacgtcaaaaacaaagtttcgtctctacgaggtaatcatcaattcctatgttcaatctcaatccctaaacttatcaatctcttacttcaacgaaatggtcgataatggttttgttcctggatcgaattgcttcaactatctcttaactttcgttgttgggtcatcttctttcaatcaatggtggagtttcttcaacgagaacaaaagcaaagttgttttggacgtgtatagctttgggattctgatcaaaggttgttgtgaagctggtgagattgagaaaagctttgatcttcttattgaattgacagagtttgggttttctccaaatgtagttatctacactactttgattgatgggtgttgcaagaaaggtgagattgagaaggctaaagatttgttttttgagatggggaaacttggattagtggctaatgagcgtacttacacggttttgattaatgggttattcaaaaacggggttaagaaacaagggtttgagatgtatgagaagatgcaggaagatggagttttccctaatctctatacttataactgtgtgatgaatcagctttgtaaagatggaagaacaaaagatgcattccaagtgttcgacgaaatgcgtgagagaggggtttcttgtaacattgtcacttataatactttgattggtgggttatgtagagagatgaagttgaatgaggcaaataaagttgtggatcaaatgaagagtgatggaatcaacccgaatctgattacgtataacactttgattgatgggttttgtggtgtgggaaaattagggaaggcgttgagtttatgcagagatttgaagtcaagaggtctgtctccgtccctcgtcacgtataatatcctagtttccgggttctgtagaaaaggagatacttcaggagcagctaagatggttaaggagatggaagagagagggattaaaccgtcgaaagtaacatacacgatacttatcgacacatttgctcgttcggataacatggagaaagcaattcagcttcgactatcaatggaggaactaggattagtcccggatgttcatacctatagtgtattgattcatgggttttgcatcaaaggtcaaatgaatgaagcatctaggctttttaagtcgatggtcgaaaagaattgtgaaccgaacgaggttatatacaatacgatgattcttggttattgtaaggaaggtagttcttatagagcattgaagttgcttaaggagatggaagagaaagagttggctccaaatgttgctagctacagatatatgattgaagttctttgtaaagaaagaaaatcgaaagaagctgagcgtttagttgagaagatgattgattcagggattgatccatctacttcaatccttagtttgatctctagagccaaaaacgattcacatgtaagctcaaaataa

SEQ ID NO: 81991 - protein, 566 aa, Arabidopsis thaliana
  peptide (1)..(566): Ceres Seq. ID no. 12662805
MAAKSQKTLVLLANLIKFPPLKAFSLLNSPNFHEFQHTHESISILLRLLLSGNLFSHAQSLLLQVISGKIHSQFFTSSSLLHYLTESETSKTKFRLYEVIINSYVQSQSLNLSISYFNEMVDNGFVPGSNCFNYLLTFVVGSSSFNQWWSFFNENKSKVVLDVYSFGILIKGCCEAGEIEKSFDLLIELTEFGFSPNVVIYTTLIDGCCKKGEIEKAKDLFFEMGKLGLVANERTYTVLINGLFKNGVKKQGFEMYEKMQEDGVFPNLYTYNCVMNQLCKDGRTKDAFQVFDEMRERGVSCNIVTYNTLIGGLCREMKLNEANKVVDQMKSDGINPNLITYNTLIDGFCGVGKLGKALSLCRDLKSRGLSPSLVTYNILVSGFCRKGDTSGAAKMVKEMEERGIKPSKVTYTILIDTFARSDNMEKAIQLRLSMEELGLVPDVHTYSVLIHGFCIKGQMNEASRLFKSMVEKNCEPNEVIYNTMILGYCKEGSSYRALKLLKEMEEKELAPNVASYRYMIEVLCKERKSKEAERLVEKMIDSGIDPSTSILSLISRAKNDSHVSSK

SEQ ID NO: 81992 - protein, 447 aa, Arabidopsis thaliana
  peptide (1)..(447): Ceres Seq. ID no. 12662806
MVDNGFVPGSNCFNYLLTFVVGSSSFNQWWSFFNENKSKVVLDVYSFGILIKGCCEAGEIEKSFDLLIELTEFGFSPNVVIYTTLIDGCCKKGEIEKAKDLFFEMGKLGLVANERTYTVLINGLFKNGVKKQGFEMYEKMQEDGVFPNLYTYNCVMNQLCKDGRTKDAFQVFDEMRERGVSCNIVTYNTLIGGLCREMKLNEANKVVDQMKSDGINPNLITYNTLIDGFCGVGKLGKALSLCRDLKSRGLSPSLVTYNILVSGFCRKGDTSGAAKMVKEMEERGIKPSKVTYTILIDTFARSDNMEKAIQLRLSMEELGLVPDVHTYSVLIHGFCIKGQMNEASRLFKSMVEKNCEPNEVIYNTMILGYCKEGSSYRALKLLKEMEEKELAPNVASYRYMIEVLCKERKSKEAERLVEKMIDSGIDPSTSILSLISRAKNDSHVSSK

SEQ ID NO: 81993 - protein, 343 aa, Arabidopsis thaliana
  peptide (1)..(343): Ceres Seq. ID no. 12662807
MGKLGLVANERTYTVLINGLFKNGVKKQGFEMYEKMQEDGVFPNLYTYNCVMNQLCKDGRTKDAFQVFDEMRERGVSCNIVTYNTLIGGLCREMKLNEANKVVDQMKSDGINPNLITYNTLIDGFCGVGKLGKALSLCRDLKSRGLSPSLVTYNILVSGFCRKGDTSGAAKMVKEMEERGIKPSKVTYTILIDTFARSDNMEKAIQLRLSMEELGLVPDVHTYSVLIHGFCIKGQMNEASRLFKSMVEKNCEPNEVIYNTMILGYCKEGSSYRALKLLKEMEEKELAPNVASYRYMIEVLCKERKSKEAERLVEKMIDSGIDPSTSILSLISRAKNDSHVSSK

SEQ ID NO: 81994 - DNA, 759 bp, Arabidopsis thaliana
  misc_feature (1)..(759): Ceres Seq. ID no. 12662836
  misc_feature (1)..(759): Ortholog of  Ceres SEQ ID NO 13581804 as cited in SEQ ID NO 51424
  misc_feature (1)..(759): Ortholog of  Ceres SEQ ID NO 13663874 as cited in SEQ ID NO 67003
atggtgaggggaaagacagagatgaagaggatagagaacgcaacgagcaggcaagtgactttctcaaaaagaagaaatggacttttgaagaaagcttttgaattatcagtcctttgtgatgctgaagttgccctaatcatcttctctcctagaggcaaactctatgagttctctagctcctccagtatacctaaaacagtagaaagatatcaaaagcgaatacaagatctcgggtctaaccataagagaaatgataattcacagcaatcgaaggacgaaacctatggcttggcgagaaagatcgaacatttggagatttcgacacgaaaaatgatgggagaaggacttgacgcatcttctatagaagagttacaacaattggagaaccagttggacagaagcttaatgaaaataagagccaaaaagtaccagttattacgagaagaaactgagaaattaaaagaaaaggagaggaacctcattgcagaaaataaaatgctgatggagaagtgtgagatgcaaggaagaggaataataggaagaatatcatcatcatcatcaacatcagaactggatatagatgacaatgaaatggaagtggtgactgatttgttcattggacctcctgagactcgacacttcaaaaagtttcctccttcaaactaacatatatagtacaatgcttatatagatattatgtagggaattacttttttccctgaagaaaaattgatgttacttactgaatttagcagttgc

SEQ ID NO: 81995 - protein, 221 aa, Arabidopsis thaliana
  peptide (1)..(221): Ceres Seq. ID no. 12662837
MVRGKTEMKRIENATSRQVTFSKRRNGLLKKAFELSVLCDAEVALIIFSPRGKLYEFSSSSSIPKTVERYQKRIQDLGSNHKRNDNSQQSKDETYGLARKIEHLEISTRKMMGEGLDASSIEELQQLENQLDRSLMKIRAKKYQLLREETEKLKEKERNLIAENKMLMEKCEMQGRGIIGRISSSSSTSELDIDDNEMEVVTDLFIGPPETRHFKKFPPSN

SEQ ID NO: 81996 - protein, 214 aa, Arabidopsis thaliana
  peptide (1)..(214): Ceres Seq. ID no. 12662838
MKRIENATSRQVTFSKRRNGLLKKAFELSVLCDAEVALIIFSPRGKLYEFSSSSSIPKTVERYQKRIQDLGSNHKRNDNSQQSKDETYGLARKIEHLEISTRKMMGEGLDASSIEELQQLENQLDRSLMKIRAKKYQLLREETEKLKEKERNLIAENKMLMEKCEMQGRGIIGRISSSSSTSELDIDDNEMEVVTDLFIGPPETRHFKKFPPSN

SEQ ID NO: 81997 - protein, 111 aa, Arabidopsis thaliana
  peptide (1)..(111): Ceres Seq. ID no. 12662839
MMGEGLDASSIEELQQLENQLDRSLMKIRAKKYQLLREETEKLKEKERNLIAENKMLMEKCEMQGRGIIGRISSSSSTSELDIDDNEMEVVTDLFIGPPETRHFKKFPPSN

SEQ ID NO: 81998 - DNA, 1333 bp, Arabidopsis thaliana
  misc_feature (1)..(1333): Ceres Seq. ID no. 12662852
  misc_feature (1)..(1333): Ortholog of  Ceres SEQ ID NO 14306059 as cited in SEQ ID NO 52249
  misc_feature (1)..(1333): Ortholog of  Ceres SEQ ID NO 15170479 as cited in SEQ ID NO 52835
  misc_feature (1)..(1333): Ortholog of  Ceres SEQ ID NO 13596087 as cited in SEQ ID NO 68336
attaacaaacaaaccgaaaaaagaaaaaaactcatctttctccaaaatcacacaaatcttctttatttgttattctcaatccttccttcatccccaggtttctttcgattcgttgagtcattcaatttttccatcactgggtttttctctctgaatccgatcggagaatccagtcgattactaatctagcgctctctttttttctactcgatgacttatcacgaagaagacgatacagtttctgaatttcgagttagagttgaagaagatggagttgataaattaggtcattatgttaaacttactgaagatttcgaagtacatcgacaagaaacagaacaagaatcttcatcatcaccgtcttcttcttcttcatgtggacagaaacgatctgtttggttttggatcaagcttggtcttttcttcacttttctaactgctttgggtctcgctggttacaaatggctataccctttaatcatggataaggagctaatcccactcataaaatgggagatggagacatttacacaccctgtgtgcggtattcttgtgtttgcatcagtctctttattccctgtgatacttattccaactacgccgtcaatgtgggtggctgggattacatttggttatttctatggccttctccttactcttccagctgtagctattggtgtttcacttccttacttcatcagctatctcttcctcaacaaaattcaaggttggttagaaagatatccagatcaagctgcaatgttgagagctgctggtggaggcagttggtttcatcagtttcgtgcagttaccttaatccggatttctccatttccttttgctgtatataattactgcgctgttgcaactcgtgtgaagttcggtccttacatggctggttctctcgtaggcatggcgccggagatttttgtcgcaatttatacagggattcttataaggacattggcagatgcatccactgcggaacaaaagggtctctcgattcttcaaattgttctcaacatttttggttttgtagcaactgttgtgacaactgttctcatcactaagtatgcgaaaagacagcttgaagttatgaagaaggagaaggaagctttgttgttacagtaatggagacaacaacctcagaagttatgtctctgcttattcccaaagtacaggttttcgtccatgatgtgaaagaactcttgatttttggtctctgttttggtttgtttatagccgagaaatgaaagggtataaaagaaattataatgactatataaacactaactaaactctctaacacgatttaatcttatttgcgttttct

SEQ ID NO: 81999 - protein, 306 aa, Arabidopsis thaliana
  peptide (1)..(306): Ceres Seq. ID no. 12662853
MTYHEEDDTVSEFRVRVEEDGVDKLGHYVKLTEDFEVHRQETEQESSSSPSSSSSCGQKRSVWFWIKLGLFFTFLTALGLAGYKWLYPLIMDKELIPLIKWEMETFTHPVCGILVFASVSLFPVILIPTTPSMWVAGITFGYFYGLLLTLPAVAIGVSLPYFISYLFLNKIQGWLERYPDQAAMLRAAGGGSWFHQFRAVTLIRISPFPFAVYNYCAVATRVKFGPYMAGSLVGMAPEIFVAIYTGILIRTLADASTAEQKGLSILQIVLNIFGFVATVVTTVLITKYAKRQLEVMKKEKEALLLQ

SEQ ID NO: 82000 - protein, 216 aa, Arabidopsis thaliana
  peptide (1)..(216): Ceres Seq. ID no. 12662854
MDKELIPLIKWEMETFTHPVCGILVFASVSLFPVILIPTTPSMWVAGITFGYFYGLLLTLPAVAIGVSLPYFISYLFLNKIQGWLERYPDQAAMLRAAGGGSWFHQFRAVTLIRISPFPFAVYNYCAVATRVKFGPYMAGSLVGMAPEIFVAIYTGILIRTLADASTAEQKGLSILQIVLNIFGFVATVVTTVLITKYAKRQLEVMKKEKEALLLQ

SEQ ID NO: 82001 - protein, 204 aa, Arabidopsis thaliana
  peptide (1)..(204): Ceres Seq. ID no. 12662855
METFTHPVCGILVFASVSLFPVILIPTTPSMWVAGITFGYFYGLLLTLPAVAIGVSLPYFISYLFLNKIQGWLERYPDQAAMLRAAGGGSWFHQFRAVTLIRISPFPFAVYNYCAVATRVKFGPYMAGSLVGMAPEIFVAIYTGILIRTLADASTAEQKGLSILQIVLNIFGFVATVVTTVLITKYAKRQLEVMKKEKEALLLQ

SEQ ID NO: 82002 - DNA, 5688 bp, Arabidopsis thaliana
  misc_feature (1)..(5688): Ceres Seq. ID no. 12662856
  misc_feature (1)..(5688): Ortholog of  Ceres SEQ ID NO 13596198 as cited in SEQ ID NO 68488
atgtcggagaaggaagaacttccgttgacattgacgtccatcggagcggccaccgcgactagtgattatcatcagagagtaggaagttccggtgaagggattagtagctcgagtagtgatgttgacccgaggttcatgcagaatagccccacgggtttgatgatttcccaatcgtcgtcgatgtgcaccgtaccgcctggcatggcagcaacaccaccaataagctcaggttccggtttatctcagcagcttaataattcttctagttccaagttatgtcaagtggaaggatgtcaaaaaggagcaagagatgcatctggtcgttgcatttcccatggcggtggacgtagatgccagaaacctgattgccagaagggagctgaaggtaaaacagtgtactgtaaagcccacggaggtggtcgcagatgtgaatatcttggatgcaccaaaggcgcagaaggcagtactgatttttgtatagctcatggaggtggtcgaagatgcaaccatgaagattgcacacgatctgcttggggaagaacagaattctgtgtcaagcacggtggaggagcgagatgcaaaacatacggctgcggaaaaagcgctagtggtcctttgccattctgccgagcccatggtggtggtaaaaaatgcagccatgaagattgcacaggatttgctaggggaagatcaggactctgtctcatgcacggtgggggaaagagatgccaaagagagaactgcactaaaagcgctgaaggtctttcgggactctgcatatcccatggtggtggtcggcgatgtcaatctattggatgcacaaaaggagcgaaagggagcaaaatgttctgcaaagcatgcataactaaaaggcctctaacgattgatggaggaggaaatatgggaggggtaacaacaggtgatgccttgaactatctcaaagctgtgaaggacaagtttgaagacagtgagaaatatgacactttccttgaagtcttgaatgactgtaaacatcagggagttgacactagtggcgtcatagccagattaaaagatttgttcaagggccatgacgacttacttttgggttttaatacctacttgtcaaaggagtaccaaataaccattctgcccgaggatgatttccctatcgattttcttgacaaggttgagggaccttatgaaatgacatatcagcaagctcaaacagttcaagccaatgccaatatgcaacctcaaactgagtacccttcttcctctgcggttcaatcattttcatcgggtcaacctcagatccccacctcagctccggattcttcactactagctaaaagtaatacctcaggtataactatcatcgagcacatgtcacaacagcctctaaatgttgacaaacaagttaatgatggctataactggcaaaagtatgggcaaaagaaagttaaaggcagcaagtttcctctaagctattacaagtgcacatatctaggatgtccttccaagaggaaggttgagagatctcttgatggacaagtagcagaaatcgtctacaaagatcgacacaatcacgaacctcctaaccaaggaaaagatggtagcaccacatatctaagtgggagttcgacacacatcaattgcatgagctctgaattgacagcatcacagtttagctccaacaagactaagatagagcaacaggaagcagcaagtctagctacgacaatagagtacatgtctgaggcaagtgacaatgaagaagacagtaatggagaaactagtgagggagagaaagatgaagacgagcctgaaccaaagagaagaattacagaagttcaggtttcggaactagctgatgcttcagatagaaccgtgagagagcctagggttattttccaaacaacgagtgaagttgataatttagatgatggatataggtggcggaaatatggacagaaagttgttaaagggaatccttatccaaggttttcctcctctaaagattatgatgtcgtaatcagatacggaagagcagatataagcaatgaggatttcattagccatcttcgtgcttccctctgccggagagggatttctgtctatgaaaaatttaatgaagtggatgcacttccaaaatgtagggttttgattatagtattaacaagcacatatgtcccttcgaacctcttaaacattcttgaacaccaacatacagaggatcgagtggtttatccaattttctacagactatcaccatatgattttgtctgtaacagcaagaattatgagagattttatctccaagatgagccaaaaaaatggcaagctgctttgaaggaaataactcagatgcctggctacacattgacagataagtctgaatctgaacttatagatgagattgtaagagatgctttaaaggtgctatgttctgctgataaggtgaacatgattgggatggatatgcaagtagaggagattttgtcactgctatgcattgagtcccttgatgttcgcagcattggtatatggggtacagttggtataggaaaaacaaccattgctgaagagatctttcgcaaaatctctgtccaatatgagacctgtgtcgtccttaaggacctccacaaagaagttgaggtaaaaggtcacgatgctgtgagagagaattttctgtctgaagttttagaggtagaacctcatgttatccggatatctgacattaaaacaagcttcttgagaagtcggcttcagcgtaaaaggatccttgttattcttgacgatgtgaatgattacagagatgttgacacctttttggggacgcttaactattttggtccaggaagcagaataatcatgacctctagaaatagacgtgttttcgtactatgtaaaatcgatcatgtctatgaggttaagccattagatattcctaagtctctactacttcttgatcgtgggacatgtcaaattgttttgtcacctgaggtttacaagacattgtcacttgagctggtcaaattttcaaatggaaatccccaggttcttcagttcttgagcagtattgacagagaatggaataagttatcacaagaagttaagacaacatctcccatttacatcccaggtatatttgaaaagagctgttgtgggcttgatgacaacgagaggggtatatttttggacattgcatgtttctttaataggattgataaagacaatgtcgcaatgttgctggatggttgtggtttctctgcacatgtcggatttagaggccttgttgacaaatcactgttgacaatatcacaacacaacttggtggacatgctcagttttatccaggcaactggtcgagaaattgttcgccaagaatcagctgacagaccaggagaccgcagcaggttgtggaatgccgactatatcagacacgtattcataaatgacactggcacatcagctattgagggcattttcctagacatgttgaatcttaaatttgatgcaaatcccaacgtgttcgagaaaatgtgtaaccttagactgttgaaattgtattgctccaaagcggaagagaagcatggagtatcttttccacaaggtcttgaatatttgccgagcaagctaaggcttctccattgggaatattatcctctaagttctttgccgaaaagttttaatccagagaaccttgtcgagcttaacttgccaagtagctgtgcaaagaaactttggaaaggaaaaaaggcaaggttttgtacaaccaattcaagtctggaaaagcttaaaaagatgagacttagctactccgaccagttaactaaaatcccaagactttcaagcgcaacaaatcttgagcatattgatcttgaaggttgcaacagtttgttgagccttagccagtccatttcttatcttaagaagcttgtttttctgaatttaaagggctgctcgaagctggagaatattccatctatggttgatttagaatcgcttgaggttctaaatctttcgggttgttcaaagctagggaacttcccggagatctcaccaaatgtgaaagaactgtacatgggtgggactatgatacaagaaatcccgtcatcgattaagaacttggtattgcttgagaaactggacctggaaaacagtagacatctcaagaatcttccaacaagcatctacaagttgaagcatcttgaaactctaaatctttcaggctgcataagcctggagcgatttccagactcgtcgagaaggatgaaatgcttaaggtttttggatttaagcaggacagacattaaagagctgccctcttccatatcgtatctgactgctcttgacgaactattattcgtagactccaggagaaactcgccagttgtaaccaatcccaatgccaattcaactgagttgatgccttctgagtcaagtaagcttgagatcttaggtactccggcagataacgaagtagttgttggtggtacggtagagaaaacccgtggtattgaacgaacgccgactattttggtgaagtcgagagagtatctaattcccgatgatgttgtggcggttggtggtgatattaaggggctaagaccaccagtacttcagctccaaccagcaatgaaactatctcatattcctcgaggatcaacttgggatttcgttacgcatttcgctccacctgaaacagttgcgccgccgagttcctcttcagaagccagggaagaggaagtggaaacggaagagacgggagctatgtttatcccattgggggataaggagacatgctcattcactgtaaacaagggtgactcctcaaggacaatatctaatacgtcgccgatttatgcctccgaaggatctttcatcacgtgttggcagaagggtcaacttctgggacgaggatcattagggtccgtatatgaaggcatttcagcagacggggacttctttgctttcaaggaagtttcactacttgatcagggaagtcaggcacatgaatggatacaacaagtcgagggggggattgcgctacttagtcagcttcagcatcagaatatcgtgcgatatcgtggcacaactaaggacgagtcgaatttgtacatttttcttgaacttgtaacccaagggtcccttcgaaaactctaccaaagaaaccagcttggggactctgtagtctccttatacacaagacagattcttgatggattgaaatatctccacgataaaggttttatacacaggaacattaaatgtgcaaatgtattggtggacgctaatggaacagttaaacttgcagattttggattggctaaggtaatgtccctctggcgaactccgtattggaattggatggctccagaggttattcttaacccgaaggattatgatggttatggaactccagctgatatatggagccttgggtgtactgtgctagaaatgttgactggtcagattccctactccgatctggaaatcggtacagccttgtataacattggaacgggtaagcttccgaaaatacctgatattctatcgctagacgcccgggatttcatacttacgtgtctcaaagtgaacccggaagagcggccaactgcagctgagctgcttaaccatccatttgtgaatatgccattaccatcctcgggctcaggttcagtatcttcgctcctccgtggatga

SEQ ID NO: 82003 - protein, 1895 aa, Arabidopsis thaliana
  peptide (1)..(1895): Ceres Seq. ID no. 12662857
MSEKEELPLTLTSIGAATATSDYHQRVGSSGEGISSSSSDVDPRFMQNSPTGLMISQSSSMCTVPPGMAATPPISSGSGLSQQLNNSSSSKLCQVEGCQKGARDASGRCISHGGGRRCQKPDCQKGAEGKTVYCKAHGGGRRCEYLGCTKGAEGSTDFCIAHGGGRRCNHEDCTRSAWGRTEFCVKHGGGARCKTYGCGKSASGPLPFCRAHGGGKKCSHEDCTGFARGRSGLCLMHGGGKRCQRENCTKSAEGLSGLCISHGGGRRCQSIGCTKGAKGSKMFCKACITKRPLTIDGGGNMGGVTTGDALNYLKAVKDKFEDSEKYDTFLEVLNDCKHQGVDTSGVIARLKDLFKGHDDLLLGFNTYLSKEYQITILPEDDFPIDFLDKVEGPYEMTYQQAQTVQANANMQPQTEYPSSSAVQSFSSGQPQIPTSAPDSSLLAKSNTSGITIIEHMSQQPLNVDKQVNDGYNWQKYGQKKVKGSKFPLSYYKCTYLGCPSKRKVERSLDGQVAEIVYKDRHNHEPPNQGKDGSTTYLSGSSTHINCMSSELTASQFSSNKTKIEQQEAASLATTIEYMSEASDNEEDSNGETSEGEKDEDEPEPKRRITEVQVSELADASDRTVREPRVIFQTTSEVDNLDDGYRWRKYGQKVVKGNPYPRFSSSKDYDVVIRYGRADISNEDFISHLRASLCRRGISVYEKFNEVDALPKCRVLIIVLTSTYVPSNLLNILEHQHTEDRVVYPIFYRLSPYDFVCNSKNYERFYLQDEPKKWQAALKEITQMPGYTLTDKSESELIDEIVRDALKVLCSADKVNMIGMDMQVEEILSLLCIESLDVRSIGIWGTVGIGKTTIAEEIFRKISVQYETCVVLKDLHKEVEVKGHDAVRENFLSEVLEVEPHVIRISDIKTSFLRSRLQRKRILVILDDVNDYRDVDTFLGTLNYFGPGSRIIMTSRNRRVFVLCKIDHVYEVKPLDIPKSLLLLDRGTCQIVLSPEVYKTLSLELVKFSNGNPQVLQFLSSIDREWNKLSQEVKTTSPIYIPGIFEKSCCGLDDNERGIFLDIACFFNRIDKDNVAMLLDGCGFSAHVGFRGLVDKSLLTISQHNLVDMLSFIQATGREIVRQESADRPGDRSRLWNADYIRHVFINDTGTSAIEGIFLDMLNLKFDANPNVFEKMCNLRLLKLYCSKAEEKHGVSFPQGLEYLPSKLRLLHWEYYPLSSLPKSFNPENLVELNLPSSCAKKLWKGKKARFCTTNSSLEKLKKMRLSYSDQLTKIPRLSSATNLEHIDLEGCNSLLSLSQSISYLKKLVFLNLKGCSKLENIPSMVDLESLEVLNLSGCSKLGNFPEISPNVKELYMGGTMIQEIPSSIKNLVLLEKLDLENSRHLKNLPTSIYKLKHLETLNLSGCISLERFPDSSRRMKCLRFLDLSRTDIKELPSSISYLTALDELLFVDSRRNSPVVTNPNANSTELMPSESSKLEILGTPADNEVVVGGTVEKTRGIERTPTILVKSREYLIPDDVVAVGGDIKGLRPPVLQLQPAMKLSHIPRGSTWDFVTHFAPPETVAPPSSSSEAREEEVETEETGAMFIPLGDKETCSFTVNKGDSSRTISNTSPIYASEGSFITCWQKGQLLGRGSLGSVYEGISADGDFFAFKEVSLLDQGSQAHEWIQQVEGGIALLSQLQHQNIVRYRGTTKDESNLYIFLELVTQGSLRKLYQRNQLGDSVVSLYTRQILDGLKYLHDKGFIHRNIKCANVLVDANGTVKLADFGLAKVMSLWRTPYWNWMAPEVILNPKDYDGYGTPADIWSLGCTVLEMLTGQIPYSDLEIGTALYNIGTGKLPKIPDILSLDARDFILTCLKVNPEERPTAAELLNHPFVNMPLPSSGSGSVSSLLRG

SEQ ID NO: 82004 - protein, 1850 aa, Arabidopsis thaliana
  peptide (1)..(1850): Ceres Seq. ID no. 12662858
MQNSPTGLMISQSSSMCTVPPGMAATPPISSGSGLSQQLNNSSSSKLCQVEGCQKGARDASGRCISHGGGRRCQKPDCQKGAEGKTVYCKAHGGGRRCEYLGCTKGAEGSTDFCIAHGGGRRCNHEDCTRSAWGRTEFCVKHGGGARCKTYGCGKSASGPLPFCRAHGGGKKCSHEDCTGFARGRSGLCLMHGGGKRCQRENCTKSAEGLSGLCISHGGGRRCQSIGCTKGAKGSKMFCKACITKRPLTIDGGGNMGGVTTGDALNYLKAVKDKFEDSEKYDTFLEVLNDCKHQGVDTSGVIARLKDLFKGHDDLLLGFNTYLSKEYQITILPEDDFPIDFLDKVEGPYEMTYQQAQTVQANANMQPQTEYPSSSAVQSFSSGQPQIPTSAPDSSLLAKSNTSGITIIEHMSQQPLNVDKQVNDGYNWQKYGQKKVKGSKFPLSYYKCTYLGCPSKRKVERSLDGQVAEIVYKDRHNHEPPNQGKDGSTTYLSGSSTHINCMSSELTASQFSSNKTKIEQQEAASLATTIEYMSEASDNEEDSNGETSEGEKDEDEPEPKRRITEVQVSELADASDRTVREPRVIFQTTSEVDNLDDGYRWRKYGQKVVKGNPYPRFSSSKDYDVVIRYGRADISNEDFISHLRASLCRRGISVYEKFNEVDALPKCRVLIIVLTSTYVPSNLLNILEHQHTEDRVVYPIFYRLSPYDFVCNSKNYERFYLQDEPKKWQAALKEITQMPGYTLTDKSESELIDEIVRDALKVLCSADKVNMIGMDMQVEEILSLLCIESLDVRSIGIWGTVGIGKTTIAEEIFRKISVQYETCVVLKDLHKEVEVKGHDAVRENFLSEVLEVEPHVIRISDIKTSFLRSRLQRKRILVILDDVNDYRDVDTFLGTLNYFGPGSRIIMTSRNRRVFVLCKIDHVYEVKPLDIPKSLLLLDRGTCQIVLSPEVYKTLSLELVKFSNGNPQVLQFLSSIDREWNKLSQEVKTTSPIYIPGIFEKSCCGLDDNERGIFLDIACFFNRIDKDNVAMLLDGCGFSAHVGFRGLVDKSLLTISQHNLVDMLSFIQATGREIVRQESADRPGDRSRLWNADYIRHVFINDTGTSAIEGIFLDMLNLKFDANPNVFEKMCNLRLLKLYCSKAEEKHGVSFPQGLEYLPSKLRLLHWEYYPLSSLPKSFNPENLVELNLPSSCAKKLWKGKKARFCTTNSSLEKLKKMRLSYSDQLTKIPRLSSATNLEHIDLEGCNSLLSLSQSISYLKKLVFLNLKGCSKLENIPSMVDLESLEVLNLSGCSKLGNFPEISPNVKELYMGGTMIQEIPSSIKNLVLLEKLDLENSRHLKNLPTSIYKLKHLETLNLSGCISLERFPDSSRRMKCLRFLDLSRTDIKELPSSISYLTALDELLFVDSRRNSPVVTNPNANSTELMPSESSKLEILGTPADNEVVVGGTVEKTRGIERTPTILVKSREYLIPDDVVAVGGDIKGLRPPVLQLQPAMKLSHIPRGSTWDFVTHFAPPETVAPPSSSSEAREEEVETEETGAMFIPLGDKETCSFTVNKGDSSRTISNTSPIYASEGSFITCWQKGQLLGRGSLGSVYEGISADGDFFAFKEVSLLDQGSQAHEWIQQVEGGIALLSQLQHQNIVRYRGTTKDESNLYIFLELVTQGSLRKLYQRNQLGDSVVSLYTRQILDGLKYLHDKGFIHRNIKCANVLVDANGTVKLADFGLAKVMSLWRTPYWNWMAPEVILNPKDYDGYGTPADIWSLGCTVLEMLTGQIPYSDLEIGTALYNIGTGKLPKIPDILSLDARDFILTCLKVNPEERPTAAELLNHPFVNMPLPSSGSGSVSSLLRG

SEQ ID NO: 82005 - protein, 1842 aa, Arabidopsis thaliana
  peptide (1)..(1842): Ceres Seq. ID no. 12662859
MISQSSSMCTVPPGMAATPPISSGSGLSQQLNNSSSSKLCQVEGCQKGARDASGRCISHGGGRRCQKPDCQKGAEGKTVYCKAHGGGRRCEYLGCTKGAEGSTDFCIAHGGGRRCNHEDCTRSAWGRTEFCVKHGGGARCKTYGCGKSASGPLPFCRAHGGGKKCSHEDCTGFARGRSGLCLMHGGGKRCQRENCTKSAEGLSGLCISHGGGRRCQSIGCTKGAKGSKMFCKACITKRPLTIDGGGNMGGVTTGDALNYLKAVKDKFEDSEKYDTFLEVLNDCKHQGVDTSGVIARLKDLFKGHDDLLLGFNTYLSKEYQITILPEDDFPIDFLDKVEGPYEMTYQQAQTVQANANMQPQTEYPSSSAVQSFSSGQPQIPTSAPDSSLLAKSNTSGITIIEHMSQQPLNVDKQVNDGYNWQKYGQKKVKGSKFPLSYYKCTYLGCPSKRKVERSLDGQVAEIVYKDRHNHEPPNQGKDGSTTYLSGSSTHINCMSSELTASQFSSNKTKIEQQEAASLATTIEYMSEASDNEEDSNGETSEGEKDEDEPEPKRRITEVQVSELADASDRTVREPRVIFQTTSEVDNLDDGYRWRKYGQKVVKGNPYPRFSSSKDYDVVIRYGRADISNEDFISHLRASLCRRGISVYEKFNEVDALPKCRVLIIVLTSTYVPSNLLNILEHQHTEDRVVYPIFYRLSPYDFVCNSKNYERFYLQDEPKKWQAALKEITQMPGYTLTDKSESELIDEIVRDALKVLCSADKVNMIGMDMQVEEILSLLCIESLDVRSIGIWGTVGIGKTTIAEEIFRKISVQYETCVVLKDLHKEVEVKGHDAVRENFLSEVLEVEPHVIRISDIKTSFLRSRLQRKRILVILDDVNDYRDVDTFLGTLNYFGPGSRIIMTSRNRRVFVLCKIDHVYEVKPLDIPKSLLLLDRGTCQIVLSPEVYKTLSLELVKFSNGNPQVLQFLSSIDREWNKLSQEVKTTSPIYIPGIFEKSCCGLDDNERGIFLDIACFFNRIDKDNVAMLLDGCGFSAHVGFRGLVDKSLLTISQHNLVDMLSFIQATGREIVRQESADRPGDRSRLWNADYIRHVFINDTGTSAIEGIFLDMLNLKFDANPNVFEKMCNLRLLKLYCSKAEEKHGVSFPQGLEYLPSKLRLLHWEYYPLSSLPKSFNPENLVELNLPSSCAKKLWKGKKARFCTTNSSLEKLKKMRLSYSDQLTKIPRLSSATNLEHIDLEGCNSLLSLSQSISYLKKLVFLNLKGCSKLENIPSMVDLESLEVLNLSGCSKLGNFPEISPNVKELYMGGTMIQEIPSSIKNLVLLEKLDLENSRHLKNLPTSIYKLKHLETLNLSGCISLERFPDSSRRMKCLRFLDLSRTDIKELPSSISYLTALDELLFVDSRRNSPVVTNPNANSTELMPSESSKLEILGTPADNEVVVGGTVEKTRGIERTPTILVKSREYLIPDDVVAVGGDIKGLRPPVLQLQPAMKLSHIPRGSTWDFVTHFAPPETVAPPSSSSEAREEEVETEETGAMFIPLGDKETCSFTVNKGDSSRTISNTSPIYASEGSFITCWQKGQLLGRGSLGSVYEGISADGDFFAFKEVSLLDQGSQAHEWIQQVEGGIALLSQLQHQNIVRYRGTTKDESNLYIFLELVTQGSLRKLYQRNQLGDSVVSLYTRQILDGLKYLHDKGFIHRNIKCANVLVDANGTVKLADFGLAKVMSLWRTPYWNWMAPEVILNPKDYDGYGTPADIWSLGCTVLEMLTGQIPYSDLEIGTALYNIGTGKLPKIPDILSLDARDFILTCLKVNPEERPTAAELLNHPFVNMPLPSSGSGSVSSLLRG

SEQ ID NO: 82006 - DNA, 1364 bp, Arabidopsis thaliana
  misc_feature (1)..(1364): Ceres Seq. ID no. 12662860
  misc_feature (1)..(1364): Ortholog of  Ceres SEQ ID NO 14314925 as cited in SEQ ID NO 57985
  misc_feature (1)..(1364): Ortholog of  Ceres SEQ ID NO 13591365 as cited in SEQ ID NO 62720
acatctctttctctttctctcttaagcctcaagaaagaaaaatgggtgtgatatctccgactgaaactctgttcttaaagtctcaacatcgtcttcttcaacctcgaaactattcatacgcacttgcttttcacagcactcgacgagttgcgaatttcccacgcaactcattctcttctctaggatcatgttctgtagattttccactacgaagtaacccgatttcacaaaatagcaagtcaattcatccttggcggagatatgtatccgaatctgactcaaacgagctgtatcataagaaggtttcttctattatggaaacattaaagcaagcctactcttttattcctcatggaattctgttaagtacaatattagctcttgtctatccaccttctttcacatggttcaagccaagggttcatgatgtttgctgttggtatcaactctaatgaaagagattttcttgaagcacttaaaagaccagatgctatttttgccggttacatcggacaatacttgattaaacctctcttaggttacattttcggcgtaattgctgtctctcttttcaatctacctacttctataggtgctggaatcatgttggtctcatgtgttagtggagctcagctatcaaattacacaactttcttgaccgatccttcactcgcggcgcttagcatcgtcatgacatctatctcaacggccactgcggtcctcgttacacctatgctttcactcttactcattggtaaaaagcttcccgttgatgtgtttgggatgatctctagcattcttcaagtggtgattacacctattgccgcaggactacttctgaaccggttgtttccaaggttgtctaatgcaatcaaaccatttcttccggcgttaacagttatcgatatgagttgttgcataggagcaccccttgctttgaatatagattcaatcttgtctccgtttggtgcaaccattttgttcctcgtcatcacgtttcatctcttggcttttgttgctggttactttttcactggtttcttcttcagcaaggcacctgatgtaaaagctctgcaaagaacaatttcctatgaaacaggaatgcaaagtagtcttctcgctctggccctcgctacaaagttctttcaagatcctctcgttggagtgcctccagcaatctccacggttgttatgtctctaatgggcgtctcgcttgttaccatatggaaaaacagaaaggagtagtgacatgaaacctaatcagggattttgcggaatttgctgttgtttatggtcggctgttccaattgttttcgtaatgatctggttatgttttcatataaaagaaccaagaatttacccat

SEQ ID NO: 82007 - protein, 273 aa, Arabidopsis thaliana
  peptide (1)..(273): Ceres Seq. ID no. 12662861
MMFAVGINSNERDFLEALKRPDAIFAGYIGQYLIKPLLGYIFGVIAVSLFNLPTSIGAGIMLVSCVSGAQLSNYTTFLTDPSLAALSIVMTSISTATAVLVTPMLSLLLIGKKLPVDVFGMISSILQVVITPIAAGLLLNRLFPRLSNAIKPFLPALTVIDMSCCIGAPLALNIDSILSPFGATILFLVITFHLLAFVAGYFFTGFFFSKAPDVKALQRTISYETGMQSSLLALALATKFFQDPLVGVPPAISTVVMSLMGVSLVTIWKNRKE

SEQ ID NO: 82008 - protein, 272 aa, Arabidopsis thaliana
  peptide (1)..(272): Ceres Seq. ID no. 12662862
MFAVGINSNERDFLEALKRPDAIFAGYIGQYLIKPLLGYIFGVIAVSLFNLPTSIGAGIMLVSCVSGAQLSNYTTFLTDPSLAALSIVMTSISTATAVLVTPMLSLLLIGKKLPVDVFGMISSILQVVITPIAAGLLLNRLFPRLSNAIKPFLPALTVIDMSCCIGAPLALNIDSILSPFGATILFLVITFHLLAFVAGYFFTGFFFSKAPDVKALQRTISYETGMQSSLLALALATKFFQDPLVGVPPAISTVVMSLMGVSLVTIWKNRKE

SEQ ID NO: 82009 - protein, 213 aa, Arabidopsis thaliana
  peptide (1)..(213): Ceres Seq. ID no. 12662863
MLVSCVSGAQLSNYTTFLTDPSLAALSIVMTSISTATAVLVTPMLSLLLIGKKLPVDVFGMISSILQVVITPIAAGLLLNRLFPRLSNAIKPFLPALTVIDMSCCIGAPLALNIDSILSPFGATILFLVITFHLLAFVAGYFFTGFFFSKAPDVKALQRTISYETGMQSSLLALALATKFFQDPLVGVPPAISTVVMSLMGVSLVTIWKNRKE

SEQ ID NO: 82010 - DNA, 1020 bp, Arabidopsis thaliana
  misc_feature (1)..(1020): Ceres Seq. ID no. 12662864
  misc_feature (1)..(1020): Ortholog of  Ceres SEQ ID NO 13584646 as cited in SEQ ID NO 60715
atggatccagttcaatctcatggatcacaaagctctcttcctcctcctttccatgctagagatttccaattacatcttcaacaacaacaacaacatcaacaacaacatcaacaacaacaacaacaacagttctttctccaccatcatcagcaaccacaaagaaaccttgatcaagatcacgagcagcaaggagggtcaatattgaatagatctatcaagatggatcgcgaagagacaagcgataacatggacaacatcgctaataccaacagcggtagcgaaggtaaagagatgagtttacacggaggagaaggaggaagcggtggtggaggaagtggagaacagatgacaagaaggccaagaggaagaccagcaggatccaagaacaaacctaaagctccaataatcataacaagagacagcgcaaacgcgcttcgaactcacgtcatggagataggagacggatgtgacatagttgactgtatggctacgttcgctagacgccgccaaagaggcgtttgcgttatgagcggtacaggaagcgttactaacgtcactatacgtcagcctggatcgccacctggctcggtggttagccttcacggccggtttgaaatcctctctctttcgggatctttcttgcctccgcctgcgccgcctgcagccaccggactaagcgtttacctagccggaggacaagggcaggtcgttggaggtagtgtggtgggacctttgttgtgttcgggtcctgtggtggttatggcggcttcttttagcaatgcggcgtacgaaaggctgcctttggaagaagatgagatgcagacgccagttcaaggaggcggtggaggaggaggaggtggtggtggaatgggatctcccccgatgatgggacagcaacaagctatggcagctatggcggcggctcaaggactaccaccgaatcttcttggttcggttcagttgccaccgccacaacagaatgatcagcagtattggtctacgggtcggccaccgtattga

SEQ ID NO: 82011 - protein, 339 aa, Arabidopsis thaliana
  peptide (1)..(339): Ceres Seq. ID no. 12662865
MDPVQSHGSQSSLPPPFHARDFQLHLQQQQQHQQQHQQQQQQQFFLHHHQQPQRNLDQDHEQQGGSILNRSIKMDREETSDNMDNIANTNSGSEGKEMSLHGGEGGSGGGGSGEQMTRRPRGRPAGSKNKPKAPIIITRDSANALRTHVMEIGDGCDIVDCMATFARRRQRGVCVMSGTGSVTNVTIRQPGSPPGSVVSLHGRFEILSLSGSFLPPPAPPAATGLSVYLAGGQGQVVGGSVVGPLLCSGPVVVMAASFSNAAYERLPLEEDEMQTPVQGGGGGGGGGGGMGSPPMMGQQQAMAAMAAAQGLPPNLLGSVQLPPPQQNDQQYWSTGRPPY

SEQ ID NO: 82012 - protein, 266 aa, Arabidopsis thaliana
  peptide (1)..(266): Ceres Seq. ID no. 12662866
MDREETSDNMDNIANTNSGSEGKEMSLHGGEGGSGGGGSGEQMTRRPRGRPAGSKNKPKAPIIITRDSANALRTHVMEIGDGCDIVDCMATFARRRQRGVCVMSGTGSVTNVTIRQPGSPPGSVVSLHGRFEILSLSGSFLPPPAPPAATGLSVYLAGGQGQVVGGSVVGPLLCSGPVVVMAASFSNAAYERLPLEEDEMQTPVQGGGGGGGGGGGMGSPPMMGQQQAMAAMAAAQGLPPNLLGSVQLPPPQQNDQQYWSTGRPPY

SEQ ID NO: 82013 - protein, 257 aa, Arabidopsis thaliana
  peptide (1)..(257): Ceres Seq. ID no. 12662867
MDNIANTNSGSEGKEMSLHGGEGGSGGGGSGEQMTRRPRGRPAGSKNKPKAPIIITRDSANALRTHVMEIGDGCDIVDCMATFARRRQRGVCVMSGTGSVTNVTIRQPGSPPGSVVSLHGRFEILSLSGSFLPPPAPPAATGLSVYLAGGQGQVVGGSVVGPLLCSGPVVVMAASFSNAAYERLPLEEDEMQTPVQGGGGGGGGGGGMGSPPMMGQQQAMAAMAAAQGLPPNLLGSVQLPPPQQNDQQYWSTGRPPY

SEQ ID NO: 82014 - DNA, 2028 bp, Arabidopsis thaliana
  misc_feature (1)..(2028): Ceres Seq. ID no. 12662879
  misc_feature (1)..(2028): Ortholog of  Ceres SEQ ID NO 14312351 as cited in SEQ ID NO 55278
  misc_feature (1)..(2028): Ortholog of  Ceres SEQ ID NO 13655237 as cited in SEQ ID NO 62892
  misc_feature (1)..(2028): Ortholog of  Ceres SEQ ID NO 13597268 as cited in SEQ ID NO 63929
  misc_feature (1)..(2028): Ortholog of  Ceres SEQ ID NO 13659840 as cited in SEQ ID NO 66970
  misc_feature (1)..(2028): Ortholog of  Ceres SEQ ID NO 13660544 as cited in SEQ ID NO 67401
  misc_feature (1)..(2028): Ortholog of  Ceres SEQ ID NO 13584744 as cited in SEQ ID NO 69137
  misc_feature (1)..(2028): Ortholog of  Ceres SEQ ID NO 15180683 as cited in SEQ ID NO 0
atgtcttcttgtttcaaatcctctgtttctctgttctcagttttcttgtttatgatcttgaagacagttacttcagatccaacttatctctaccacatatgtccaaacacaacaacgtactcaagaaacagcagttacttaaccaatctccgaactgttctttcatctctctcctctccaaacgcagcttatgcatcgctttttgataacgcagccgctggtgaagagaacgatagcaacagagtctatggtgtttttctctgccgtggagatgtctcagccgaaatctgccgtgactgtgtcgcgtttgcagccaacgaaacgctccaaaggtgtccaagagagaaagtggcagtgatttggtacgatgagtgtatggtaagatactctaatcaaagcatcgtagggcaaatgagaattagacctggtgttttcttgacgaacaagcaaaacatcacagagaatcaagtgagcagattcaacgagtctttgcctgctctgctcatagatgttgcggtgaaagccgctttgagctcgagaaagttcgctacggagaaagccaatttcacggtttttcagacaatctatagccttgtgcagtgcactccggatttgactaatcaagattgtgagagctgtttgagacaagtcattaattacttgccgagatgttgtgatcgaagcgttggcgggagagtaatcgctccgagttgtagcttcagatatgagctttatccattttacaatgaaactatagctgcggctccgatggctcctcctccttcgtcaacggtgactgcaccaccactgaatattccttcagaaaaaggtaaaggcaagaacttgacagttatagttaccgcgatcgctgtaccggtttctgtctgtgtgttacttcttggtgctatgtgttggttactagcaagaagaaggaataataagctcagtgctgaaacagaggatttagatgaagatggtattacgtcaacagaaacactgcaattccagtttagcgcaatcgaagcagcgacaaataagttctcagaaagtaacaagcttggtcatggtggatttggtgaagtttataagggtcagcttataactggagaaacagtagcaataaagagactatctcaaggatcgacacaaggagctgaagaattcaagaacgaagttgatgtggtcgcaaagctacaacacaggaatctagctaagctcttgggatattgcttagatggagaagagaaaatacttgtctatgagtttgttcctaacaaaagcctcgactacttccttttcgataatgagaagagaagagttttggattggcaaagaaggtacaagatcattgaagggatagctcgaggaatactatatttacatcgagattctcggctaacgatcattcaccgtgaccttaaagctagtaacatactcttagatgcagacatgcatccgaagatctcagatttcggtatggcgaggatctttggtgttgatcaaactcaagccaatactaaaagaatcgttggtacatatggttatatgtctcctgagtatgcgatccacgggaaatactcggtgaaatcggatgtctatagcttcggagtcttggttcttgaactcataaccggcaagaaaaacagtagcttctatgaagaagatggtcttggagatttagtgacctacgtgtggaagctatgggtggagaattcaccactggagctagtagatgaagcaatgagagggaattttcagacaaatgaagtgatcagatgcattcacattgctttgttatgtgttcaagaagattcttcagagagaccttcaatggatgacattcttgtgatgatgaacagcttcactgttactttaccgattccaaagcgatctgggtttcttcttcgaaccatgaaagactctagagatccacgctcaggaggttctgcttctgatcactctgcaacaagcaagtctttgcctttgtctgttgacgattcttccatcactatagtttatcctcgttga

SEQ ID NO: 82015 - protein, 675 aa, Arabidopsis thaliana
  peptide (1)..(675): Ceres Seq. ID no. 12662880
MSSCFKSSVSLFSVFLFMILKTVTSDPTYLYHICPNTTTYSRNSSYLTNLRTVLSSLSSPNAAYASLFDNAAAGEENDSNRVYGVFLCRGDVSAEICRDCVAFAANETLQRCPREKVAVIWYDECMVRYSNQSIVGQMRIRPGVFLTNKQNITENQVSRFNESLPALLIDVAVKAALSSRKFATEKANFTVFQTIYSLVQCTPDLTNQDCESCLRQVINYLPRCCDRSVGGRVIAPSCSFRYELYPFYNETIAAAPMAPPPSSTVTAPPLNIPSEKGKGKNLTVIVTAIAVPVSVCVLLLGAMCWLLARRRNNKLSAETEDLDEDGITSTETLQFQFSAIEAATNKFSESNKLGHGGFGEVYKGQLITGETVAIKRLSQGSTQGAEEFKNEVDVVAKLQHRNLAKLLGYCLDGEEKILVYEFVPNKSLDYFLFDNEKRRVLDWQRRYKIIEGIARGILYLHRDSRLTIIHRDLKASNILLDADMHPKISDFGMARIFGVDQTQANTKRIVGTYGYMSPEYAIHGKYSVKSDVYSFGVLVLELITGKKNSSFYEEDGLGDLVTYVWKLWVENSPLELVDEAMRGNFQTNEVIRCIHIALLCVQEDSSERPSMDDILVMMNSFTVTLPIPKRSGFLLRTMKDSRDPRSGGSASDHSATSKSLPLSVDDSSITIVYPR

SEQ ID NO: 82016 - protein, 658 aa, Arabidopsis thaliana
  peptide (1)..(658): Ceres Seq. ID no. 12662881
MILKTVTSDPTYLYHICPNTTTYSRNSSYLTNLRTVLSSLSSPNAAYASLFDNAAAGEENDSNRVYGVFLCRGDVSAEICRDCVAFAANETLQRCPREKVAVIWYDECMVRYSNQSIVGQMRIRPGVFLTNKQNITENQVSRFNESLPALLIDVAVKAALSSRKFATEKANFTVFQTIYSLVQCTPDLTNQDCESCLRQVINYLPRCCDRSVGGRVIAPSCSFRYELYPFYNETIAAAPMAPPPSSTVTAPPLNIPSEKGKGKNLTVIVTAIAVPVSVCVLLLGAMCWLLARRRNNKLSAETEDLDEDGITSTETLQFQFSAIEAATNKFSESNKLGHGGFGEVYKGQLITGETVAIKRLSQGSTQGAEEFKNEVDVVAKLQHRNLAKLLGYCLDGEEKILVYEFVPNKSLDYFLFDNEKRRVLDWQRRYKIIEGIARGILYLHRDSRLTIIHRDLKASNILLDADMHPKISDFGMARIFGVDQTQANTKRIVGTYGYMSPEYAIHGKYSVKSDVYSFGVLVLELITGKKNSSFYEEDGLGDLVTYVWKLWVENSPLELVDEAMRGNFQTNEVIRCIHIALLCVQEDSSERPSMDDILVMMNSFTVTLPIPKRSGFLLRTMKDSRDPRSGGSASDHSATSKSLPLSVDDSSITIVYPR

SEQ ID NO: 82017 - protein, 550 aa, Arabidopsis thaliana
  peptide (1)..(550): Ceres Seq. ID no. 12662882
MVRYSNQSIVGQMRIRPGVFLTNKQNITENQVSRFNESLPALLIDVAVKAALSSRKFATEKANFTVFQTIYSLVQCTPDLTNQDCESCLRQVINYLPRCCDRSVGGRVIAPSCSFRYELYPFYNETIAAAPMAPPPSSTVTAPPLNIPSEKGKGKNLTVIVTAIAVPVSVCVLLLGAMCWLLARRRNNKLSAETEDLDEDGITSTETLQFQFSAIEAATNKFSESNKLGHGGFGEVYKGQLITGETVAIKRLSQGSTQGAEEFKNEVDVVAKLQHRNLAKLLGYCLDGEEKILVYEFVPNKSLDYFLFDNEKRRVLDWQRRYKIIEGIARGILYLHRDSRLTIIHRDLKASNILLDADMHPKISDFGMARIFGVDQTQANTKRIVGTYGYMSPEYAIHGKYSVKSDVYSFGVLVLELITGKKNSSFYEEDGLGDLVTYVWKLWVENSPLELVDEAMRGNFQTNEVIRCIHIALLCVQEDSSERPSMDDILVMMNSFTVTLPIPKRSGFLLRTMKDSRDPRSGGSASDHSATSKSLPLSVDDSSITIVYPR

SEQ ID NO: 82018 - DNA, 1350 bp, Arabidopsis thaliana
  misc_feature (1)..(1350): Ceres Seq. ID no. 12662929
  misc_feature (1)..(1350): Ortholog of  Ceres SEQ ID NO 12609214 as cited in SEQ ID NO 52165
  misc_feature (1)..(1350): Ortholog of  Ceres SEQ ID NO 13662018 as cited in SEQ ID NO 61693
atggctccacacaggtcgaggcagcggaatccgagattcaagctatggagatacgatgatgaacctctagcaattgctgaaaccatgcccgaattacgacacctcaagctttttgggaacggactgaccaacttaagattggaagccattcttgacaactgtgttcacttggtacatcttgatttacgccgctgcttcaacattaaccttctcggggatctcgagaagcgctgttctgagaggatcagagatttgagacgccctgatgactcaaccgctgattccccttttgatgcctcttccgatatatattcagcaggagaagacgactacgacttttactcagatgatagcgatggtacgttatctgatcactttgaagaatgcaagacagtatcagtggcaactggtaatgaaagcgtttatgttctctcttttgttagatctgacaattttatttaccctaaaaaaattgcttcgtcgtcttcgttgtcgtcaactcccttaccttcgctgatgaaagacaaaaagttgagaaactgggcggagcttccgtccaagttgacgtcatcgattctacttcgtcttggcgctattgagatacttcaaaacgctcaaaaagtgtgcaaaccgtggcatcgagtctgcaaagacccctcgatgtggcggaagatcgacatagataaccgcaatgatagggcagccttcaagtacgacctcgagtcaatgtgccgtcacgcagttgatcgtagccacggtggtttgattgagatcgagatttggtactacggtactaatgatctcatcatgtacatagctgacaggtcaagtaatctgaaaagccttggacttgtaaggtgctttccaataacagatgagggagttgccaaagcagtttcgaaagtaccgttgcttgaataccttgaggtttcatactgcttgttttcaggagagtctctgagagatataggccggtcttgtccgaatctgaagacactgaagctaaaccgagcccctgaaatcatgttttcaaatagtgggtttgatgataatgccaaagcaattgcagaaagcatgcctgaactacgccacctccagcttttagggaacgggctaaccaataagggcttgaacgccattcttgatggttgtcctcacctggaacaccttgatttacgccagtgtttcaacatcaaccttgttggggatctcaagaaacgatgttttgagaggatcaaagacttgagatgccccaatgactcagatgacgattcagatgatggctcagataatggtgcggtgacaacatttgggtcacaatttaatgaaaccgactatcattggtactag

SEQ ID NO: 82019 - protein, 449 aa, Arabidopsis thaliana
  peptide (1)..(449): Ceres Seq. ID no. 12662930
MAPHRSRQRNPRFKLWRYDDEPLAIAETMPELRHLKLFGNGLTNLRLEAILDNCVHLVHLDLRRCFNINLLGDLEKRCSERIRDLRRPDDSTADSPFDASSDIYSAGEDDYDFYSDDSDGTLSDHFEECKTVSVATGNESVYVLSFVRSDNFIYPKKIASSSSLSSTPLPSLMKDKKLRNWAELPSKLTSSILLRLGAIEILQNAQKVCKPWHRVCKDPSMWRKIDIDNRNDRAAFKYDLESMCRHAVDRSHGGLIEIEIWYYGTNDLIMYIADRSSNLKSLGLVRCFPITDEGVAKAVSKVPLLEYLEVSYCLFSGESLRDIGRSCPNLKTLKLNRAPEIMFSNSGFDDNAKAIAESMPELRHLQLLGNGLTNKGLNAILDGCPHLEHLDLRQCFNINLVGDLKKRCFERIKDLRCPNDSDDDSDDGSDNGAVTTFGSQFNETDYHWY

SEQ ID NO: 82020 - protein, 421 aa, Arabidopsis thaliana
  peptide (1)..(421): Ceres Seq. ID no. 12662931
MPELRHLKLFGNGLTNLRLEAILDNCVHLVHLDLRRCFNINLLGDLEKRCSERIRDLRRPDDSTADSPFDASSDIYSAGEDDYDFYSDDSDGTLSDHFEECKTVSVATGNESVYVLSFVRSDNFIYPKKIASSSSLSSTPLPSLMKDKKLRNWAELPSKLTSSILLRLGAIEILQNAQKVCKPWHRVCKDPSMWRKIDIDNRNDRAAFKYDLESMCRHAVDRSHGGLIEIEIWYYGTNDLIMYIADRSSNLKSLGLVRCFPITDEGVAKAVSKVPLLEYLEVSYCLFSGESLRDIGRSCPNLKTLKLNRAPEIMFSNSGFDDNAKAIAESMPELRHLQLLGNGLTNKGLNAILDGCPHLEHLDLRQCFNINLVGDLKKRCFERIKDLRCPNDSDDDSDDGSDNGAVTTFGSQFNETDYHWY

SEQ ID NO: 82021 - protein, 277 aa, Arabidopsis thaliana
  peptide (1)..(277): Ceres Seq. ID no. 12662932
MKDKKLRNWAELPSKLTSSILLRLGAIEILQNAQKVCKPWHRVCKDPSMWRKIDIDNRNDRAAFKYDLESMCRHAVDRSHGGLIEIEIWYYGTNDLIMYIADRSSNLKSLGLVRCFPITDEGVAKAVSKVPLLEYLEVSYCLFSGESLRDIGRSCPNLKTLKLNRAPEIMFSNSGFDDNAKAIAESMPELRHLQLLGNGLTNKGLNAILDGCPHLEHLDLRQCFNINLVGDLKKRCFERIKDLRCPNDSDDDSDDGSDNGAVTTFGSQFNETDYHWY

SEQ ID NO: 82022 - DNA, 1007 bp, Arabidopsis thaliana
  misc_feature (1)..(1007): Ceres Seq. ID no. 12662940
  misc_feature (1)..(1007): Ortholog of  Ceres SEQ ID NO 13655598 as cited in SEQ ID NO 64077
  misc_feature (1)..(1007): Ortholog of  Ceres SEQ ID NO 15180408 as cited in SEQ ID NO 0
cttaaattagggttatatatggctacatctgctagaagagcatatggattcgggagagctgacgaggcgactcacccggactccattagagccactttggctgagtttctttccacgttcgtcttcgtctttgctggagaaggctcaatcctcgctctagacaagttgtattgggacacggcggctcacacggggacaaacacgcctggagggttagttctggtggcgttagctcatgcattggccttgttcgcggctgtttctgcagccatcaatgtctctggtggccacgtcaaccccgctgtcacttttgctgctctaatcggaggcaggatctcggtcattcgagctatctactattgggttgctcagcttataggtgctatcctcgcttgtctcttgttgaggcttgccactaatggcttgagaccagtaggtttccatgtagcatcaggagttagtgagcttcatgggctactgatggagatcatacttacatttgctttggtttatgttgtctactcgaccgcaatcgatccaaagagggggagtattgggatcatagcgccactagccatcgggctcatagttggggcaaacattttggtgggaggacctttcgatggagcctctatgaatccggctagagcctttggtccagcattagtgggatggaggtggagtaaccattggatctattgggttggaccgttcattggtggtgcactcgccgcactgatctatgagtacatgatcatccccagcgtgaacgaacctcctcaccacagtacccaccaaccattggctccggaagattactagaccggagcagtcttcatgtagagggttctctctttgtataaatagtctctgtgtttgcttgtgttgtttgtctctttacttgttttgttttcctgccatttcctatgtataattgagtccacaccaaaatctgttttcttgtattgtatatcttacagaataataaagattttcaatgatcggat

SEQ ID NO: 82023 - protein, 273 aa, Arabidopsis thaliana
  peptide (1)..(273): Ceres Seq. ID no. 12662941
LKLGLYMATSARRAYGFGRADEATHPDSIRATLAEFLSTFVFVFAGEGSILALDKLYWDTAAHTGTNTPGGLVLVALAHALALFAAVSAAINVSGGHVNPAVTFAALIGGRISVIRAIYYWVAQLIGAILACLLLRLATNGLRPVGFHVASGVSELHGLLMEIILTFALVYVVYSTAIDPKRGSIGIIAPLAIGLIVGANILVGGPFDGASMNPARAFGPALVGWRWSNHWIYWVGPFIGGALAALIYEYMIIPSVNEPPHHSTHQPLAPEDY

SEQ ID NO: 82024 - protein, 267 aa, Arabidopsis thaliana
  peptide (1)..(267): Ceres Seq. ID no. 12662942
MATSARRAYGFGRADEATHPDSIRATLAEFLSTFVFVFAGEGSILALDKLYWDTAAHTGTNTPGGLVLVALAHALALFAAVSAAINVSGGHVNPAVTFAALIGGRISVIRAIYYWVAQLIGAILACLLLRLATNGLRPVGFHVASGVSELHGLLMEIILTFALVYVVYSTAIDPKRGSIGIIAPLAIGLIVGANILVGGPFDGASMNPARAFGPALVGWRWSNHWIYWVGPFIGGALAALIYEYMIIPSVNEPPHHSTHQPLAPEDY

SEQ ID NO: 82025 - DNA, 1377 bp, Arabidopsis thaliana
  misc_feature (1)..(1377): Ceres Seq. ID no. 12662958
  misc_feature (1)..(1377): Ortholog of  Ceres SEQ ID NO 13590780 as cited in SEQ ID NO 68149
  misc_feature (1)..(1377): Ortholog of  Ceres SEQ ID NO 13599756 as cited in SEQ ID NO 0
atggcgaataatcatcatcccaaggatgaggcttatctctcatccgtcatccccaagcgtatcaggctcttcgaggaaatccaagccgagcagcttgagcagcttcaatctcggccacacgatccaatcaagattactcttctccccgacggtatcgagaaagaaggaaggagatgggagacctctccaatggacatcgcagtgcagatttctaagggtttagcaaaatctgctctggtttcttcggttaatcatgtcttgtgggacatgaataggcccctggaaggtgattgttccttagagattttcggatttgacagcgaccaaggccgtaatactttctggcattctagcgcccacattctaggccaggctctcgagcaggagtatggatgcaagctatgtattggaccctgcgaacccagagatgaaggcttctattacgattcactttattatggcgagctgggattaaacgacaatcattttccaaacatcgaagcaaaattacccattagaatggccgaatttggagtgttacaccgaaatgaggacagtggagcacttggtggaatgacccgtgtccgacggtttgtacaggatgatgcacacatattctgtagagtggatcaggttgaggaagaagtgaagggtgtgttggatttcattgactatgtttacagaatatttgggtttacctatgaactaacgctttcaacgaggccaaaggatcacattggagatttggaaacatgggctaaagctgaaaatgatcttgaaaaagctctagatgattttggaaagccatgggttataaaggaaggagacggtgcattttatggcccaaagatagacataacagtgtctgatgccaggaataggaaattccagtgtgctactatacagcttgattttcaacttccggcttgcttcaaactgaaatacctaagtgaaaaaaacgaaatggaggcacctgtgatgatacatagtgcggtgttgggatctattgagcgtatgtttgccatattgttggaacattacaaaggaatttggcccttctggcttagtccccgccaggccatagtttgctctctttcagaggattgtagttcctatgccaaacaggtacaaaaacagattaatgaagtcgggtactatgttgatattgatgaaagtgacagaagcctccgtaaaaaggtggcagatgctcgggatgcaccatacaactacatactggtcgtaggtcaaaaagaggttgcaactggacaggtgacagttcggctcagagaggaccctgaaggccgtaaagacttgccagagatgagcatcgaaagtttgcttgatgaattcaagttcaagacagtcaacttcctctga

SEQ ID NO: 82026 - protein, 458 aa, Arabidopsis thaliana
  peptide (1)..(458): Ceres Seq. ID no. 12662959
MANNHHPKDEAYLSSVIPKRIRLFEEIQAEQLEQLQSRPHDPIKITLLPDGIEKEGRRWETSPMDIAVQISKGLAKSALVSSVNHVLWDMNRPLEGDCSLEIFGFDSDQGRNTFWHSSAHILGQALEQEYGCKLCIGPCEPRDEGFYYDSLYYGELGLNDNHFPNIEAKLPIRMAEFGVLHRNEDSGALGGMTRVRRFVQDDAHIFCRVDQVEEEVKGVLDFIDYVYRIFGFTYELTLSTRPKDHIGDLETWAKAENDLEKALDDFGKPWVIKEGDGAFYGPKIDITVSDARNRKFQCATIQLDFQLPACFKLKYLSEKNEMEAPVMIHSAVLGSIERMFAILLEHYKGIWPFWLSPRQAIVCSLSEDCSSYAKQVQKQINEVGYYVDIDESDRSLRKKVADARDAPYNYILVVGQKEVATGQVTVRLREDPEGRKDLPEMSIESLLDEFKFKTVNFL

SEQ ID NO: 82027 - protein, 395 aa, Arabidopsis thaliana
  peptide (1)..(395): Ceres Seq. ID no. 12662960
MDIAVQISKGLAKSALVSSVNHVLWDMNRPLEGDCSLEIFGFDSDQGRNTFWHSSAHILGQALEQEYGCKLCIGPCEPRDEGFYYDSLYYGELGLNDNHFPNIEAKLPIRMAEFGVLHRNEDSGALGGMTRVRRFVQDDAHIFCRVDQVEEEVKGVLDFIDYVYRIFGFTYELTLSTRPKDHIGDLETWAKAENDLEKALDDFGKPWVIKEGDGAFYGPKIDITVSDARNRKFQCATIQLDFQLPACFKLKYLSEKNEMEAPVMIHSAVLGSIERMFAILLEHYKGIWPFWLSPRQAIVCSLSEDCSSYAKQVQKQINEVGYYVDIDESDRSLRKKVADARDAPYNYILVVGQKEVATGQVTVRLREDPEGRKDLPEMSIESLLDEFKFKTVNFL

SEQ ID NO: 82028 - protein, 369 aa, Arabidopsis thaliana
  peptide (1)..(369): Ceres Seq. ID no. 12662961
MNRPLEGDCSLEIFGFDSDQGRNTFWHSSAHILGQALEQEYGCKLCIGPCEPRDEGFYYDSLYYGELGLNDNHFPNIEAKLPIRMAEFGVLHRNEDSGALGGMTRVRRFVQDDAHIFCRVDQVEEEVKGVLDFIDYVYRIFGFTYELTLSTRPKDHIGDLETWAKAENDLEKALDDFGKPWVIKEGDGAFYGPKIDITVSDARNRKFQCATIQLDFQLPACFKLKYLSEKNEMEAPVMIHSAVLGSIERMFAILLEHYKGIWPFWLSPRQAIVCSLSEDCSSYAKQVQKQINEVGYYVDIDESDRSLRKKVADARDAPYNYILVVGQKEVATGQVTVRLREDPEGRKDLPEMSIESLLDEFKFKTVNFL

SEQ ID NO: 82029 - DNA, 624 bp, Arabidopsis thaliana
  misc_feature (1)..(624): Ceres Seq. ID no. 12662979
  misc_feature (1)..(624): Ortholog of  Ceres SEQ ID NO 12609041 as cited in SEQ ID NO 51310
  misc_feature (1)..(624): Ortholog of  Ceres SEQ ID NO 13594966 as cited in SEQ ID NO 56152
  misc_feature (1)..(624): Ortholog of  Ceres SEQ ID NO 14312140 as cited in SEQ ID NO 57002
  misc_feature (1)..(624): Ortholog of  Ceres SEQ ID NO 14312224 as cited in SEQ ID NO 57255
  misc_feature (1)..(624): Ortholog of  Ceres SEQ ID NO 12582457 as cited in SEQ ID NO 57530
  misc_feature (1)..(624): Ortholog of  Ceres SEQ ID NO 13655804 as cited in SEQ ID NO 64881
atgacagggttctctgtgtctctttttgtgtcaaacttgtcaaatgtggcctcgtatttgtcgcccatcttcgagaacatcccctccaccaaggttgttcccgcacagatcgagaaagttgtctctttggtctctcgtaccggtcgcgatttgcagcgttacgatcacgctggctatcgtcaagtcgtcggatgtgtaccgtatagatacaagaaacaagaagtcaatggagttgaaacccaagtaatccaagttcttcttgtcagtgctcaaaagggcaaaggaatgttatttccaaaaggaggttgggagacggatgaatcaatggaggaagctgctttgagagagacgatcgaagaagcgggtgtaacaggagagctcgaagaaaagcttgggaaatggcaatacaaaagcaaaagacatagcataattcacgatgggtatatgtttgctttgcttgtcagtcaagagttcgagcgatggcctgaggcggaaatgagacaacgcagatgggtaagtttggatgaagcaagagaagtatgtcagaattggtggatgagagaagctcttgaagcattcattaacctgaaatgtctagctgacgatgatgaaagtgggaactga

SEQ ID NO: 82030 - protein, 207 aa, Arabidopsis thaliana
  peptide (1)..(207): Ceres Seq. ID no. 12662980
MTGFSVSLFVSNLSNVASYLSPIFENIPSTKVVPAQIEKVVSLVSRTGRDLQRYDHAGYRQVVGCVPYRYKKQEVNGVETQVIQVLLVSAQKGKGMLFPKGGWETDESMEEAALRETIEEAGVTGELEEKLGKWQYKSKRHSIIHDGYMFALLVSQEFERWPEAEMRQRRWVSLDEAREVCQNWWMREALEAFINLKCLADDDESGN

SEQ ID NO: 82031 - protein, 112 aa, Arabidopsis thaliana
  peptide (1)..(112): Ceres Seq. ID no. 12662981
MLFPKGGWETDESMEEAALRETIEEAGVTGELEEKLGKWQYKSKRHSIIHDGYMFALLVSQEFERWPEAEMRQRRWVSLDEAREVCQNWWMREALEAFINLKCLADDDESGN

SEQ ID NO: 82032 - DNA, 924 bp, Arabidopsis thaliana
  misc_feature (1)..(924): Ceres Seq. ID no. 12662998
  misc_feature (1)..(924): Ortholog of  Ceres SEQ ID NO 14316532 as cited in SEQ ID NO 57093
atggctcttgttcgtaaacgccgtcaaatcaacctccgtctccctgtcccaccgctctctgttcacctcccctggttctcctttgcctcatccaccgcccccgtcatcaacaacggaatctcagcttccgatgtcgagaaactccacgttctcggaagaggaagcagcgggatcgtatacaaagtccaccacaaaaccacgggggagatatacgctctgaaatcagtcaacggcgacatgagtcctgctttcacaagacaattagcgcgcgagatggagatcctccgtcgcacggattctccttatgtcgtcaggtgtcaagggatcttcgagaaaccaatcgtcggagaggtttcgatcctcatggagtatatggacggtggaaacctagaatctctccgcggcgccgttacggagaaacaactagcgggattttcccgccagattttgaaaggtttaagttatctccactcactcaagatcgttcacagagacatcaaacctgcgaatctactcttaaactcgagaaacgaagttaaaatcgctgattttggagtgagcaaaatcattacccgatcgttagattactgcaattcctacgtcggcacttgcgcttacatgagcccggagagatttgactctgccgccggagaaaactccgatgtttacgcaggcgatatctggagtttcggagtgatgatacttgagctcttcgtcggacattttccgttgcttcctcagggacagagacctgactgggcgacgttaatgtgcgtcgtgtgctttggagaaccaccgcgtgcgccggaaggatgttccgacgagtttaggagttttgttgactgttgtctccgtaaagaatcgagtgagaggtggacggcgtcgcagcttctcggtcacccttttctccgtgaaagtctttag

SEQ ID NO: 82033 - protein, 307 aa, Arabidopsis thaliana
  peptide (1)..(307): Ceres Seq. ID no. 12662999
MALVRKRRQINLRLPVPPLSVHLPWFSFASSTAPVINNGISASDVEKLHVLGRGSSGIVYKVHHKTTGEIYALKSVNGDMSPAFTRQLAREMEILRRTDSPYVVRCQGIFEKPIVGEVSILMEYMDGGNLESLRGAVTEKQLAGFSRQILKGLSYLHSLKIVHRDIKPANLLLNSRNEVKIADFGVSKIITRSLDYCNSYVGTCAYMSPERFDSAAGENSDVYAGDIWSFGVMILELFVGHFPLLPQGQRPDWATLMCVVCFGEPPRAPEGCSDEFRSFVDCCLRKESSERWTASQLLGHPFLRESL

SEQ ID NO: 82034 - protein, 228 aa, Arabidopsis thaliana
  peptide (1)..(228): Ceres Seq. ID no. 12663000
MSPAFTRQLAREMEILRRTDSPYVVRCQGIFEKPIVGEVSILMEYMDGGNLESLRGAVTEKQLAGFSRQILKGLSYLHSLKIVHRDIKPANLLLNSRNEVKIADFGVSKIITRSLDYCNSYVGTCAYMSPERFDSAAGENSDVYAGDIWSFGVMILELFVGHFPLLPQGQRPDWATLMCVVCFGEPPRAPEGCSDEFRSFVDCCLRKESSERWTASQLLGHPFLRESL

SEQ ID NO: 82035 - protein, 216 aa, Arabidopsis thaliana
  peptide (1)..(216): Ceres Seq. ID no. 12663001
MEILRRTDSPYVVRCQGIFEKPIVGEVSILMEYMDGGNLESLRGAVTEKQLAGFSRQILKGLSYLHSLKIVHRDIKPANLLLNSRNEVKIADFGVSKIITRSLDYCNSYVGTCAYMSPERFDSAAGENSDVYAGDIWSFGVMILELFVGHFPLLPQGQRPDWATLMCVVCFGEPPRAPEGCSDEFRSFVDCCLRKESSERWTASQLLGHPFLRESL

SEQ ID NO: 82036 - DNA, 2925 bp, Arabidopsis thaliana
  misc_feature (1)..(2925): Ceres Seq. ID no. 12663006
  misc_feature (1)..(2925): Ortholog of  Ceres SEQ ID NO 13600310 as cited in SEQ ID NO 5086
  misc_feature (1)..(2925): Ortholog of  Ceres SEQ ID NO 14313863 as cited in SEQ ID NO 54791
atgactataaaaacaccgggaactccggtttcgaagatggacagaacaccagctgtaacaccaggtggaagctcaagatccagggaagagaagattgttgttactgtaaggttaaggccaatgaataagagagaactgttagctaaagaccaagttgcttgggaatgtgtaaatgaccacaccattgtgtctaaaccacaagttcaagaacgtttgcatcatcagtcctcatttacatttgataaagtttttggaccagagagtttaacagagaatgtgtatgaagatggtgttaagaatgttgcattgtctgctttgatgggcataaatgcaacaatatttgcatatggacaaacaagcagtggaaagacatataccatgagaggagtaacggagaaagctgtcaatgatatttacaatcacataattaagacccctgaaagagattttactatcaagatttctggtctggaaatatataatgaaaatgtcagagatctgctcaattcagattcgggacgtgcccttaaactccttgatgatccagagaaaggtactgtggttgaaaaactggttgaagaaacagctaataacgataaccatttgcggcatctgattagcatttgtgaagctcaaagacaagttggagaaactgctttgaatgatactagctcgcggtcacaccaaataatcagactgacaatacaaagtactcaccgcgaaaattcagattgtgtgaggtcatatatggctagtctgaactttgtggacttagcaggaagcgaaagagcatcacaatcgcaggcagatggaacgagactcagggaaggttgtcatatcaatctaagtctaatgacacttacaactgtcataaggaaattaagtgtggggaaaagaagcggccatataccttacagagactccaagcttactaggattttacagcattcactaggtgggaatgctcgaacagccattatatgtacattgagtccagctttggctcatgttgaacaatcaagaaatactctatacttcgccaaccgagccaaggaagttacaaacaatgcccacgtgaacatggttgtctctgataagcaactagtgaaacatcttcagaaagaagtggctagattggaggccgagcgtcgcacccctggtccatcgacagaaaaggatttcaagatccagcagatggaaatggaaatcggagagcttagaagacaaagagatgatgcacaaattcaacttgaggagttacgccaaaagcttcaaggggatcagcaacaaaataagggcttaaatccttttgaatctccagacccaccggtcagaaaatgtctttcctattctgttgccgtaacgcctagctcggagaacaaaacgctaaaccggaatgagagagcaagaaagactacgatgcgccaatctatgatacggcaatcatcaactgctccatttacattgatgcatgaaatccgcaaactcgaacaccttcaagaacagttaggggaggaagcaacgaaagcccttgaagtgttacaaaaggaagtagcttgccatagactagggaatcaagatgcagctcagacgatagctaagcttcaagcagagataagggaaatgcgtactgttaaaccatctgcaatgcttaaagaggttggagatgtcatagctcctaacaagagcgtaagtgccaatctcaaggaagagataacaaggctccattcacaaggaagcaccattgcgaatctagaggagcaacttgagagcgttcagaagtcaatagataagttggtgatgtctcttccgagcaatatcagtgctggagatgagactccaaagacaaagaatcatcatcatcaatcaaagaagaagaagcttcttcctctgacaccaagcagcgcatccaaccgccagaacttcttgaaatctccatgctctccgctttcagcttctaggcaagtcttggattgtgatgctgagaacaaagctcctcaagaaaacaacagttctgcagctagaggggcgacgacaccacaggggtctgagaaagagactccacagaaaggagaagaaagcggagatgtctcgtcaagagaaggtactccaggctacagaagatcaagctcagtgaacatgaagaaaatgcagcaaatgtttcaaaacgcagcagaggagaatgtaagaagcataagagcatacgtaaccgaactcaaagaacgagtagctaaactacagtaccagaaacaacttctcgtttgtcaggtgcttgagttggaagcaaatgatggagctggatatagtgtagagaacgaggagaacacgataatggaagatgaagagcagaatcaagtggcgtggcatataactttcatagaggaaagacaacagatcatagagctgtggcatgtctgccatgtctccataatccacaggacacaattctacctactgttcaaaggtgaccaagccgatcaaatctacatggaagtcgagctaagacggttaacttggttagaacaacatctagcagaagtaggaaacgcaactccagctcgaaactgcgatgaatctgtggtttctctatcatcaagtataaaagcattgagaagagagcgagagtttttggcgaaaagggttaactcgagattgacgcctgaggagagagaggagctgtatatgaaatgggatgtgccattggaagggaaacagaggaaacttcagttcgtgaacaagctatggactgatccttatgattcaaggcacgtgcaagagagtgcagagatagttgcgaagctagttggattctgtgaaagtggcaacatctctaaagagatgtttgagctcaatttcgcagtgccttcagataaaagacagtggaacattggttgggacaacatctctaatcttcttcacctatga

SEQ ID NO: 82037 - protein, 974 aa, Arabidopsis thaliana
  peptide (1)..(974): Ceres Seq. ID no. 12663007
MTIKTPGTPVSKMDRTPAVTPGGSSRSREEKIVVTVRLRPMNKRELLAKDQVAWECVNDHTIVSKPQVQERLHHQSSFTFDKVFGPESLTENVYEDGVKNVALSALMGINATIFAYGQTSSGKTYTMRGVTEKAVNDIYNHIIKTPERDFTIKISGLEIYNENVRDLLNSDSGRALKLLDDPEKGTVVEKLVEETANNDNHLRHLISICEAQRQVGETALNDTSSRSHQIIRLTIQSTHRENSDCVRSYMASLNFVDLAGSERASQSQADGTRLREGCHINLSLMTLTTVIRKLSVGKRSGHIPYRDSKLTRILQHSLGGNARTAIICTLSPALAHVEQSRNTLYFANRAKEVTNNAHVNMVVSDKQLVKHLQKEVARLEAERRTPGPSTEKDFKIQQMEMEIGELRRQRDDAQIQLEELRQKLQGDQQQNKGLNPFESPDPPVRKCLSYSVAVTPSSENKTLNRNERARKTTMRQSMIRQSSTAPFTLMHEIRKLEHLQEQLGEEATKALEVLQKEVACHRLGNQDAAQTIAKLQAEIREMRTVKPSAMLKEVGDVIAPNKSVSANLKEEITRLHSQGSTIANLEEQLESVQKSIDKLVMSLPSNISAGDETPKTKNHHHQSKKKKLLPLTPSSASNRQNFLKSPCSPLSASRQVLDCDAENKAPQENNSSAARGATTPQGSEKETPQKGEESGDVSSREGTPGYRRSSSVNMKKMQQMFQNAAEENVRSIRAYVTELKERVAKLQYQKQLLVCQVLELEANDGAGYSVENEENTIMEDEEQNQVAWHITFIEERQQIIELWHVCHVSIIHRTQFYLLFKGDQADQIYMEVELRRLTWLEQHLAEVGNATPARNCDESVVSLSSSIKALRREREFLAKRVNSRLTPEEREELYMKWDVPLEGKQRKLQFVNKLWTDPYDSRHVQESAEIVAKLVGFCESGNISKEMFELNFAVPSDKRQWNIGWDNISNLLHL

SEQ ID NO: 82038 - protein, 962 aa, Arabidopsis thaliana
  peptide (1)..(962): Ceres Seq. ID no. 12663008
MDRTPAVTPGGSSRSREEKIVVTVRLRPMNKRELLAKDQVAWECVNDHTIVSKPQVQERLHHQSSFTFDKVFGPESLTENVYEDGVKNVALSALMGINATIFAYGQTSSGKTYTMRGVTEKAVNDIYNHIIKTPERDFTIKISGLEIYNENVRDLLNSDSGRALKLLDDPEKGTVVEKLVEETANNDNHLRHLISICEAQRQVGETALNDTSSRSHQIIRLTIQSTHRENSDCVRSYMASLNFVDLAGSERASQSQADGTRLREGCHINLSLMTLTTVIRKLSVGKRSGHIPYRDSKLTRILQHSLGGNARTAIICTLSPALAHVEQSRNTLYFANRAKEVTNNAHVNMVVSDKQLVKHLQKEVARLEAERRTPGPSTEKDFKIQQMEMEIGELRRQRDDAQIQLEELRQKLQGDQQQNKGLNPFESPDPPVRKCLSYSVAVTPSSENKTLNRNERARKTTMRQSMIRQSSTAPFTLMHEIRKLEHLQEQLGEEATKALEVLQKEVACHRLGNQDAAQTIAKLQAEIREMRTVKPSAMLKEVGDVIAPNKSVSANLKEEITRLHSQGSTIANLEEQLESVQKSIDKLVMSLPSNISAGDETPKTKNHHHQSKKKKLLPLTPSSASNRQNFLKSPCSPLSASRQVLDCDAENKAPQENNSSAARGATTPQGSEKETPQKGEESGDVSSREGTPGYRRSSSVNMKKMQQMFQNAAEENVRSIRAYVTELKERVAKLQYQKQLLVCQVLELEANDGAGYSVENEENTIMEDEEQNQVAWHITFIEERQQIIELWHVCHVSIIHRTQFYLLFKGDQADQIYMEVELRRLTWLEQHLAEVGNATPARNCDESVVSLSSSIKALRREREFLAKRVNSRLTPEEREELYMKWDVPLEGKQRKLQFVNKLWTDPYDSRHVQESAEIVAKLVGFCESGNISKEMFELNFAVPSDKRQWNIGWDNISNLLHL

SEQ ID NO: 82039 - protein, 934 aa, Arabidopsis thaliana
  peptide (1)..(934): Ceres Seq. ID no. 12663009
MNKRELLAKDQVAWECVNDHTIVSKPQVQERLHHQSSFTFDKVFGPESLTENVYEDGVKNVALSALMGINATIFAYGQTSSGKTYTMRGVTEKAVNDIYNHIIKTPERDFTIKISGLEIYNENVRDLLNSDSGRALKLLDDPEKGTVVEKLVEETANNDNHLRHLISICEAQRQVGETALNDTSSRSHQIIRLTIQSTHRENSDCVRSYMASLNFVDLAGSERASQSQADGTRLREGCHINLSLMTLTTVIRKLSVGKRSGHIPYRDSKLTRILQHSLGGNARTAIICTLSPALAHVEQSRNTLYFANRAKEVTNNAHVNMVVSDKQLVKHLQKEVARLEAERRTPGPSTEKDFKIQQMEMEIGELRRQRDDAQIQLEELRQKLQGDQQQNKGLNPFESPDPPVRKCLSYSVAVTPSSENKTLNRNERARKTTMRQSMIRQSSTAPFTLMHEIRKLEHLQEQLGEEATKALEVLQKEVACHRLGNQDAAQTIAKLQAEIREMRTVKPSAMLKEVGDVIAPNKSVSANLKEEITRLHSQGSTIANLEEQLESVQKSIDKLVMSLPSNISAGDETPKTKNHHHQSKKKKLLPLTPSSASNRQNFLKSPCSPLSASRQVLDCDAENKAPQENNSSAARGATTPQGSEKETPQKGEESGDVSSREGTPGYRRSSSVNMKKMQQMFQNAAEENVRSIRAYVTELKERVAKLQYQKQLLVCQVLELEANDGAGYSVENEENTIMEDEEQNQVAWHITFIEERQQIIELWHVCHVSIIHRTQFYLLFKGDQADQIYMEVELRRLTWLEQHLAEVGNATPARNCDESVVSLSSSIKALRREREFLAKRVNSRLTPEEREELYMKWDVPLEGKQRKLQFVNKLWTDPYDSRHVQESAEIVAKLVGFCESGNISKEMFELNFAVPSDKRQWNIGWDNISNLLHL

SEQ ID NO: 82040 - DNA, 2400 bp, Arabidopsis thaliana
  misc_feature (1)..(2400): Ceres Seq. ID no. 12663034
  misc_feature (1)..(2400): Ortholog of  Ceres SEQ ID NO 13600310 as cited in SEQ ID NO 5086
  misc_feature (1)..(2400): Ortholog of  Ceres SEQ ID NO 15172491 as cited in SEQ ID NO 58719
  misc_feature (1)..(2400): Ortholog of  Ceres SEQ ID NO 15180362 as cited in SEQ ID NO 0
atgccggtatctactcgatctaaggtgatgaaacaggagcgaaacgagcaagagaacacaaatctgaatcttccgttgagaaatccacatcaagggttgaaggaaaagatgagagctttgactctcttgtacgagcagcaaaagagagcctctttctctctcaggaaccctaatcataatcagtctccgaaacctgaagatcagagattcaagactcagctgcttgattcttccaagaaaggagacagatttcatcgcctggacggtaaagattctacctttgttgaagaagataccaaagagaacaatgtatttgaagcagatcggatttttggggttagttcggttcctgttaagcctagtggtgtgattaggaagctttcaatgggtaatggagctagaaacgtttcggaagctgagaaattggagagtcttaatgcttctgtgagtcggattttggtgtttgttaggcttagaccaatggggaaaaaggaaagagagaatgggtcaaggtgttgtgtcaaggttttgaataaaagagatgtttacctaacggagtttacgaatgagaatgattaccttaggcttaagaggctccgtgttcgtcatttcacttttgattcttcatttcctgaaactaccacacaacaagaggtttattccaccacaacaggagatcttgttgaagcagttcttgaaggaagaaatggttcagttttctgctacggtgctacgggagcaggcaagacttatacgatgttagggacaatggagaatccaggtgtaatggttctagcaatcaaagatttgtttgctaaagttagacagagaagcttagatgggaaccatgttgttcatctttcttatcttgaggtttataatgaaactgttagagatttgctttcacctggtagacctctcattctccgtgaagataagcagggaattgtggctgctggtctcactcaatatagagcttactcaacagatgaggttatggctttgcttcaaaggggaaatcaaaacagaactaccgagcctactcgttgcaatgaaacatcttctcgctcacatgccatccttcaggtaatagtggagtataagactagagatgcttccatgaatatcatcagccgggtaggaaagctatctctcattgatcttgcgggttctgaaagagcgctagcaactgatcaaaggacgctcagatcactggaaggtgcaaacataaacagatcacttcttgcattaagtagttgcattaacgcgcttgtggaaggcaagaaacatattccttacagaaactcaaagctcacacaactactcaaagactcactaggcggctcgtgtaacacggtgatgattgctaatataagtccaagcagtcaatcttttggtgaaacacaaaacactctccattgggctgatcgagccaaggagattcgtgtgaaggaatgtgaagtaaatgaagaggtggttcaagtgggtgaagaagaaggagctgatcaggctaagcttttgttagaacttcaaaaagagaatagtgaattgcgtgtccagctagcaaagcagcagcaaaagcttttgactctacaagcagagaacatagccgctgctaataacaacaacaacatttctctgacacctccatcaatctcatctcttatgactccaccgtctgcattaacagctcagcagaagaagaaaccaaggcattcgttgttatcagggacatgtttcacaccagaatcattgaaaaggacaaaagcagaagaagctgtgaaggaacttcagctgactgttaaggcattgaagatggagatggagagaatgaagagggaacatggtttgcagatgaagaagcaaaaagacgaattaatgaaagatctttgtagtagaaagagcgagaaaactccagaaagatgcaaagaaacaaggaggattgtcacaagagggagcttgagaccaaaggagaaggaaaaggaactgaaaagtccgagtcatcggtttgcatctccagttgcagcagctaaaaagagaagcttttgggacataaccgttgctaatactagtcctgcgttggatagaaggaaaacgagaagccacggtcttgttcatcaagaagctccttcaaaactgcttcagaattatttgcatgccactagaaacccatatcaaaccattaagggtagggaaggacgctatgcagaggtgcaattcacatcggagaaccatgcagccaagattgttcagctagcccgtctatcttacaatagaaacaagctaaaggtttataatttggagttagatctctgccgtgaggatagagctacagttgaaaacatgattgagttgaggaaaagtttatttcggataccaaactacgcggaaatattctag

SEQ ID NO: 82041 - protein, 799 aa, Arabidopsis thaliana
  peptide (1)..(799): Ceres Seq. ID no. 12663035
MPVSTRSKVMKQERNEQENTNLNLPLRNPHQGLKEKMRALTLLYEQQKRASFSLRNPNHNQSPKPEDQRFKTQLLDSSKKGDRFHRLDGKDSTFVEEDTKENNVFEADRIFGVSSVPVKPSGVIRKLSMGNGARNVSEAEKLESLNASVSRILVFVRLRPMGKKERENGSRCCVKVLNKRDVYLTEFTNENDYLRLKRLRVRHFTFDSSFPETTTQQEVYSTTTGDLVEAVLEGRNGSVFCYGATGAGKTYTMLGTMENPGVMVLAIKDLFAKVRQRSLDGNHVVHLSYLEVYNETVRDLLSPGRPLILREDKQGIVAAGLTQYRAYSTDEVMALLQRGNQNRTTEPTRCNETSSRSHAILQVIVEYKTRDASMNIISRVGKLSLIDLAGSERALATDQRTLRSLEGANINRSLLALSSCINALVEGKKHIPYRNSKLTQLLKDSLGGSCNTVMIANISPSSQSFGETQNTLHWADRAKEIRVKECEVNEEVVQVGEEEGADQAKLLLELQKENSELRVQLAKQQQKLLTLQAENIAAANNNNNISLTPPSISSLMTPPSALTAQQKKKPRHSLLSGTCFTPESLKRTKAEEAVKELQLTVKALKMEMERMKREHGLQMKKQKDELMKDLCSRKSEKTPERCKETRRIVTRGSLRPKEKEKELKSPSHRFASPVAAAKKRSFWDITVANTSPALDRRKTRSHGLVHQEAPSKLLQNYLHATRNPYQTIKGREGRYAEVQFTSENHAAKIVQLARLSYNRNKLKVYNLELDLCREDRATVENMIELRKSLFRIPNYAEIF

SEQ ID NO: 82042 - protein, 790 aa, Arabidopsis thaliana
  peptide (1)..(790): Ceres Seq. ID no. 12663036
MKQERNEQENTNLNLPLRNPHQGLKEKMRALTLLYEQQKRASFSLRNPNHNQSPKPEDQRFKTQLLDSSKKGDRFHRLDGKDSTFVEEDTKENNVFEADRIFGVSSVPVKPSGVIRKLSMGNGARNVSEAEKLESLNASVSRILVFVRLRPMGKKERENGSRCCVKVLNKRDVYLTEFTNENDYLRLKRLRVRHFTFDSSFPETTTQQEVYSTTTGDLVEAVLEGRNGSVFCYGATGAGKTYTMLGTMENPGVMVLAIKDLFAKVRQRSLDGNHVVHLSYLEVYNETVRDLLSPGRPLILREDKQGIVAAGLTQYRAYSTDEVMALLQRGNQNRTTEPTRCNETSSRSHAILQVIVEYKTRDASMNIISRVGKLSLIDLAGSERALATDQRTLRSLEGANINRSLLALSSCINALVEGKKHIPYRNSKLTQLLKDSLGGSCNTVMIANISPSSQSFGETQNTLHWADRAKEIRVKECEVNEEVVQVGEEEGADQAKLLLELQKENSELRVQLAKQQQKLLTLQAENIAAANNNNNISLTPPSISSLMTPPSALTAQQKKKPRHSLLSGTCFTPESLKRTKAEEAVKELQLTVKALKMEMERMKREHGLQMKKQKDELMKDLCSRKSEKTPERCKETRRIVTRGSLRPKEKEKELKSPSHRFASPVAAAKKRSFWDITVANTSPALDRRKTRSHGLVHQEAPSKLLQNYLHATRNPYQTIKGREGRYAEVQFTSENHAAKIVQLARLSYNRNKLKVYNLELDLCREDRATVENMIELRKSLFRIPNYAEIF

SEQ ID NO: 82043 - protein, 763 aa, Arabidopsis thaliana
  peptide (1)..(763): Ceres Seq. ID no. 12663037
MRALTLLYEQQKRASFSLRNPNHNQSPKPEDQRFKTQLLDSSKKGDRFHRLDGKDSTFVEEDTKENNVFEADRIFGVSSVPVKPSGVIRKLSMGNGARNVSEAEKLESLNASVSRILVFVRLRPMGKKERENGSRCCVKVLNKRDVYLTEFTNENDYLRLKRLRVRHFTFDSSFPETTTQQEVYSTTTGDLVEAVLEGRNGSVFCYGATGAGKTYTMLGTMENPGVMVLAIKDLFAKVRQRSLDGNHVVHLSYLEVYNETVRDLLSPGRPLILREDKQGIVAAGLTQYRAYSTDEVMALLQRGNQNRTTEPTRCNETSSRSHAILQVIVEYKTRDASMNIISRVGKLSLIDLAGSERALATDQRTLRSLEGANINRSLLALSSCINALVEGKKHIPYRNSKLTQLLKDSLGGSCNTVMIANISPSSQSFGETQNTLHWADRAKEIRVKECEVNEEVVQVGEEEGADQAKLLLELQKENSELRVQLAKQQQKLLTLQAENIAAANNNNNISLTPPSISSLMTPPSALTAQQKKKPRHSLLSGTCFTPESLKRTKAEEAVKELQLTVKALKMEMERMKREHGLQMKKQKDELMKDLCSRKSEKTPERCKETRRIVTRGSLRPKEKEKELKSPSHRFASPVAAAKKRSFWDITVANTSPALDRRKTRSHGLVHQEAPSKLLQNYLHATRNPYQTIKGREGRYAEVQFTSENHAAKIVQLARLSYNRNKLKVYNLELDLCREDRATVENMIELRKSLFRIPNYAEIF

SEQ ID NO: 82044 - DNA, 1146 bp, Arabidopsis thaliana
  misc_feature (1)..(1146): Ceres Seq. ID no. 12663046
  misc_feature (1)..(1146): Ortholog of  Ceres SEQ ID NO 13585342 as cited in SEQ ID NO 63601
atgggggattctcctgctagttcaaatagagttaagcttcgggatgggagattcttagcttataaagaaagaggagttccaaaggaaaaggccaaatacaagatcattcttgttcatggctttggaagctccaaagatatgaacttctctgcctcaaaagagcttatagaagaacttgaggtgtacttgctattctacgaccgttctggatatggagcatcagattcaaacacaaaacgttcgttggaaagcgaagttgaagacatagcagaacttgcagatcagctggagttaggacctaagttatccggcgtggcttttgttgctccggtggttaattatcgatggccttcacttccgaagaagctaatcaaaaaagattataggacaggtattatcaaatggggtttgaggatatcaaaatatgcacctggactgttacattggtggatcattcaaaagctcttcgcttcaactagttcggtccttgaaagcaatccggtctacttcaacagccacgacatagaagtgctcaagcgaaaaactggttttcccatgcttactaaggaaaagctacgggaaagaaatgttttcgatactctaagggacgattttatggtttgtttcgggcaatgggacttcgaacccgcggatctaagcatcagtacaaagagctatattcacatctggcatggtaaggaagacaaagttgttccatttcaacttcaaagatgcattctgcagaaacaacctttgatcaactaccacgaaatcccccaaggcggacatctgatcgtacactacgatggcatttgcgatacgattctacgtgcactattgctcaaggaagaacaacaaaagctcgaaccagtgcaaggatctaacagatccgctagaacgttagctcctgaaactctcctcatcccgtcctcgctatcttcgcatccagcgacttgcgccataaccgccgtcgcatcttcaacgatcccgcaccgcgaatctttcacgatcagcgaaaacagagccggaatcgcgccgagagagatcatcgtcgatcggttcatcggatacagagcgatcgcgaagagtgccttgagcgagtctttgatcgatcgaggatgcgaatctggatatctaatgatgtga

SEQ ID NO: 82045 - protein, 381 aa, Arabidopsis thaliana
  peptide (1)..(381): Ceres Seq. ID no. 12663047
MGDSPASSNRVKLRDGRFLAYKERGVPKEKAKYKIILVHGFGSSKDMNFSASKELIEELEVYLLFYDRSGYGASDSNTKRSLESEVEDIAELADQLELGPKLSGVAFVAPVVNYRWPSLPKKLIKKDYRTGIIKWGLRISKYAPGLLHWWIIQKLFASTSSVLESNPVYFNSHDIEVLKRKTGFPMLTKEKLRERNVFDTLRDDFMVCFGQWDFEPADLSISTKSYIHIWHGKEDKVVPFQLQRCILQKQPLINYHEIPQGGHLIVHYDGICDTILRALLLKEEQQKLEPVQGSNRSARTLAPETLLIPSSLSSHPATCAITAVASSTIPHRESFTISENRAGIAPREIIVDRFIGYRAIAKSALSESLIDRGCESGYLMM

SEQ ID NO: 82046 - protein, 335 aa, Arabidopsis thaliana
  peptide (1)..(335): Ceres Seq. ID no. 12663048
MNFSASKELIEELEVYLLFYDRSGYGASDSNTKRSLESEVEDIAELADQLELGPKLSGVAFVAPVVNYRWPSLPKKLIKKDYRTGIIKWGLRISKYAPGLLHWWIIQKLFASTSSVLESNPVYFNSHDIEVLKRKTGFPMLTKEKLRERNVFDTLRDDFMVCFGQWDFEPADLSISTKSYIHIWHGKEDKVVPFQLQRCILQKQPLINYHEIPQGGHLIVHYDGICDTILRALLLKEEQQKLEPVQGSNRSARTLAPETLLIPSSLSSHPATCAITAVASSTIPHRESFTISENRAGIAPREIIVDRFIGYRAIAKSALSESLIDRGCESGYLMM

SEQ ID NO: 82047 - protein, 196 aa, Arabidopsis thaliana
  peptide (1)..(196): Ceres Seq. ID no. 12663049
MLTKEKLRERNVFDTLRDDFMVCFGQWDFEPADLSISTKSYIHIWHGKEDKVVPFQLQRCILQKQPLINYHEIPQGGHLIVHYDGICDTILRALLLKEEQQKLEPVQGSNRSARTLAPETLLIPSSLSSHPATCAITAVASSTIPHRESFTISENRAGIAPREIIVDRFIGYRAIAKSALSESLIDRGCESGYLMM

SEQ ID NO: 82048 - DNA, 3015 bp, Arabidopsis thaliana
  misc_feature (1)..(3015): Ceres Seq. ID no. 12663066
  misc_feature (1)..(3015): Ortholog of  Ceres SEQ ID NO 13596392 as cited in SEQ ID NO 62136
  misc_feature (1)..(3015): Ortholog of  Ceres SEQ ID NO 13654360 as cited in SEQ ID NO 67980
  misc_feature (1)..(3015): Ortholog of  Ceres SEQ ID NO 13596394 as cited in SEQ ID NO 68561
atggatgaagattcgtctatggtggctgacaacgatcaggatcgtgagtttcagagccttgatggaggccaatctccttcgcctatggaaagagaaacgcctcagcagatgaacgaccaatcacctcctcctgaaggcggatcggtgcctacgccgccgccttcggatcctaatccggcaacttctcagcagcaagcggctgcggttgttggacaagagcagcagccggcgctagttgttggtccgaggtgtgcacctacgtattcggtggtggatgctatgatggataaaaaagaggatgggcctggccctaggtgtggtcacaccttgacggctgtgcctgctgttggtgatgaaggaacgcctggttatattggtcctcgtcttgtattgtttggtggtgcgacggctcttgagggaaattctggtggcaccggaactcctacttcagctggaagtgccggcattcggctagctggggcaactgctgatgttcattgttatgatgtactttctaataagtggactaggcttacaccttttggagaaccaccaaccccgagggccgcacatgttgcaactgcagtcgggaccatggtagttattcagggtggaattggtcctgctggtttatcggctgaagaccttcatgttcttgatctcactcaacaacggccacgatggcacagggttgttgttcagggtcctggaccaggacctcgttatggacatgtcatggcactcgtggggcaaaggtatctcatggcaattggtggaaatgatggaaaacgtccacttgctgatgtatgggccttggatactgccgccaagccttatgaatggcgtaagttggaaccagaaggggaaggtccacctccctgcatgtatgcaactgcaagtgcgcgctccgatggtcttcttctcctctgtggtggaagggatgcaaacagtgtgcctctggccagtgcatatggacttgcgaagcacagagatggacgttgggaatgggccatagcccctggtgtctcaccatcttccagatatcagcatgcagcagtctttgtaaatgcaagacttcatgtgtccggtggggcacttggtggtggacgcatggttgaagactcatccagtgttgcagtattggatactgcagcaggtgtatggtgtgatacaaaatcagttgttactagtcctagaactggtaggtatagtgccgatgcagctggtggcgatgcttcggttgagctgactaggcggtgtaggcatgctgctgctgcagtcggtgatttgatatttatctacggtggtttacgtggagctgcggcaacaaattctccaccaggtcgattacctggaaggtatggtttttcagatgaaaggaacagggagttatctgaatcagctgctgatggcgctgtggtgctgggaagccctgttgcaccccctgtaaatggtgatatgcatactgatattagccctgaaaatgcattacttccaggaactcgtgatgaatttagtgacaatgatccatcaccactttgtaggagaacgaataagggtgtggagtatcttgttgaagcatcagcagcggaagctgaggcgatcagtgcgacgttggctgctgccaaggcaagacaagtcaatggtgaagttgaactccctgatagggattgtggtgcagaggctacacccagtgggaaacctacattttcgctaatcaagccagattctatgggctcaatgagtgttacacctgcagggattcgtcttcatcatagagctgtggtggttgctgctgaaactggtggcgccttaggtggaatggttagacagttatccattgatcaatttgaaaatgagggacggcgtgtcagttatgggacaccagaaagtgcaacagcagcaaggaaactattagatcgacaaatgtcaatcaacagtgttccaaagaaggttatagctcatcttttgaagcctcgtggttggaagcctcctgttcgacggcagtttttcctagattgcaatgaaatagctgatctttgtgatagtgcagaacgtatcttcgcaagtgaaccgactgtattacagcttaaagctcctatcaaaatatttggtgatctgcatgggcagtttggggatcttatgcgcctttttgatgaatatggttcaccatctacagctggagacatatcatatatcgactacctcttcttaggggactatgttgatcggggtcaacacagtctagaaacaatctcccttctacttgcactaaaggttgagtaccagcataatgtacacttaattcggggaaaccatgaagctgcagatatcaatgccctttttggcttccggatagagtgtattgagcgaatgggtgaacgtgatggaatctgggtgtggcaccgaataaatcgtttattcaattggctacctcttgctgcatcgattgagaagaaaattatctgtatgcatgggggtattggtcgttctataaatcatgtggagcagatagaaaatattcaacgtccaattacaatggaagctggctccattgttcttatggatttattatggtcggatccaactgaaaatgacagtgtcgaaggtttaaggcccaatgctagaggccctggattggttacttttgggcctgaccgtgtcatggagttctgcaacaacaacgatcttcagttgattgtacgagcacacgaatgcgtaatggatggatttgagcgttttgctcaggggcatttgataacgctcttttctgctacaaactattgtggtactgcaaacaatgctggggctatcttggtactagggagagatcttgtagtggtacctaagctcattcatccgttacctccagcactttcatcgcctgaaacttcaccagaaagacatatagaagacacatggatgcaggagctgaacgcaaataggccagcgacgccaacccgaggacgcccacaaaattcaaatgaccgaggaggttctctggcttggatgtga

SEQ ID NO: 82049 - protein, 1004 aa, Arabidopsis thaliana
  peptide (1)..(1004): Ceres Seq. ID no. 12663067
MDEDSSMVADNDQDREFQSLDGGQSPSPMERETPQQMNDQSPPPEGGSVPTPPPSDPNPATSQQQAAAVVGQEQQPALVVGPRCAPTYSVVDAMMDKKEDGPGPRCGHTLTAVPAVGDEGTPGYIGPRLVLFGGATALEGNSGGTGTPTSAGSAGIRLAGATADVHCYDVLSNKWTRLTPFGEPPTPRAAHVATAVGTMVVIQGGIGPAGLSAEDLHVLDLTQQRPRWHRVVVQGPGPGPRYGHVMALVGQRYLMAIGGNDGKRPLADVWALDTAAKPYEWRKLEPEGEGPPPCMYATASARSDGLLLLCGGRDANSVPLASAYGLAKHRDGRWEWAIAPGVSPSSRYQHAAVFVNARLHVSGGALGGGRMVEDSSSVAVLDTAAGVWCDTKSVVTSPRTGRYSADAAGGDASVELTRRCRHAAAAVGDLIFIYGGLRGAAATNSPPGRLPGRYGFSDERNRELSESAADGAVVLGSPVAPPVNGDMHTDISPENALLPGTRDEFSDNDPSPLCRRTNKGVEYLVEASAAEAEAISATLAAAKARQVNGEVELPDRDCGAEATPSGKPTFSLIKPDSMGSMSVTPAGIRLHHRAVVVAAETGGALGGMVRQLSIDQFENEGRRVSYGTPESATAARKLLDRQMSINSVPKKVIAHLLKPRGWKPPVRRQFFLDCNEIADLCDSAERIFASEPTVLQLKAPIKIFGDLHGQFGDLMRLFDEYGSPSTAGDISYIDYLFLGDYVDRGQHSLETISLLLALKVEYQHNVHLIRGNHEAADINALFGFRIECIERMGERDGIWVWHRINRLFNWLPLAASIEKKIICMHGGIGRSINHVEQIENIQRPITMEAGSIVLMDLLWSDPTENDSVEGLRPNARGPGLVTFGPDRVMEFCNNNDLQLIVRAHECVMDGFERFAQGHLITLFSATNYCGTANNAGAILVLGRDLVVVPKLIHPLPPALSSPETSPERHIEDTWMQELNANRPATPTRGRPQNSNDRGGSLAWM

SEQ ID NO: 82050 - protein, 998 aa, Arabidopsis thaliana
  peptide (1)..(998): Ceres Seq. ID no. 12663068
MVADNDQDREFQSLDGGQSPSPMERETPQQMNDQSPPPEGGSVPTPPPSDPNPATSQQQAAAVVGQEQQPALVVGPRCAPTYSVVDAMMDKKEDGPGPRCGHTLTAVPAVGDEGTPGYIGPRLVLFGGATALEGNSGGTGTPTSAGSAGIRLAGATADVHCYDVLSNKWTRLTPFGEPPTPRAAHVATAVGTMVVIQGGIGPAGLSAEDLHVLDLTQQRPRWHRVVVQGPGPGPRYGHVMALVGQRYLMAIGGNDGKRPLADVWALDTAAKPYEWRKLEPEGEGPPPCMYATASARSDGLLLLCGGRDANSVPLASAYGLAKHRDGRWEWAIAPGVSPSSRYQHAAVFVNARLHVSGGALGGGRMVEDSSSVAVLDTAAGVWCDTKSVVTSPRTGRYSADAAGGDASVELTRRCRHAAAAVGDLIFIYGGLRGAAATNSPPGRLPGRYGFSDERNRELSESAADGAVVLGSPVAPPVNGDMHTDISPENALLPGTRDEFSDNDPSPLCRRTNKGVEYLVEASAAEAEAISATLAAAKARQVNGEVELPDRDCGAEATPSGKPTFSLIKPDSMGSMSVTPAGIRLHHRAVVVAAETGGALGGMVRQLSIDQFENEGRRVSYGTPESATAARKLLDRQMSINSVPKKVIAHLLKPRGWKPPVRRQFFLDCNEIADLCDSAERIFASEPTVLQLKAPIKIFGDLHGQFGDLMRLFDEYGSPSTAGDISYIDYLFLGDYVDRGQHSLETISLLLALKVEYQHNVHLIRGNHEAADINALFGFRIECIERMGERDGIWVWHRINRLFNWLPLAASIEKKIICMHGGIGRSINHVEQIENIQRPITMEAGSIVLMDLLWSDPTENDSVEGLRPNARGPGLVTFGPDRVMEFCNNNDLQLIVRAHECVMDGFERFAQGHLITLFSATNYCGTANNAGAILVLGRDLVVVPKLIHPLPPALSSPETSPERHIEDTWMQELNANRPATPTRGRPQNSNDRGGSLAWM

SEQ ID NO: 82051 - protein, 976 aa, Arabidopsis thaliana
  peptide (1)..(976): Ceres Seq. ID no. 12663069
MERETPQQMNDQSPPPEGGSVPTPPPSDPNPATSQQQAAAVVGQEQQPALVVGPRCAPTYSVVDAMMDKKEDGPGPRCGHTLTAVPAVGDEGTPGYIGPRLVLFGGATALEGNSGGTGTPTSAGSAGIRLAGATADVHCYDVLSNKWTRLTPFGEPPTPRAAHVATAVGTMVVIQGGIGPAGLSAEDLHVLDLTQQRPRWHRVVVQGPGPGPRYGHVMALVGQRYLMAIGGNDGKRPLADVWALDTAAKPYEWRKLEPEGEGPPPCMYATASARSDGLLLLCGGRDANSVPLASAYGLAKHRDGRWEWAIAPGVSPSSRYQHAAVFVNARLHVSGGALGGGRMVEDSSSVAVLDTAAGVWCDTKSVVTSPRTGRYSADAAGGDASVELTRRCRHAAAAVGDLIFIYGGLRGAAATNSPPGRLPGRYGFSDERNRELSESAADGAVVLGSPVAPPVNGDMHTDISPENALLPGTRDEFSDNDPSPLCRRTNKGVEYLVEASAAEAEAISATLAAAKARQVNGEVELPDRDCGAEATPSGKPTFSLIKPDSMGSMSVTPAGIRLHHRAVVVAAETGGALGGMVRQLSIDQFENEGRRVSYGTPESATAARKLLDRQMSINSVPKKVIAHLLKPRGWKPPVRRQFFLDCNEIADLCDSAERIFASEPTVLQLKAPIKIFGDLHGQFGDLMRLFDEYGSPSTAGDISYIDYLFLGDYVDRGQHSLETISLLLALKVEYQHNVHLIRGNHEAADINALFGFRIECIERMGERDGIWVWHRINRLFNWLPLAASIEKKIICMHGGIGRSINHVEQIENIQRPITMEAGSIVLMDLLWSDPTENDSVEGLRPNARGPGLVTFGPDRVMEFCNNNDLQLIVRAHECVMDGFERFAQGHLITLFSATNYCGTANNAGAILVLGRDLVVVPKLIHPLPPALSSPETSPERHIEDTWMQELNANRPATPTRGRPQNSNDRGGSLAWM

SEQ ID NO: 82052 - DNA, 675 bp, Arabidopsis thaliana
  misc_feature (1)..(675): Ceres Seq. ID no. 12663147
  misc_feature (1)..(675): Ortholog of  Ceres SEQ ID NO 14302047 as cited in SEQ ID NO 54849
  misc_feature (1)..(675): Ortholog of  Ceres SEQ ID NO 14307427 as cited in SEQ ID NO 59405
atggcgacggcgacggcgacggtgacgctttctttgagtgtagtatcctctgcaatatcaacccgtcgtgctctagccatcgatttccaggtggttgcagatataatgttgaagcaagtggttgccaagtattctataggtaaagcggcgatttatggaagtaacagagaaaagcttagacctttcatgtgccaaaccagttgtcgattccacaatggacggactgtttttgcaccaagaagcttctttggtgtagaagactacgtggatgacgacacaagccggccatacacataccaaaaagagaaaaagtcgaagaatccagacaagcatgtgtcgttcaagcaacgaacagttgcatacatggagccgttcactctagatgtcttcatctcaaagcgctttgtttcggcatctctcacgcaccgtgttacatgtaggcaagttgctgttgcgggaacaaactctaaagacgtaaaagctgttctgaggtcaagatgtgatatcccggcatgtatgtccatagggaggatcttgtctgagcgtgcaaaagaagctgatgtgtacacggcttcttatacgccaagggaccaagacaagtttgaagggaaaatcagagctgttgtccagtcccttattgataacggaattgatgttaaaatttatctcgattag

SEQ ID NO: 82053 - protein, 224 aa, Arabidopsis thaliana
  peptide (1)..(224): Ceres Seq. ID no. 12663148
MATATATVTLSLSVVSSAISTRRALAIDFQVVADIMLKQVVAKYSIGKAAIYGSNREKLRPFMCQTSCRFHNGRTVFAPRSFFGVEDYVDDDTSRPYTYQKEKKSKNPDKHVSFKQRTVAYMEPFTLDVFISKRFVSASLTHRVTCRQVAVAGTNSKDVKAVLRSRCDIPACMSIGRILSERAKEADVYTASYTPRDQDKFEGKIRAVVQSLIDNGIDVKIYLD

SEQ ID NO: 82054 - protein, 189 aa, Arabidopsis thaliana
  peptide (1)..(189): Ceres Seq. ID no. 12663149
MLKQVVAKYSIGKAAIYGSNREKLRPFMCQTSCRFHNGRTVFAPRSFFGVEDYVDDDTSRPYTYQKEKKSKNPDKHVSFKQRTVAYMEPFTLDVFISKRFVSASLTHRVTCRQVAVAGTNSKDVKAVLRSRCDIPACMSIGRILSERAKEADVYTASYTPRDQDKFEGKIRAVVQSLIDNGIDVKIYLD

SEQ ID NO: 82055 - protein, 162 aa, Arabidopsis thaliana
  peptide (1)..(162): Ceres Seq. ID no. 12663150
MCQTSCRFHNGRTVFAPRSFFGVEDYVDDDTSRPYTYQKEKKSKNPDKHVSFKQRTVAYMEPFTLDVFISKRFVSASLTHRVTCRQVAVAGTNSKDVKAVLRSRCDIPACMSIGRILSERAKEADVYTASYTPRDQDKFEGKIRAVVQSLIDNGIDVKIYLD

SEQ ID NO: 82056 - DNA, 1443 bp, Arabidopsis thaliana
  misc_feature (1)..(1443): Ceres Seq. ID no. 12663151
  misc_feature (1)..(1443): Ortholog of  Ceres SEQ ID NO 13597407 as cited in SEQ ID NO 64106
atggaatctggaagtatgaaaacacctctggtgaataatcaagaagaagcaagaagctcttcttccatcacttgtggtcttcttcttagtacctccgtcgctgtcactggctctttcgtttatggctgcgcttgttcctcatggatctcaactaacatgcctcagattggaatttttatttttttaatcaaaatctgttttgaatttgttgatgtcaacttgtggcctaattttgtgcactatcataatttgaagatgtcatattcatcgcctgctcagtccaaaatcatggaagaactgggactttccgttgcagattattcgtttttcacatcggtaatgacattgggaggaatgattacggccgcgtttagtggaaaaattgctgcagttattggtcgtcgacagacaatgtggatcgcggatgttttctgcatctttggttggctcgctgtagcctttgcacatgataaaatgctgttaaatattggtcgaggcttcttggggtttggggttggtctcattagttatgtggttcctgtatatatagcagaaattacgcccaaagcatttcgtggaggattctctttttccaatcaacttctacaaagttttgggatatcgctcatgttcttcaccggaaacttttttcattggagaacattagctcttttaagtgcaatcccatgtggtatccaaatgatatgtttattttttattcctgaatcacctagatggctggctatgtatggtagagaacgagagcttgaggttactttgaagaggctaagaggagaaaatggtgatattctcgaagaagcagctgaaatcagagaaacagtggaaacctctagaagagaatctcgaagtggactaaaagatttgttcaatatgaaaaacgcacatccgttaatcattggattgggcctaatgctcttgcaacaattttgtgggagttcggcgataagtgcttatgctgctcgtattttcgacacagccggttttccaagcgacataggaacatccatccttgcagttattttggtaccgcaatctattattgtcatgtttgccgtcgaccgatgtggacgccgaccacttttgatgggttatgtcttatcctttggcattggtctaggtggactaccatgggttattatgtctgaggtgtttccggtgaatgtgaaaattaccgccggtagtcttgtaacagtgtcaaactggtttttcagttggattatcattttcagttttaatttcatgatgcaatggagtgctttcgaatattacacatctaacacaaaaatgctttatttcgacagaacatatttcatatttgctggagtttctctgatgtcattcgtatttgtatggactttggtgcctgagacgaaaggccgaacacttgaagatattcaacaatcactaggccaactttcataa

SEQ ID NO: 82057 - protein, 480 aa, Arabidopsis thaliana
  peptide (1)..(480): Ceres Seq. ID no. 12663152
MESGSMKTPLVNNQEEARSSSSITCGLLLSTSVAVTGSFVYGCACSSWISTNMPQIGIFIFLIKICFEFVDVNLWPNFVHYHNLKMSYSSPAQSKIMEELGLSVADYSFFTSVMTLGGMITAAFSGKIAAVIGRRQTMWIADVFCIFGWLAVAFAHDKMLLNIGRGFLGFGVGLISYVVPVYIAEITPKAFRGGFSFSNQLLQSFGISLMFFTGNFFHWRTLALLSAIPCGIQMICLFFIPESPRWLAMYGRERELEVTLKRLRGENGDILEEAAEIRETVETSRRESRSGLKDLFNMKNAHPLIIGLGLMLLQQFCGSSAISAYAARIFDTAGFPSDIGTSILAVILVPQSIIVMFAVDRCGRRPLLMGYVLSFGIGLGGLPWVIMSEVFPVNVKITAGSLVTVSNWFFSWIIIFSFNFMMQWSAFEYYTSNTKMLYFDRTYFIFAGVSLMSFVFVWTLVPETKGRTLEDIQQSLGQLS

SEQ ID NO: 82058 - protein, 475 aa, Arabidopsis thaliana
  peptide (1)..(475): Ceres Seq. ID no. 12663153
MKTPLVNNQEEARSSSSITCGLLLSTSVAVTGSFVYGCACSSWISTNMPQIGIFIFLIKICFEFVDVNLWPNFVHYHNLKMSYSSPAQSKIMEELGLSVADYSFFTSVMTLGGMITAAFSGKIAAVIGRRQTMWIADVFCIFGWLAVAFAHDKMLLNIGRGFLGFGVGLISYVVPVYIAEITPKAFRGGFSFSNQLLQSFGISLMFFTGNFFHWRTLALLSAIPCGIQMICLFFIPESPRWLAMYGRERELEVTLKRLRGENGDILEEAAEIRETVETSRRESRSGLKDLFNMKNAHPLIIGLGLMLLQQFCGSSAISAYAARIFDTAGFPSDIGTSILAVILVPQSIIVMFAVDRCGRRPLLMGYVLSFGIGLGGLPWVIMSEVFPVNVKITAGSLVTVSNWFFSWIIIFSFNFMMQWSAFEYYTSNTKMLYFDRTYFIFAGVSLMSFVFVWTLVPETKGRTLEDIQQSLGQLS

SEQ ID NO: 82059 - protein, 428 aa, Arabidopsis thaliana
  peptide (1)..(428): Ceres Seq. ID no. 12663154
MPQIGIFIFLIKICFEFVDVNLWPNFVHYHNLKMSYSSPAQSKIMEELGLSVADYSFFTSVMTLGGMITAAFSGKIAAVIGRRQTMWIADVFCIFGWLAVAFAHDKMLLNIGRGFLGFGVGLISYVVPVYIAEITPKAFRGGFSFSNQLLQSFGISLMFFTGNFFHWRTLALLSAIPCGIQMICLFFIPESPRWLAMYGRERELEVTLKRLRGENGDILEEAAEIRETVETSRRESRSGLKDLFNMKNAHPLIIGLGLMLLQQFCGSSAISAYAARIFDTAGFPSDIGTSILAVILVPQSIIVMFAVDRCGRRPLLMGYVLSFGIGLGGLPWVIMSEVFPVNVKITAGSLVTVSNWFFSWIIIFSFNFMMQWSAFEYYTSNTKMLYFDRTYFIFAGVSLMSFVFVWTLVPETKGRTLEDIQQSLGQLS

SEQ ID NO: 82060 - DNA, 2511 bp, Arabidopsis thaliana
  misc_feature (1)..(2511): Ceres Seq. ID no. 12663193
  misc_feature (1)..(2511): Ortholog of  Ceres SEQ ID NO 14309727 as cited in SEQ ID NO 1030
  misc_feature (1)..(2511): Ortholog of  Ceres SEQ ID NO 13581686 as cited in SEQ ID NO 57695
  misc_feature (1)..(2511): Ortholog of  Ceres SEQ ID NO 15224315 as cited in SEQ ID NO 66131
atgcgggaggaagaaatggaatcttcgtcagaaggtgagacaaacaagatttcccgatgcaaagccactggttcagacaatcctgatgaggactacgtcgagatcacactcgaagtgcgagacgaaaccatcaacacaatgaaggccaaggcgacacttcgttcggttctttccgggaggctgaaaacgatggttaagtcgctatcgtttgcttcacgccggctcgaccgtagtaagtcgttcggtgctatgtttgctcttcgagggttgaggttcattgccaaaaacgacgccgttggtagaggctgggatgaggttgcaatgaggtttgataagttggccgttgaagggaaactccctaaatccaaatttggacattgcataggaatggttgaatctagcgaatttgtgaacgagctttttgaggcgttggtccgaaggagagggactacgtcatcgtcaatcaccaaaactgaattgtttgaattctgggagcagatcacaggcaatagttttgatgatagggtggacaaaaatttggacggacgtattacaggagatgaggttaaggagataattgctttaagtgcttcggctaacaagctatcaaagattaaagaaaatgtagatgaatatgctgccttgatcatggaagaactagatcgcgacaacctcggatatattgagttacataacttggaaacattgcttctccaagttcctagccaatcaaataacagtccatcttccgcgaacaaacgtgcactcaacaagatgttgagccagaagctcataccaacaaaagatcgaaacccggtgaaaagatttgctatgaatatatcatacttcttcttggaaaattggaaaaggatttgggtgttaacattgtggatatccatttgcatcactctcttcacttggaaatttctccagtataaacgcaaaaccgtgttcgaggtgatgggctactgtgttaccgtggccaaaggcagtgcagagaccttgaaattcaacatggctctcattctcttgcccgtttgtaggaacactatcacttggctaaggaccaagtccaagcttattgggtctgttgttccatttgatgacaatatcaatttccacaaggttgttgcatttgggatcgcggttggaataggcttgcacgctatatctcacctggcatgtgatttcccgcgtttgctgcatgcaaaaaatgtagagtttgagccaatgaaaaagtttttcggagacgagaggcctgaaaattatggatggttcatgaaagggacagacgggtggaccggtgttaccatggtggttcttatgttagtggcctacgtcttggcgcagtcgtggttcagacgaaaccgggcaaacctaccaaaatcgttgaaacgattgactggtttcaacgcattttggtactcacaccatttgtttgtcatcgtttatgttcttctcatcgtgcatggctattttgtttatctctcaaaggaatggtaccacaagacgacgtggatgtatctggcagttcccgtactactatatgcatttgaacgattgattcgtgcatttagaccaggtgccaaggctgtcaaggttttgaaggtggcagtatatccaggaaatgtactttcactttacatgtcgaagcctaaaggtttcaagtacacaagtggacagtacatatatattaactgttctgacgtctcaccattacaatggcatccgttttcaattacttcggcttccggggatgattacctcagcgttcatatccgcacactcggagactggacatcgcaactcaaatccttatattccaaggtttgtcaacttccctcaacaagtcaaagtgggctcttcatagctgacataggtcaagccaacaatataaccaggtttccgaggctgttaatcgatggtccatatggtgcacccgcacaagattaccggaactacgatgtattgcttctagtaggtctagggatcggagcgacgccattaatcagcataatcagggacgtccttaacaacatcaagaaccagaattccatcgaacgaggcactaaccaacacataaaaaactatgttgccacaaaacgagcttatttttattgggtaacaagagagcaaggatcattggaatggttcagtgaggtcatgaacgaggtagctgagtatgatagtgaggggatgattgaactacataattactgcactagcgtgtatgaggaaggagatgcgaggtcagcactaatcaccatgttgcagtcattgcaccacgccaagagcggcattgacatcgtatcgggcactcgggtccgaacccatttcgctcgacccaattggcgtagtgtcttcaagcacgtcgcagtcaaccacgtcaatcaacgagttggggttttctactgtggtaatacatgcatcataggagagttaaagagactggctcaagatttctctaggaaaactacgaccaagtttgagttccacaaggaaaatttctag

SEQ ID NO: 82061 - protein, 836 aa, Arabidopsis thaliana
  peptide (1)..(836): Ceres Seq. ID no. 12663194
MREEEMESSSEGETNKISRCKATGSDNPDEDYVEITLEVRDETINTMKAKATLRSVLSGRLKTMVKSLSFASRRLDRSKSFGAMFALRGLRFIAKNDAVGRGWDEVAMRFDKLAVEGKLPKSKFGHCIGMVESSEFVNELFEALVRRRGTTSSSITKTELFEFWEQITGNSFDDRVDKNLDGRITGDEVKEIIALSASANKLSKIKENVDEYAALIMEELDRDNLGYIELHNLETLLLQVPSQSNNSPSSANKRALNKMLSQKLIPTKDRNPVKRFAMNISYFFLENWKRIWVLTLWISICITLFTWKFLQYKRKTVFEVMGYCVTVAKGSAETLKFNMALILLPVCRNTITWLRTKSKLIGSVVPFDDNINFHKVVAFGIAVGIGLHAISHLACDFPRLLHAKNVEFEPMKKFFGDERPENYGWFMKGTDGWTGVTMVVLMLVAYVLAQSWFRRNRANLPKSLKRLTGFNAFWYSHHLFVIVYVLLIVHGYFVYLSKEWYHKTTWMYLAVPVLLYAFERLIRAFRPGAKAVKVLKVAVYPGNVLSLYMSKPKGFKYTSGQYIYINCSDVSPLQWHPFSITSASGDDYLSVHIRTLGDWTSQLKSLYSKVCQLPSTSQSGLFIADIGQANNITRFPRLLIDGPYGAPAQDYRNYDVLLLVGLGIGATPLISIIRDVLNNIKNQNSIERGTNQHIKNYVATKRAYFYWVTREQGSLEWFSEVMNEVAEYDSEGMIELHNYCTSVYEEGDARSALITMLQSLHHAKSGIDIVSGTRVRTHFARPNWRSVFKHVAVNHVNQRVGVFYCGNTCIIGELKRLAQDFSRKTTTKFEFHKENF

SEQ ID NO: 82062 - protein, 831 aa, Arabidopsis thaliana
  peptide (1)..(831): Ceres Seq. ID no. 12663195
MESSSEGETNKISRCKATGSDNPDEDYVEITLEVRDETINTMKAKATLRSVLSGRLKTMVKSLSFASRRLDRSKSFGAMFALRGLRFIAKNDAVGRGWDEVAMRFDKLAVEGKLPKSKFGHCIGMVESSEFVNELFEALVRRRGTTSSSITKTELFEFWEQITGNSFDDRVDKNLDGRITGDEVKEIIALSASANKLSKIKENVDEYAALIMEELDRDNLGYIELHNLETLLLQVPSQSNNSPSSANKRALNKMLSQKLIPTKDRNPVKRFAMNISYFFLENWKRIWVLTLWISICITLFTWKFLQYKRKTVFEVMGYCVTVAKGSAETLKFNMALILLPVCRNTITWLRTKSKLIGSVVPFDDNINFHKVVAFGIAVGIGLHAISHLACDFPRLLHAKNVEFEPMKKFFGDERPENYGWFMKGTDGWTGVTMVVLMLVAYVLAQSWFRRNRANLPKSLKRLTGFNAFWYSHHLFVIVYVLLIVHGYFVYLSKEWYHKTTWMYLAVPVLLYAFERLIRAFRPGAKAVKVLKVAVYPGNVLSLYMSKPKGFKYTSGQYIYINCSDVSPLQWHPFSITSASGDDYLSVHIRTLGDWTSQLKSLYSKVCQLPSTSQSGLFIADIGQANNITRFPRLLIDGPYGAPAQDYRNYDVLLLVGLGIGATPLISIIRDVLNNIKNQNSIERGTNQHIKNYVATKRAYFYWVTREQGSLEWFSEVMNEVAEYDSEGMIELHNYCTSVYEEGDARSALITMLQSLHHAKSGIDIVSGTRVRTHFARPNWRSVFKHVAVNHVNQRVGVFYCGNTCIIGELKRLAQDFSRKTTTKFEFHKENF

SEQ ID NO: 82063 - protein, 790 aa, Arabidopsis thaliana
  peptide (1)..(790): Ceres Seq. ID no. 12663196
MKAKATLRSVLSGRLKTMVKSLSFASRRLDRSKSFGAMFALRGLRFIAKNDAVGRGWDEVAMRFDKLAVEGKLPKSKFGHCIGMVESSEFVNELFEALVRRRGTTSSSITKTELFEFWEQITGNSFDDRVDKNLDGRITGDEVKEIIALSASANKLSKIKENVDEYAALIMEELDRDNLGYIELHNLETLLLQVPSQSNNSPSSANKRALNKMLSQKLIPTKDRNPVKRFAMNISYFFLENWKRIWVLTLWISICITLFTWKFLQYKRKTVFEVMGYCVTVAKGSAETLKFNMALILLPVCRNTITWLRTKSKLIGSVVPFDDNINFHKVVAFGIAVGIGLHAISHLACDFPRLLHAKNVEFEPMKKFFGDERPENYGWFMKGTDGWTGVTMVVLMLVAYVLAQSWFRRNRANLPKSLKRLTGFNAFWYSHHLFVIVYVLLIVHGYFVYLSKEWYHKTTWMYLAVPVLLYAFERLIRAFRPGAKAVKVLKVAVYPGNVLSLYMSKPKGFKYTSGQYIYINCSDVSPLQWHPFSITSASGDDYLSVHIRTLGDWTSQLKSLYSKVCQLPSTSQSGLFIADIGQANNITRFPRLLIDGPYGAPAQDYRNYDVLLLVGLGIGATPLISIIRDVLNNIKNQNSIERGTNQHIKNYVATKRAYFYWVTREQGSLEWFSEVMNEVAEYDSEGMIELHNYCTSVYEEGDARSALITMLQSLHHAKSGIDIVSGTRVRTHFARPNWRSVFKHVAVNHVNQRVGVFYCGNTCIIGELKRLAQDFSRKTTTKFEFHKENF

SEQ ID NO: 82064 - DNA, 1260 bp, Arabidopsis thaliana
  misc_feature (1)..(1260): Ceres Seq. ID no. 12663197
  misc_feature (1)..(1260): Ortholog of  Ceres SEQ ID NO 13595870 as cited in SEQ ID NO 62101
  misc_feature (1)..(1260): Ortholog of  Ceres SEQ ID NO 13590241 as cited in SEQ ID NO 63878
  misc_feature (1)..(1260): Ortholog of  Ceres SEQ ID NO 13657939 as cited in SEQ ID NO 66349
atggcggaggatacgagcttcgagggagaccaactagcttccatgactactgatgacatcggtagagcttctcgtctcttagccaacgagattcgcatcctcaaggaagaatcgcagaggacaaaccttgatttggaatcagtgaaggagaaaataaaggagaaccaggagaagattaagcttaacaaacagcttccttacttagttggcaatatcgttgagattcttgagatgagtccagaggatgatgcagaggaagatggagcgaatatcgatctggactctcagaggaagggaaagtgtgtcgttctaaaaacatcaactcgtcagaccatcttcctccctgttgttggacttgttgatccagatacattgaagcctggggacttagttggagttaacaaagatagttacttgattctggatactttaccttctgagtatgattcaagagtaaaagcaatggaggtcgacgaaaaacctactgaagactacaatgatatagggggactagaaaaacagatacaagaacttgttgaagccattgtgttgccaatgactcataaagagcagttcgaaaagttgggtatccgtccaccaaaaggtgtactcttgtatggtcctcctggaaccggaaagacgttgatggcccgagcttgtgcagcacagacaaatgcaactttcctcaaactagcagggccacaacttgttcagatgttcatcggagatggagcaaaacttgtccgtgatgctttcctgcttgcaaaagagaaatccccttgtattatattcatagatgagattgacgcaatagggacaaagcgttttgatagcgaagttagtggagaccgtgaggtacaaaggacaatgttggagctgctcaaccagcttgatggattcagcagcgatgatcgcattaaggttattgcagcgacaaatcgtgctgatatactagatcctgcccttatgcgttctggtcgtttggatcgtaaaatcgagtttccgcaccccactgaagaagctagaggcaggatcttacagatacattcaaggaaaatgaatgtgaatgcagacgtcaattttgaagagcttgctcggtcaacggatgatttcaatggagctcaactcaaagcagtgtgtgttgaagcgggtatgcttgccctgcgccgggatgcaactgaggtgaaccatgaggatttcaatgaaggtataattcaagtacaagccaagaagaaagcaagcttgaattactacgcctaa

SEQ ID NO: 82065 - protein, 419 aa, Arabidopsis thaliana; identical to SEQ ID NO: 44448
  peptide (1)..(419): Ceres Seq. ID no. 12663198

SEQ ID NO: 82066 - protein, 405 aa, Arabidopsis thaliana; identical to SEQ ID NO: 44449
  peptide (1)..(405): Ceres Seq. ID no. 12663199

SEQ ID NO: 82067 - protein, 342 aa, Arabidopsis thaliana
  peptide (1)..(342): Ceres Seq. ID no. 12663200
MSPEDDAEEDGANIDLDSQRKGKCVVLKTSTRQTIFLPVVGLVDPDTLKPGDLVGVNKDSYLILDTLPSEYDSRVKAMEVDEKPTEDYNDIGGLEKQIQELVEAIVLPMTHKEQFEKLGIRPPKGVLLYGPPGTGKTLMARACAAQTNATFLKLAGPQLVQMFIGDGAKLVRDAFLLAKEKSPCIIFIDEIDAIGTKRFDSEVSGDREVQRTMLELLNQLDGFSSDDRIKVIAATNRADILDPALMRSGRLDRKIEFPHPTEEARGRILQIHSRKMNVNADVNFEELARSTDDFNGAQLKAVCVEAGMLALRRDATEVNHEDFNEGIIQVQAKKKASLNYYA

SEQ ID NO: 82068 - DNA, 1239 bp, Arabidopsis thaliana
  misc_feature (1)..(1239): Ceres Seq. ID no. 12663219
  misc_feature (1)..(1239): Ortholog of  Ceres SEQ ID NO 12586556 as cited in SEQ ID NO 64667
atgaatcaaaccttaaaatcatccaccagctccattcacacttcaccacttctgggtttcttctccttcatcagaagcaaaactctgggaaactttttctattcaatcctctgcttcgatgctattctcttggcgaaacccctcttcatgcttacttcctctacgaccaactccaacgactccatttcttgtctgatcacaataagaacagctttggttggtatgtatcttgttggtggaaacatgattgatgctcacaaagtgtttgatgaaatgcctgagagaaatccggtaacttggaatgtgatgatcactggccttactaatttgggagatttcgaaaaagctctttgctttttggagaagatgccgaatcggacggtagtgtcttggaccactatcattgatgggtatgcacgagtagataaacccaaggaagctatactcttgttttcaagaatggttgcttgcgacgcaataaagcccaacgagataaccattctcgccattctcccagctgtttggaacttgggagacttaaagatgtgcggatcagttcatgcttatgttgggaaaagagggtttgttccatgtgatatccgtgtgactaactctctcatcgacgcttatgcaaaatgtgggtgtattcaaagcgcgttcaagtttttcatagagattccaaacggaaggaagaatcttgtatcgtggacaacgatgatctcggcgtttgcaattcacggaatgggaaaagaagcggtcagtatgtttaaagacatggaaagattaggattgaagccgaacagagtgaccatgatcagtgttttgaacgcttgcagccatggaggtttagcagaagaagagtttctagagtttttcaacacgatggtaaacgagtacaagatcacgccggatgtgaagcactatggatgtctagtagatatgttgagaagaaaaggaagattagaagaagcagagaagattgctttggagattccaatagaagaaaaagctgtggtttggagaatgctgcttggagcttgtagcgtttatgatgatgctgaattggctgagagggttactagaaagctaatggagctagagagaagccatggaggagactatgtgcttatgtccaacatcttttgtggtactggaagatttttagatgcgcagagatttcggaaacagatggatgttagaggagtagctaaacttccaggacattcacaagtaacatag

SEQ ID NO: 82069 - protein, 412 aa, Arabidopsis thaliana
  peptide (1)..(412): Ceres Seq. ID no. 12663220
MNQTLKSSTSSIHTSPLLGFFSFIRSKTLGNFFYSILCFDAILLAKPLFMLTSSTTNSNDSISCLITIRTALVGMYLVGGNMIDAHKVFDEMPERNPVTWNVMITGLTNLGDFEKALCFLEKMPNRTVVSWTTIIDGYARVDKPKEAILLFSRMVACDAIKPNEITILAILPAVWNLGDLKMCGSVHAYVGKRGFVPCDIRVTNSLIDAYAKCGCIQSAFKFFIEIPNGRKNLVSWTTMISAFAIHGMGKEAVSMFKDMERLGLKPNRVTMISVLNACSHGGLAEEEFLEFFNTMVNEYKITPDVKHYGCLVDMLRRKGRLEEAEKIALEIPIEEKAVVWRMLLGACSVYDDAELAERVTRKLMELERSHGGDYVLMSNIFCGTGRFLDAQRFRKQMDVRGVAKLPGHSQVT

SEQ ID NO: 82070 - protein, 363 aa, Arabidopsis thaliana
  peptide (1)..(363): Ceres Seq. ID no. 12663221
MLTSSTTNSNDSISCLITIRTALVGMYLVGGNMIDAHKVFDEMPERNPVTWNVMITGLTNLGDFEKALCFLEKMPNRTVVSWTTIIDGYARVDKPKEAILLFSRMVACDAIKPNEITILAILPAVWNLGDLKMCGSVHAYVGKRGFVPCDIRVTNSLIDAYAKCGCIQSAFKFFIEIPNGRKNLVSWTTMISAFAIHGMGKEAVSMFKDMERLGLKPNRVTMISVLNACSHGGLAEEEFLEFFNTMVNEYKITPDVKHYGCLVDMLRRKGRLEEAEKIALEIPIEEKAVVWRMLLGACSVYDDAELAERVTRKLMELERSHGGDYVLMSNIFCGTGRFLDAQRFRKQMDVRGVAKLPGHSQVT

SEQ ID NO: 82071 - protein, 338 aa, Arabidopsis thaliana; identical to SEQ ID NO: 73962
  peptide (1)..(338): Ceres Seq. ID no. 12663222

SEQ ID NO: 82072 - DNA, 1401 bp, Arabidopsis thaliana
  misc_feature (1)..(1401): Ceres Seq. ID no. 12663242
  misc_feature (1)..(1401): Ortholog of  Ceres SEQ ID NO 14309934 as cited in SEQ ID NO 20583
  misc_feature (1)..(1401): Ortholog of  Ceres SEQ ID NO 13654989 as cited in SEQ ID NO 63117
  misc_feature (1)..(1401): Ortholog of  Ceres SEQ ID NO 13584744 as cited in SEQ ID NO 69137
atggctggacttaagatctggcaagccatctttatcaccattgcactgatcatcattgtcgtactctctgttctttcattttgtctcatttggaaaaagaaatcaagaagatccaaaaccttaagtcttcccatcatacaaacccctgtggtgtcaaaggagatcaaggaagtcaggatcgagcatgttgtctcaacgagtagtaacttcgatcctcaggatgaaaacaacaatgaatctgacaaattcttgcttaatttggaaatggagaagaacagagagaatggtttgagtagtagccggtctggttcaggcaaagaaggttatttatgtgttgcaaaccggtctacttcatcattgtatgagatggctacaccatcaccatcacctctttctggtttacctgagtcacaccttggatggggtcattggtttactctgagagatcttgagatagcaacaaacagattctcaaaggaaaatgtgattggtgaaggaggctatggagttgtttaccgaggcgagttggtcaatgggagtcttgttgccgtgaaaaagatcctaaaccacttgggacaagcagagaaagagtttagagtagaggtagatgctataggtcatgtgcgtcacaagaacttggtacgtcttctaggatactgcattgaaggcacaaacaggatattggtttatgagtatatgaacaatgggaaccttgaagaatggcttcacggagcaatgaaacatcatggatatctaacttgggaagctcgaatgaaagttctcactggaacatccaaggctcttgcatatctacacgaggcaatcgaaccaaaagtggtgcatagagacatcaagtcgagcaacatcttgatcgatgatagattcaatgcaaagatttctgattttggccttgccaagttacttggagatgggaaaagccatgtgactactagagtcatgggaacatttgggtatgttgctcctgagtatgcgaataccggacttttgaatgaaaagagtgatgtgtacagctttggtgtcttggtcttagaagcaataaccggaagagatcctgtggattacgcgcggcctgctaatgaggtgaatttggttgagtggttgaagatgatggtaggatctaagagattagaagaagtcattgatccaaacatagcagttaggccagcgactagagcactgaaacgagtacttcttacagcacttagatgcattgatcctgattctgaaaagagacctaaaatgagtcaagttgtgcgtatgctggagtctgaggaatatcctgtaccaagagaggagcggagagtgcgcagaacgcaagaggaaaactcggataccgatagaagcagaccggtttcaagatcacagagcaagagactgtaa

SEQ ID NO: 82073 - protein, 466 aa, Arabidopsis thaliana
  peptide (1)..(466): Ceres Seq. ID no. 12663243
MAGLKIWQAIFITIALIIIVVLSVLSFCLIWKKKSRRSKTLSLPIIQTPVVSKEIKEVRIEHVVSTSSNFDPQDENNNESDKFLLNLEMEKNRENGLSSSRSGSGKEGYLCVANRSTSSLYEMATPSPSPLSGLPESHLGWGHWFTLRDLEIATNRFSKENVIGEGGYGVVYRGELVNGSLVAVKKILNHLGQAEKEFRVEVDAIGHVRHKNLVRLLGYCIEGTNRILVYEYMNNGNLEEWLHGAMKHHGYLTWEARMKVLTGTSKALAYLHEAIEPKVVHRDIKSSNILIDDRFNAKISDFGLAKLLGDGKSHVTTRVMGTFGYVAPEYANTGLLNEKSDVYSFGVLVLEAITGRDPVDYARPANEVNLVEWLKMMVGSKRLEEVIDPNIAVRPATRALKRVLLTALRCIDPDSEKRPKMSQVVRMLESEEYPVPREERRVRRTQEENSDTDRSRPVSRSQSKRL

SEQ ID NO: 82074 - protein, 378 aa, Arabidopsis thaliana
  peptide (1)..(378): Ceres Seq. ID no. 12663244
MEKNRENGLSSSRSGSGKEGYLCVANRSTSSLYEMATPSPSPLSGLPESHLGWGHWFTLRDLEIATNRFSKENVIGEGGYGVVYRGELVNGSLVAVKKILNHLGQAEKEFRVEVDAIGHVRHKNLVRLLGYCIEGTNRILVYEYMNNGNLEEWLHGAMKHHGYLTWEARMKVLTGTSKALAYLHEAIEPKVVHRDIKSSNILIDDRFNAKISDFGLAKLLGDGKSHVTTRVMGTFGYVAPEYANTGLLNEKSDVYSFGVLVLEAITGRDPVDYARPANEVNLVEWLKMMVGSKRLEEVIDPNIAVRPATRALKRVLLTALRCIDPDSEKRPKMSQVVRMLESEEYPVPREERRVRRTQEENSDTDRSRPVSRSQSKRL

SEQ ID NO: 82075 - protein, 344 aa, Arabidopsis thaliana
  peptide (1)..(344): Ceres Seq. ID no. 12663245
MATPSPSPLSGLPESHLGWGHWFTLRDLEIATNRFSKENVIGEGGYGVVYRGELVNGSLVAVKKILNHLGQAEKEFRVEVDAIGHVRHKNLVRLLGYCIEGTNRILVYEYMNNGNLEEWLHGAMKHHGYLTWEARMKVLTGTSKALAYLHEAIEPKVVHRDIKSSNILIDDRFNAKISDFGLAKLLGDGKSHVTTRVMGTFGYVAPEYANTGLLNEKSDVYSFGVLVLEAITGRDPVDYARPANEVNLVEWLKMMVGSKRLEEVIDPNIAVRPATRALKRVLLTALRCIDPDSEKRPKMSQVVRMLESEEYPVPREERRVRRTQEENSDTDRSRPVSRSQSKRL

SEQ ID NO: 82076 - DNA, 1167 bp, Arabidopsis thaliana
  misc_feature (1)..(1167): Ceres Seq. ID no. 12663257
  misc_feature (1)..(1167): Ortholog of  Ceres SEQ ID NO 13656404 as cited in SEQ ID NO 65806
  misc_feature (1)..(1167): Ortholog of  Ceres SEQ ID NO 12779935 as cited in SEQ ID NO 66774
  misc_feature (1)..(1167): Ortholog of  Ceres SEQ ID NO 13598695 as cited in SEQ ID NO 67368
  misc_feature (1)..(1167): Ortholog of  Ceres SEQ ID NO 13591174 as cited in SEQ ID NO 68289
atgaaaacgcttttgtattggggttggagtagtctcgcaggactcattctcttcagcattcttgcacatggggaaatgaaaaccttcaacgagtccaatggaacaaatgcaaatgtcctgatggtaggactcacgctcgtccaagccgctgctgctaaaggagcggtgtgtctggatgggtcagtgcctggatatcatttgtgtcgcgggtatggttcaggagcaaacaactggatcattcagttgcagggaggtgcatggtgtgacagcatacaaaactgtcagagccgtaaagggagtggttatggatcatctaccttaatggagaaagagttggcatttttaggattactaagcaataaagccgctgaaaatccagacttttacaattggaacaaagtaaaagtccggtattgtgatggtgcatcctttgatggtgacagcgaaaacaaggcggcacaacttcagtatagaggaaagcgtatatttttagctgtcatggaagatttgatggaaaagggaatgcgtcaggcaaaacaggctttgctcagcggatgttcttctgggggtctttctgccattttacgatgcgatgatttcaataacttgtttcctcctaccaccacagtaaaatgcatgagcgatgctggcttcttcctcgacgccgttgatgtatctggaggtcattctttaaggcgtatgtattctggtgttgtgaacactcagggtttgcaaaacacacttcctcccacttgtacaagccatatcaaaccatttttgtgttttttccctcaatacataatcaaccaagtcaagaccccgttgtttattctcaactcgggatttgattcgtggcagattggaaatagtttagccccaccatctgctgataagagtggcagttggcataactgcagttttagctttaggtgcactgcctctcagatgcacttcttagaaggtttcaagatgagcatgttagatgcgttgaagaccttttcgaagtttagcaagaatggagttttaattacctcgggatgggctcattgtcaagcggagagacaagatacttggtttcctggatactctggagcgggcaaagctaaggggattgctgtggctgttggagattggtatttcgaaagaacaaaacagaatagctcatag

SEQ ID NO: 82077 - protein, 388 aa, Arabidopsis thaliana
  peptide (1)..(388): Ceres Seq. ID no. 12663258
MKTLLYWGWSSLAGLILFSILAHGEMKTFNESNGTNANVLMVGLTLVQAAAAKGAVCLDGSVPGYHLCRGYGSGANNWIIQLQGGAWCDSIQNCQSRKGSGYGSSTLMEKELAFLGLLSNKAAENPDFYNWNKVKVRYCDGASFDGDSENKAAQLQYRGKRIFLAVMEDLMEKGMRQAKQALLSGCSSGGLSAILRCDDFNNLFPPTTTVKCMSDAGFFLDAVDVSGGHSLRRMYSGVVNTQGLQNTLPPTCTSHIKPFLCFFPQYIINQVKTPLFILNSGFDSWQIGNSLAPPSADKSGSWHNCSFSFRCTASQMHFLEGFKMSMLDALKTFSKFSKNGVLITSGWAHCQAERQDTWFPGYSGAGKAKGIAVAVGDWYFERTKQNSS

SEQ ID NO: 82078 - protein, 363 aa, Arabidopsis thaliana; identical to SEQ ID NO: 81333
  peptide (1)..(363): Ceres Seq. ID no. 12663259

SEQ ID NO: 82079 - protein, 348 aa, Arabidopsis thaliana; identical to SEQ ID NO: 81334
  peptide (1)..(348): Ceres Seq. ID no. 12663260

SEQ ID NO: 82080 - DNA, 954 bp, Arabidopsis thaliana
  misc_feature (1)..(954): Ceres Seq. ID no. 12663277
  misc_feature (1)..(954): Ortholog of  Ceres SEQ ID NO 13598387 as cited in SEQ ID NO 62757
  misc_feature (1)..(954): Ortholog of  Ceres SEQ ID NO 13662984 as cited in SEQ ID NO 64419
atgggtcaatatgcaacagtgtgggatcaaaaagaagcaagtgagataatcaaagattggaatggcgttgaccaagtccttctcagaaacccacatggtgcttctgccaagataagtttacatggaggacaagtgatttcatggaggaatgaactaggcgaagagcttcttttcactagcaataaggctatattcaaacccccaaaatcaatgcgtggagggattcagatttgttatccgcagtttggggattgtggatcactggatcaacatgggtttgcaaggaacaaaatttgggtaatcgatgagaacccacctccacttaactcaaacgaatccttaggaaaatcctttgttgatcttcttttgaaaccatcagaagatgacttaaagcaatggcctcatagtttcgagttccgtcttagggtttcgcttgctgtagatggcgacttaacattgacttctcggattagaaacatcaatggcaagccttttagcttctcatttgcatatcacacctacctctctgtctctgacataagtgaagtgagaattgaagggttggagacattggactacttagacaacctcagccaaagacagcttttgactgaacaaggcgatgcaataacctttgaatccgagatggaccggacataccttagatcaccaaaggtggttgcagttcttgatcatgaacggaaaagaacatatgttatcggaaaggaaggacttccagacaccgtggtgtggaatccatgggagaagaaatcgaaaacaatggcggattttggtgatgaagagtacaaaagcatgctttgtgtggatggtgcagcagtggagagaccgatcactttgaagccaggagaagaatggaccggccggctaatattgaccgctgttaaatccagtttctgcttcgatcaactcgaactacagagcaagggattctga

SEQ ID NO: 82081 - protein, 317 aa, Arabidopsis thaliana
  peptide (1)..(317): Ceres Seq. ID no. 12663278
MGQYATVWDQKEASEIIKDWNGVDQVLLRNPHGASAKISLHGGQVISWRNELGEELLFTSNKAIFKPPKSMRGGIQICYPQFGDCGSLDQHGFARNKIWVIDENPPPLNSNESLGKSFVDLLLKPSEDDLKQWPHSFEFRLRVSLAVDGDLTLTSRIRNINGKPFSFSFAYHTYLSVSDISEVRIEGLETLDYLDNLSQRQLLTEQGDAITFESEMDRTYLRSPKVVAVLDHERKRTYVIGKEGLPDTVVWNPWEKKSKTMADFGDEEYKSMLCVDGAAVERPITLKPGEEWTGRLILTAVKSSFCFDQLELQSKGF

SEQ ID NO: 82082 - protein, 247 aa, Arabidopsis thaliana
  peptide (1)..(247): Ceres Seq. ID no. 12663279
MRGGIQICYPQFGDCGSLDQHGFARNKIWVIDENPPPLNSNESLGKSFVDLLLKPSEDDLKQWPHSFEFRLRVSLAVDGDLTLTSRIRNINGKPFSFSFAYHTYLSVSDISEVRIEGLETLDYLDNLSQRQLLTEQGDAITFESEMDRTYLRSPKVVAVLDHERKRTYVIGKEGLPDTVVWNPWEKKSKTMADFGDEEYKSMLCVDGAAVERPITLKPGEEWTGRLILTAVKSSFCFDQLELQSKGF

SEQ ID NO: 82083 - DNA, 2225 bp, Arabidopsis thaliana
  misc_feature (1)..(2225): Ceres Seq. ID no. 12663318
  misc_feature (1)..(2225): Ortholog of  Ceres SEQ ID NO 13599900 as cited in SEQ ID NO 531
  misc_feature (1)..(2225): Ortholog of  Ceres SEQ ID NO 15171402 as cited in SEQ ID NO 51174
  misc_feature (1)..(2225): Ortholog of  Ceres SEQ ID NO 12606804 as cited in SEQ ID NO 53016
  misc_feature (1)..(2225): Ortholog of  Ceres SEQ ID NO 12364854 as cited in SEQ ID NO 55590
  misc_feature (1)..(2225): Ortholog of  Ceres SEQ ID NO 13596509 as cited in SEQ ID NO 62004
  misc_feature (1)..(2225): Ortholog of  Ceres SEQ ID NO 13659971 as cited in SEQ ID NO 67565
  misc_feature (1)..(2225): Ortholog of  Ceres SEQ ID NO 13500385 as cited in SEQ ID NO 67583
aaaaacagttcgttgttcctttaatccgtaaaaaaaaacaaaaaaagttttgatttttctctgtgagtttgagtagtagtaattaatagaaacaatggaggttgattcaagcaaggatccgaaagtctaacgggtcaaaaccaaaaaattccggatggagtcggcacgacttgtgggtgactacgcacttggcccgagaattgggtctggttcgtttgcggtggtgtggttagcgaagcatcgatcttctggtttagaagttgccgtcaaagagattgataagaaacttcttagccctaaagtaagagataatcttcttaaagagatttcgatccttagcacaatcgatcatcctaatatcatccgattctacgaagcaatcgagactggagataggatatttcttgtgttggagtattgtagtggaggtgatcttgctggctatatcaatcgccatggcaaagtacctgaagctgttgctaaacattttatgaggcaattggctttagggttacaagtacttcaagagaagcattttattcaccgagatttaaagcctcagaatttacttttatcttccaaggaagtaactccattgctaaagataggagattttgggtttgcaaggtctctaacaccggagagcatggcggaaacattttgcggttctccattgtatatggctccagaaattatccggaatcaaaagtatgatgctaaggctgacttatggagtgccggtgcgattttgtttcaacttgttactgggaaaccaccttttgatggaaataatcacatacagctttttcataatattgtgagagacactgagctgaaatttcctgaagatactaggaatgagattcatccagattgtgttgatctgtgcagaagtcttctccgccgaaacccaattgaacgcttgacattccgagagttcttcaatcacatgttccttcgagagccaagacaaattccggatgttgagcattctggttttagtacctgtacggggaaatcactgttgccctccgcacaaccgagtactagtacaaaccgttttaaatcaagtgcagagaatgttcacaaacatgggagttcctctagtgcctcaaattctcaaatttcaatgccacatacctcttttgagaagactagaaaagatactgagggacaatgctcatcaaaccaatctggagttgttgattcactcgagctcatagagagagagtatgttcttgtaaaccgtccttctgcctcgctggaaggttcatcagattgtttcgacacatcattgcaagattccggttttcctaatatcttaccaaggaatgaaaaagtttcatcgagttcacttgaagcacagaaaccattatctgatgtgtcaggtccacgaccagcaagcgtttcatatctgctaacagaagtacaacgcttaacgattgtccatcctccaactaaactccaacttttgcatcagtatgcacaagcacttacagaactagctagcgagatgggcaatacagggcaggtaaaggaatcttttgctgttacgctcgtcgttttagctgtctggagaaaagccttagagatatgtgattcttggatgatgtccgttggagagaatgaagtgaacccagatccaaccacggctcctgagacttcgattccagatttgaattcacctgcaccagctaaaacgtgggtgacacaagagtttgttaccgcgttaaaccaagccgagaatttatcaactcaactaaacgaaacaagtgctgccactcatatgcctgacgccatggaaacaatatacgagagggcactagcatatggcaagagtggtggggctgaagaatatttgagtaacaaagaaagtgcagcaacattatacaagaaagcaattcttctactctcctttataatcgaggaagcagtgactctatctctaaacccctctttctcattaacccctgacgacaagaagcggattctctactacatctctaacttacagcatcgtcggtctcatctttagcgaaaatagaccgcgggcattgtatataagaaactttcctggctctgcttgggtcaagtctataacatttgtggcttttccttatattctcttgaaatttcgaaatggttactctatattgttgatgctgtgaccaaaaagtatttgcctccctcattgtatagtgccaatatcaataatagcttaaaat

SEQ ID NO: 82084 - protein, 626 aa, Arabidopsis thaliana
  peptide (1)..(626): Ceres Seq. ID no. 12663319
MESARLVGDYALGPRIGSGSFAVVWLAKHRSSGLEVAVKEIDKKLLSPKVRDNLLKEISILSTIDHPNIIRFYEAIETGDRIFLVLEYCSGGDLAGYINRHGKVPEAVAKHFMRQLALGLQVLQEKHFIHRDLKPQNLLLSSKEVTPLLKIGDFGFARSLTPESMAETFCGSPLYMAPEIIRNQKYDAKADLWSAGAILFQLVTGKPPFDGNNHIQLFHNIVRDTELKFPEDTRNEIHPDCVDLCRSLLRRNPIERLTFREFFNHMFLREPRQIPDVEHSGFSTCTGKSLLPSAQPSTSTNRFKSSAENVHKHGSSSSASNSQISMPHTSFEKTRKDTEGQCSSNQSGVVDSLELIEREYVLVNRPSASLEGSSDCFDTSLQDSGFPNILPRNEKVSSSSLEAQKPLSDVSGPRPASVSYLLTEVQRLTIVHPPTKLQLLHQYAQALTELASEMGNTGQVKESFAVTLVVLAVWRKALEICDSWMMSVGENEVNPDPTTAPETSIPDLNSPAPAKTWVTQEFVTALNQAENLSTQLNETSAATHMPDAMETIYERALAYGKSGGAEEYLSNKESAATLYKKAILLLSFIIEEAVTLSLNPSFSLTPDDKKRILYYISNLQHRRSHL

SEQ ID NO: 82085 - protein, 514 aa, Arabidopsis thaliana
  peptide (1)..(514): Ceres Seq. ID no. 12663320
MRQLALGLQVLQEKHFIHRDLKPQNLLLSSKEVTPLLKIGDFGFARSLTPESMAETFCGSPLYMAPEIIRNQKYDAKADLWSAGAILFQLVTGKPPFDGNNHIQLFHNIVRDTELKFPEDTRNEIHPDCVDLCRSLLRRNPIERLTFREFFNHMFLREPRQIPDVEHSGFSTCTGKSLLPSAQPSTSTNRFKSSAENVHKHGSSSSASNSQISMPHTSFEKTRKDTEGQCSSNQSGVVDSLELIEREYVLVNRPSASLEGSSDCFDTSLQDSGFPNILPRNEKVSSSSLEAQKPLSDVSGPRPASVSYLLTEVQRLTIVHPPTKLQLLHQYAQALTELASEMGNTGQVKESFAVTLVVLAVWRKALEICDSWMMSVGENEVNPDPTTAPETSIPDLNSPAPAKTWVTQEFVTALNQAENLSTQLNETSAATHMPDAMETIYERALAYGKSGGAEEYLSNKESAATLYKKAILLLSFIIEEAVTLSLNPSFSLTPDDKKRILYYISNLQHRRSHL

SEQ ID NO: 82086 - protein, 462 aa, Arabidopsis thaliana
  peptide (1)..(462): Ceres Seq. ID no. 12663321
MAETFCGSPLYMAPEIIRNQKYDAKADLWSAGAILFQLVTGKPPFDGNNHIQLFHNIVRDTELKFPEDTRNEIHPDCVDLCRSLLRRNPIERLTFREFFNHMFLREPRQIPDVEHSGFSTCTGKSLLPSAQPSTSTNRFKSSAENVHKHGSSSSASNSQISMPHTSFEKTRKDTEGQCSSNQSGVVDSLELIEREYVLVNRPSASLEGSSDCFDTSLQDSGFPNILPRNEKVSSSSLEAQKPLSDVSGPRPASVSYLLTEVQRLTIVHPPTKLQLLHQYAQALTELASEMGNTGQVKESFAVTLVVLAVWRKALEICDSWMMSVGENEVNPDPTTAPETSIPDLNSPAPAKTWVTQEFVTALNQAENLSTQLNETSAATHMPDAMETIYERALAYGKSGGAEEYLSNKESAATLYKKAILLLSFIIEEAVTLSLNPSFSLTPDDKKRILYYISNLQHRRSHL

SEQ ID NO: 82087 - DNA, 1106 bp, Arabidopsis thaliana
  misc_feature (1)..(1106): Ceres Seq. ID no. 12663322
  misc_feature (1)..(1106): Ortholog of  Ceres SEQ ID NO 14308278 as cited in SEQ ID NO 55403
  misc_feature (1)..(1106): Ortholog of  Ceres SEQ ID NO 12618176 as cited in SEQ ID NO 64489
cccggtcagttttagtggggaagcagaagatgtcgaccggtttagctctgaatcgctgttcagtttcggtatgtagaacggccgttactttacttaaccggccaactgtctccgttgccaggagtttgaaattcagtcgccggctaatcggaaactgctcgatagcgccggcggatccttatgttgtggcggacgacgataagtacggtaacaaacaagttatcagtctcactcctcgcctttacgactatgtcctctccaacgtccgcgagcctaagattttgaggcaacttcgggaagagacttccaaaatgcgaggtagccaaatgcaggtgtcgcctgatcaagcgcagttgcttgcaatgcttgtacagatgcttgcagcagaaagatgtattgaagttggagtttacacgggatattcttcattggctgtggcgttagttctaccagaatcagggtgtttagttgcctgtgaaagagattctaactctcttgaagttgctaagaggtactacgagcttgctggagtctctcacaaggttaatgtgaaacaaggtcttgcagctgaatcattgaaatccatgattcagaacggtgaaggagccagctatgattttgcatttgtcgatgctgataagaggatgtatcaggactacttcgaattgcttcttcaacttgtcagagttggtggagtcattgtgatggataatgttctttggcatggacgagtttcggatcctatggtgaatgatgcgaagaccatcagcattaggaatttcaacaaaaagttaatggatgataaacgtgtaagcattagtatggtaccgatcggcgatggcatgacgatatgccgcaagagatagtcatcaggaaaaaccaattgggtcacagtgaacctgatccaagagagaagtcttttaaacatgaaaggatctccatgaagccaagatatacatgtttcaggatagggaatcatttcttttgttctgaatccattctcacaaacacttcgaagactcatctacttgggatggtaaccactaacgcatgtacttttgtcaaattgtttaactctttctgattagtggaaatagagttttgat

SEQ ID NO: 82088 - protein, 287 aa, Arabidopsis thaliana
  peptide (1)..(287): Ceres Seq. ID no. 12663323
RSVLVGKQKMSTGLALNRCSVSVCRTAVTLLNRPTVSVARSLKFSRRLIGNCSIAPADPYVVADDDKYGNKQVISLTPRLYDYVLSNVREPKILRQLREETSKMRGSQMQVSPDQAQLLAMLVQMLAAERCIEVGVYTGYSSLAVALVLPESGCLVACERDSNSLEVAKRYYELAGVSHKVNVKQGLAAESLKSMIQNGEGASYDFAFVDADKRMYQDYFELLLQLVRVGGVIVMDNVLWHGRVSDPMVNDAKTISIRNFNKKLMDDKRVSISMVPIGDGMTICRKR

SEQ ID NO: 82089 - protein, 278 aa, Arabidopsis thaliana
  peptide (1)..(278): Ceres Seq. ID no. 12663324
MSTGLALNRCSVSVCRTAVTLLNRPTVSVARSLKFSRRLIGNCSIAPADPYVVADDDKYGNKQVISLTPRLYDYVLSNVREPKILRQLREETSKMRGSQMQVSPDQAQLLAMLVQMLAAERCIEVGVYTGYSSLAVALVLPESGCLVACERDSNSLEVAKRYYELAGVSHKVNVKQGLAAESLKSMIQNGEGASYDFAFVDADKRMYQDYFELLLQLVRVGGVIVMDNVLWHGRVSDPMVNDAKTISIRNFNKKLMDDKRVSISMVPIGDGMTICRKR

SEQ ID NO: 82090 - protein, 184 aa, Arabidopsis thaliana
  peptide (1)..(184): Ceres Seq. ID no. 12663325
MRGSQMQVSPDQAQLLAMLVQMLAAERCIEVGVYTGYSSLAVALVLPESGCLVACERDSNSLEVAKRYYELAGVSHKVNVKQGLAAESLKSMIQNGEGASYDFAFVDADKRMYQDYFELLLQLVRVGGVIVMDNVLWHGRVSDPMVNDAKTISIRNFNKKLMDDKRVSISMVPIGDGMTICRKR

SEQ ID NO: 82091 - DNA, 687 bp, Arabidopsis thaliana
  misc_feature (1)..(687): Ceres Seq. ID no. 12663334
  misc_feature (1)..(687): Ortholog of  Ceres SEQ ID NO 13639102 as cited in SEQ ID NO 56610
atggcgttcgaagagagcttagtaatggtttcttctttgtcgagattgtctatatgtacgagctctgcttacgacgaagcagccacgaagaatcaaccagattcgtgtgtttccacatctctggagaatttcgacggagcagaggcggatggggaagtttccgatgatggagaaggaaaagagaacgttcgagagtcagattccgacaaagagacacgtgggttttactctcttccggtgactccatctcgccggagaagaaaacttacagtttccggcgagttagatgcgaatgagagtaacaaaaatggcagtaagtgtagtttacggaggcaaaggagggaaaagaagaaaaagggagttaacggagagtgtgacgtcggtggaagagaaggcttaacggtgttgacgagagcaagaggtggagataggtcgttgaggatggggttacaagaagtgaaagcttgtagagatctcgggttcgaattagaggttccggttccgggtcggatatctgtgtcaacaaccgggtcgaatttcgatactcagactagtagcggcggcgactcacccatcgccacctggcgtatctccagtcctggtgatgatccaaaggaggtcaaggcgaggttgaaagtgtgggcacaagcggtagctttagcttctgcgacacgtcaagcttcttag

SEQ ID NO: 82092 - protein, 228 aa, Arabidopsis thaliana
  peptide (1)..(228): Ceres Seq. ID no. 12663335
MAFEESLVMVSSLSRLSICTSSAYDEAATKNQPDSCVSTSLENFDGAEADGEVSDDGEGKENVRESDSDKETRGFYSLPVTPSRRRRKLTVSGELDANESNKNGSKCSLRRQRREKKKKGVNGECDVGGREGLTVLTRARGGDRSLRMGLQEVKACRDLGFELEVPVPGRISVSTTGSNFDTQTSSGGDSPIATWRISSPGDDPKEVKARLKVWAQAVALASATRQAS

SEQ ID NO: 82093 - protein, 220 aa, Arabidopsis thaliana
  peptide (1)..(220): Ceres Seq. ID no. 12663336
MVSSLSRLSICTSSAYDEAATKNQPDSCVSTSLENFDGAEADGEVSDDGEGKENVRESDSDKETRGFYSLPVTPSRRRRKLTVSGELDANESNKNGSKCSLRRQRREKKKKGVNGECDVGGREGLTVLTRARGGDRSLRMGLQEVKACRDLGFELEVPVPGRISVSTTGSNFDTQTSSGGDSPIATWRISSPGDDPKEVKARLKVWAQAVALASATRQAS

SEQ ID NO: 82094 - DNA, 1287 bp, Arabidopsis thaliana
  misc_feature (1)..(1287): Ceres Seq. ID no. 12663349
  misc_feature (1)..(1287): Ortholog of  Ceres SEQ ID NO 13662197 as cited in SEQ ID NO 63622
atggctttttcattaaccagagtaaaccgagttcttattcaagcatgtgaaacgaccccatcagtagtgttggatctgtccttaatcgataatattccggttctacgatgtttcgctagaacaatacatgtgtttactcatggacctgatgcagctagagccatacaagaggcattggctaaagcacttgtctcttactatcccttgtccggtagattgaaagagttaaaccaaggtaaacttcagatcgattgtaccgggaaaactggaatttggttcgttgatgcggttactgatgttaagctagagagtgttggttatttcgacaatctaatggaaataccttacgatgatctccttcctgatcaaatccctaaagatgatgatgcagaaccgcttgtccaaatgcaggtgacccaattctcttgcggcggtttcgtaatgggccttagattttgccacgcaatttgtgacggccttggagcggcccaattccttaccgcggtcggagaaatcgcctgcggccaaacgaatctcggcgtctctcccgtctggcatagagatttcattccacagcagcaccgtgcgaatgatgtcatatctccggcaatccctccgccgtttccaccggcgtttccagaatacaagctagagcacttaagctttgatatcccatcagatttgatcgaacggttcaaacgtgagtttcgtgcgtcgaccggagagatttgttcagccttcgaggtcatcgccgcttgtttctggaaacttcgtacggaagcgataaatctgagagaggatacagaagtgaagctcgtattcttcgctaactgtcgtcatcttgttaatccgccgctcccgattggtttctacggcaactgcttcttcccggtgaaaatctccgccgaaagccacgaaatctcgaaggagaaatcagtgttcgatgtggtgaaattgatcaaacaagcgaaaacgaagctaccggaggaatttgaaaagttcgtcagcggcgacggagacgatccgtttgcgccggcggtgggatataatacgctgtttttatcggagtggggaaaattaggattcaatcaggtggattatggatggggtccaccattacacgtggcaccaatccaagggttgagtattgtccctgctggcatcgtaggatctgtgccgttgccgaagaaaggtgtacgtttgatgacgtggtgcgtcgaggagactcattgccaattgttcgatgatttgatgacaaataaattgacatctaacaaaaccgaataa

SEQ ID NO: 82095 - protein, 428 aa, Arabidopsis thaliana
  peptide (1)..(428): Ceres Seq. ID no. 12663350
MAFSLTRVNRVLIQACETTPSVVLDLSLIDNIPVLRCFARTIHVFTHGPDAARAIQEALAKALVSYYPLSGRLKELNQGKLQIDCTGKTGIWFVDAVTDVKLESVGYFDNLMEIPYDDLLPDQIPKDDDAEPLVQMQVTQFSCGGFVMGLRFCHAICDGLGAAQFLTAVGEIACGQTNLGVSPVWHRDFIPQQHRANDVISPAIPPPFPPAFPEYKLEHLSFDIPSDLIERFKREFRASTGEICSAFEVIAACFWKLRTEAINLREDTEVKLVFFANCRHLVNPPLPIGFYGNCFFPVKISAESHEISKEKSVFDVVKLIKQAKTKLPEEFEKFVSGDGDDPFAPAVGYNTLFLSEWGKLGFNQVDYGWGPPLHVAPIQGLSIVPAGIVGSVPLPKKGVRLMTWCVEETHCQLFDDLMTNKLTSNKTE

SEQ ID NO: 82096 - protein, 317 aa, Arabidopsis thaliana
  peptide (1)..(317): Ceres Seq. ID no. 12663351
MEIPYDDLLPDQIPKDDDAEPLVQMQVTQFSCGGFVMGLRFCHAICDGLGAAQFLTAVGEIACGQTNLGVSPVWHRDFIPQQHRANDVISPAIPPPFPPAFPEYKLEHLSFDIPSDLIERFKREFRASTGEICSAFEVIAACFWKLRTEAINLREDTEVKLVFFANCRHLVNPPLPIGFYGNCFFPVKISAESHEISKEKSVFDVVKLIKQAKTKLPEEFEKFVSGDGDDPFAPAVGYNTLFLSEWGKLGFNQVDYGWGPPLHVAPIQGLSIVPAGIVGSVPLPKKGVRLMTWCVEETHCQLFDDLMTNKLTSNKTE

SEQ ID NO: 82097 - protein, 293 aa, Arabidopsis thaliana
  peptide (1)..(293): Ceres Seq. ID no. 12663352
MQVTQFSCGGFVMGLRFCHAICDGLGAAQFLTAVGEIACGQTNLGVSPVWHRDFIPQQHRANDVISPAIPPPFPPAFPEYKLEHLSFDIPSDLIERFKREFRASTGEICSAFEVIAACFWKLRTEAINLREDTEVKLVFFANCRHLVNPPLPIGFYGNCFFPVKISAESHEISKEKSVFDVVKLIKQAKTKLPEEFEKFVSGDGDDPFAPAVGYNTLFLSEWGKLGFNQVDYGWGPPLHVAPIQGLSIVPAGIVGSVPLPKKGVRLMTWCVEETHCQLFDDLMTNKLTSNKTE

SEQ ID NO: 82098 - DNA, 1800 bp, Arabidopsis thaliana
  misc_feature (1)..(1800): Ceres Seq. ID no. 12663390
  misc_feature (1)..(1800): Ortholog of  Ceres SEQ ID NO 14301550 as cited in SEQ ID NO 66519
  misc_feature (1)..(1800): Ortholog of  Ceres SEQ ID NO 15180570 as cited in SEQ ID NO 0
atggctgctgctccatggctccatctctctaggagaagaagctccactcagacttcattaagaagcttcctcatttgctcttcttcattcgattcggatgaattcatttccagtcaaagccgcgtaatcggcgggagaggagaagaggaagtacgattttccggtgctctcttctctcgtatgattcattcttctacttatcatccttaccgtcaaattccattgccacactcctctgtacaactgcttgatgcgagtcttgggtgtagaggtttctctagtggtagttctaatgttagtgatggatgtgatgaagaagttgaatctgaatgcgataatgatgaagaaactggggtcagttgtgttgaatcaagtactaatccggaagaagtagagagagtctgcaaagtgattgatgaattgtttgcgttagatagaaatatggaagctgttcttgatgaaatgaaactagatttatcacatgatctcatcgttgaggttttagaacgttttcgacatgctaggaagcctgcatttaggttcttctgttgggctgcagagagacaaggatttgctcatgactcaagaacatataactccatgatgagtattttagcaaagactagacagttcgagacgatggtttcggttctcgaagagatgggtacgaaaggtctattgacgatggagacattcactatcgcgatgaaagctttcgctgctgcgaaagagaggaagaaagctgttggtatctttgagttgatgaagaagtacaagtttaagattggtgttgaaaccattaattgcttgcttgatagtcttggcagggctaagcttggaaaagaagctcaggttctgtttgataagctgaaggagaggtttacacctaatatgatgacttacactgttctactcaatggttggtgcagggtgaggaacttgatagaagcagctagaatctggaatgatatgattgatcagggattgaaacctgacattgtagctcacaacgtaatgcttgaagggttgttgaggagtaggaaaaaatcagatgcgatcaaattgttccatgttatgaaatccaagggaccttgccctaatgtccgtagctataccatcatgatccgtgacttctgcaaacagtcgagcatggaaactgccattgaatactttgatgacatggttgattccgggttgcaacctgatgcagcggtttacacgtgtctgatcacggggtttgggactcagaagaagctggatactgtttacgaactgctcaaggagatgcaagaaaagggacatcctccggatggcaaaacgtataatgcgttgatcaaactgatggcgaaccagaaaatgccggaacatgccacaaggatctacaacaagatgatccagaacgaaattgagccatcgatacacacattcaacatgataatgaaatcatacttcatggcgagaaactatgagatggggagagcagtttgggaagagatgatcaagaaagggatttgtcctgacgataactcctacacggttttgatcagagggcttataggtgaaggcaagtcgagagaggcatgcagatacttagaggagatgcttgacaaaggaatgaaaacccctttgattgattataacaagtttgcagctgatttccacagaggggggcaaccggagatatttgaggaattggcacagagagctaagttctcaggtaagtttgctgcagcagagatctttgcgagatgggctcagatgactagaaggagattcaaacagaggttcatggaagattga

SEQ ID NO: 82099 - protein, 599 aa, Arabidopsis thaliana
  peptide (1)..(599): Ceres Seq. ID no. 12663391
MAAAPWLHLSRRRSSTQTSLRSFLICSSSFDSDEFISSQSRVIGGRGEEEVRFSGALFSRMIHSSTYHPYRQIPLPHSSVQLLDASLGCRGFSSGSSNVSDGCDEEVESECDNDEETGVSCVESSTNPEEVERVCKVIDELFALDRNMEAVLDEMKLDLSHDLIVEVLERFRHARKPAFRFFCWAAERQGFAHDSRTYNSMMSILAKTRQFETMVSVLEEMGTKGLLTMETFTIAMKAFAAAKERKKAVGIFELMKKYKFKIGVETINCLLDSLGRAKLGKEAQVLFDKLKERFTPNMMTYTVLLNGWCRVRNLIEAARIWNDMIDQGLKPDIVAHNVMLEGLLRSRKKSDAIKLFHVMKSKGPCPNVRSYTIMIRDFCKQSSMETAIEYFDDMVDSGLQPDAAVYTCLITGFGTQKKLDTVYELLKEMQEKGHPPDGKTYNALIKLMANQKMPEHATRIYNKMIQNEIEPSIHTFNMIMKSYFMARNYEMGRAVWEEMIKKGICPDDNSYTVLIRGLIGEGKSREACRYLEEMLDKGMKTPLIDYNKFAADFHRGGQPEIFEELAQRAKFSGKFAAAEIFARWAQMTRRRFKQRFMED

SEQ ID NO: 82100 - protein, 539 aa, Arabidopsis thaliana
  peptide (1)..(539): Ceres Seq. ID no. 12663392
MIHSSTYHPYRQIPLPHSSVQLLDASLGCRGFSSGSSNVSDGCDEEVESECDNDEETGVSCVESSTNPEEVERVCKVIDELFALDRNMEAVLDEMKLDLSHDLIVEVLERFRHARKPAFRFFCWAAERQGFAHDSRTYNSMMSILAKTRQFETMVSVLEEMGTKGLLTMETFTIAMKAFAAAKERKKAVGIFELMKKYKFKIGVETINCLLDSLGRAKLGKEAQVLFDKLKERFTPNMMTYTVLLNGWCRVRNLIEAARIWNDMIDQGLKPDIVAHNVMLEGLLRSRKKSDAIKLFHVMKSKGPCPNVRSYTIMIRDFCKQSSMETAIEYFDDMVDSGLQPDAAVYTCLITGFGTQKKLDTVYELLKEMQEKGHPPDGKTYNALIKLMANQKMPEHATRIYNKMIQNEIEPSIHTFNMIMKSYFMARNYEMGRAVWEEMIKKGICPDDNSYTVLIRGLIGEGKSREACRYLEEMLDKGMKTPLIDYNKFAADFHRGGQPEIFEELAQRAKFSGKFAAAEIFARWAQMTRRRFKQRFMED

SEQ ID NO: 82101 - protein, 452 aa, Arabidopsis thaliana
  peptide (1)..(452): Ceres Seq. ID no. 12663393
MEAVLDEMKLDLSHDLIVEVLERFRHARKPAFRFFCWAAERQGFAHDSRTYNSMMSILAKTRQFETMVSVLEEMGTKGLLTMETFTIAMKAFAAAKERKKAVGIFELMKKYKFKIGVETINCLLDSLGRAKLGKEAQVLFDKLKERFTPNMMTYTVLLNGWCRVRNLIEAARIWNDMIDQGLKPDIVAHNVMLEGLLRSRKKSDAIKLFHVMKSKGPCPNVRSYTIMIRDFCKQSSMETAIEYFDDMVDSGLQPDAAVYTCLITGFGTQKKLDTVYELLKEMQEKGHPPDGKTYNALIKLMANQKMPEHATRIYNKMIQNEIEPSIHTFNMIMKSYFMARNYEMGRAVWEEMIKKGICPDDNSYTVLIRGLIGEGKSREACRYLEEMLDKGMKTPLIDYNKFAADFHRGGQPEIFEELAQRAKFSGKFAAAEIFARWAQMTRRRFKQRFMED

SEQ ID NO: 82102 - DNA, 1077 bp, Arabidopsis thaliana
  misc_feature (1)..(1077): Ceres Seq. ID no. 12663426
  misc_feature (1)..(1077): Ortholog of  Ceres SEQ ID NO 13594377 as cited in SEQ ID NO 58177
  misc_feature (1)..(1077): Ortholog of  Ceres SEQ ID NO 15224613 as cited in SEQ ID NO 58938
  misc_feature (1)..(1077): Ortholog of  Ceres SEQ ID NO 13664309 as cited in SEQ ID NO 60596
agacataaattattagagagacgaaaggaaaagcatgtttaaactctgtctcgttctcgtcttggttattgcagtagatgcaaatccggctaagtccggttcttgtagttgctccgggaatatatcagcgagcgatgtcgatcgagttcatttcgcgatgaacttggagttcaccgaggccgagttcttcttaaaaggggctaccggaaaaggacttgatgcctataacgcgacacttgctaaaggcggaccaccgccgataggggccaagaaagccaaccttgatcctataactaatcgaatcatcgaggagtttggttatcaagaaatcggtcatcttagggcgattacggatatgacgggaggaattccacgtccgctaataaatctgacgagagagaatttcgcagtgtttatggatagagcggttggacgcaaatctaatccgcggtttgatccttacgccaactcactcaactatctcttagcttcatattatatcccttatgttggccttaccggttatgtcggaaccatcccttaccttgtctacttcaatatcaaaaagctagtggcgggtctattgggggtggaatcgggtcaagacgcagtgataagaacgcttctgtacgagagacagaatgagaaggtggaggaatacggtggagtcacggtggctgagctgaccaatgagatatctaacctccgtaatgaactcggtatgtgcgggatcaaggacgaaggcttgtgcgtgccgttgtggctaggagcggagaatcgcaccaccagcaacatcctctccgctgatccttactctctctcttatgaccggacagcacaagagatcctcagggttatgtacggcaccggtgatgagcaccgacctggcgggttttggccgtgtggtgccaatggaaggatcgctaggatgtttcttgatgaagggtgttatggtgaatattgcgttgtatgttcacatgacaattaaaagtttccattgatacaattcactagaaaataaaatcgtgattaagattgtaatagtgatctcattaatttaatactggtgattattag

SEQ ID NO: 82103 - protein, 317 aa, Arabidopsis thaliana
  peptide (1)..(317): Ceres Seq. ID no. 12663427
MFKLCLVLVLVIAVDANPAKSGSCSCSGNISASDVDRVHFAMNLEFTEAEFFLKGATGKGLDAYNATLAKGGPPPIGAKKANLDPITNRIIEEFGYQEIGHLRAITDMTGGIPRPLINLTRENFAVFMDRAVGRKSNPRFDPYANSLNYLLASYYIPYVGLTGYVGTIPYLVYFNIKKLVAGLLGVESGQDAVIRTLLYERQNEKVEEYGGVTVAELTNEISNLRNELGMCGIKDEGLCVPLWLGAENRTTSNILSADPYSLSYDRTAQEILRVMYGTGDEHRPGGFWPCGANGRIARMFLDEGCYGEYCVVCSHDN

SEQ ID NO: 82104 - protein, 276 aa, Arabidopsis thaliana
  peptide (1)..(276): Ceres Seq. ID no. 12663428
MNLEFTEAEFFLKGATGKGLDAYNATLAKGGPPPIGAKKANLDPITNRIIEEFGYQEIGHLRAITDMTGGIPRPLINLTRENFAVFMDRAVGRKSNPRFDPYANSLNYLLASYYIPYVGLTGYVGTIPYLVYFNIKKLVAGLLGVESGQDAVIRTLLYERQNEKVEEYGGVTVAELTNEISNLRNELGMCGIKDEGLCVPLWLGAENRTTSNILSADPYSLSYDRTAQEILRVMYGTGDEHRPGGFWPCGANGRIARMFLDEGCYGEYCVVCSHDN

SEQ ID NO: 82105 - protein, 210 aa, Arabidopsis thaliana
  peptide (1)..(210): Ceres Seq. ID no. 12663429
MTGGIPRPLINLTRENFAVFMDRAVGRKSNPRFDPYANSLNYLLASYYIPYVGLTGYVGTIPYLVYFNIKKLVAGLLGVESGQDAVIRTLLYERQNEKVEEYGGVTVAELTNEISNLRNELGMCGIKDEGLCVPLWLGAENRTTSNILSADPYSLSYDRTAQEILRVMYGTGDEHRPGGFWPCGANGRIARMFLDEGCYGEYCVVCSHDN

SEQ ID NO: 82106 - DNA, 1461 bp, Arabidopsis thaliana
  misc_feature (1)..(1461): Ceres Seq. ID no. 12663430
  misc_feature (1)..(1461): Ortholog of  Ceres SEQ ID NO 13600220 as cited in SEQ ID NO 0
atgaaacatttcaatctgttatccattattctggttatcgttttggcgacaagctacattgatgccttcaccagaaacgattttccagaggatttcctcttcggagccggtacttctgcttatcagtgggaaggagctgctaatgaagacggaagaactcctagcgtctgggatacaacctcccactgttataatggaagtaatggagatatagcatgtgatgggtatcacaaatacaaggaagatgttaagttgatggcagaaatgggcttagaatcattcagattctctatctcctggtcaagacttatacctaatggaagaggacgcattaacccaaaaggtttattgttttacaagaatctcatcaaagagctacgaagccatggaatcgaacctcacgttacactttaccactacgatcttcctcagtctcttgaagatgagtatggaggatggatcaaccacaaaatcatagaagactttacagcttttgcagatgtatgcttcagagagtttggggaggatgtgaagttatggactacaatcaacgaagctacaatcttcgcctttgctttttatggcaaagacgttaggtatggaaattgtactacaggaaattattgtatggaaacatatattgcaggccataacatgttgctagctcatgcctctgcttcaaatttgtataaactaaagtacaagagtaagcaaagaggatccataggccttagtatatttgcattggggttaactccttatacaaactccaaggacgatgaaatcgcaactcaaagagctaaagctttcctctatggatggatgttgaagcctttggtatttggggactatccggatgaaatgaagagaaccttgggatcgagattaccggttttctcagaggaagaatcagagcaagttaaaggatcatctgactttgtaggaattatacattacacgacagtttatgtcacaaaccagcccgcaccttatatctttcccagcagcactaacaaagacttctttacagacatgggcgcccactgggaactcttcatcattcgtggtaagtttgatgctgttccatggggtctggaaggtgttcttcagcatataaagcatcgctataacaatcctccaatctacattcttgaaaatggttcaccgatgaaacacgattcgatgctacaagacacaccaagagttgaatacattcaagcttacattggtgctgtcctcaacgctatcaagtatggtcatcctttttcaaattttagtcctcacgttggatataaaagcagcttcggaatgtactatgtcaattttagcgatcctggtcgcaagaggtcgccaaagctctctgcttcttggtacactggttttctcaatggtacaattgatgttgcttctcaagatatgactcagttgcagagaaatttctctggctcttcttcactgtaa

SEQ ID NO: 82107 - protein, 486 aa, Arabidopsis thaliana
  peptide (1)..(486): Ceres Seq. ID no. 12663431
MKHFNLLSIILVIVLATSYIDAFTRNDFPEDFLFGAGTSAYQWEGAANEDGRTPSVWDTTSHCYNGSNGDIACDGYHKYKEDVKLMAEMGLESFRFSISWSRLIPNGRGRINPKGLLFYKNLIKELRSHGIEPHVTLYHYDLPQSLEDEYGGWINHKIIEDFTAFADVCFREFGEDVKLWTTINEATIFAFAFYGKDVRYGNCTTGNYCMETYIAGHNMLLAHASASNLYKLKYKSKQRGSIGLSIFALGLTPYTNSKDDEIATQRAKAFLYGWMLKPLVFGDYPDEMKRTLGSRLPVFSEEESEQVKGSSDFVGIIHYTTVYVTNQPAPYIFPSSTNKDFFTDMGAHWELFIIRGKFDAVPWGLEGVLQHIKHRYNNPPIYILENGSPMKHDSMLQDTPRVEYIQAYIGAVLNAIKYGHPFSNFSPHVGYKSSFGMYYVNFSDPGRKRSPKLSASWYTGFLNGTIDVASQDMTQLQRNFSGSSSL

SEQ ID NO: 82108 - protein, 401 aa, Arabidopsis thaliana
  peptide (1)..(401): Ceres Seq. ID no. 12663432
MAEMGLESFRFSISWSRLIPNGRGRINPKGLLFYKNLIKELRSHGIEPHVTLYHYDLPQSLEDEYGGWINHKIIEDFTAFADVCFREFGEDVKLWTTINEATIFAFAFYGKDVRYGNCTTGNYCMETYIAGHNMLLAHASASNLYKLKYKSKQRGSIGLSIFALGLTPYTNSKDDEIATQRAKAFLYGWMLKPLVFGDYPDEMKRTLGSRLPVFSEEESEQVKGSSDFVGIIHYTTVYVTNQPAPYIFPSSTNKDFFTDMGAHWELFIIRGKFDAVPWGLEGVLQHIKHRYNNPPIYILENGSPMKHDSMLQDTPRVEYIQAYIGAVLNAIKYGHPFSNFSPHVGYKSSFGMYYVNFSDPGRKRSPKLSASWYTGFLNGTIDVASQDMTQLQRNFSGSSSL

SEQ ID NO: 82109 - protein, 398 aa, Arabidopsis thaliana
  peptide (1)..(398): Ceres Seq. ID no. 12663433
MGLESFRFSISWSRLIPNGRGRINPKGLLFYKNLIKELRSHGIEPHVTLYHYDLPQSLEDEYGGWINHKIIEDFTAFADVCFREFGEDVKLWTTINEATIFAFAFYGKDVRYGNCTTGNYCMETYIAGHNMLLAHASASNLYKLKYKSKQRGSIGLSIFALGLTPYTNSKDDEIATQRAKAFLYGWMLKPLVFGDYPDEMKRTLGSRLPVFSEEESEQVKGSSDFVGIIHYTTVYVTNQPAPYIFPSSTNKDFFTDMGAHWELFIIRGKFDAVPWGLEGVLQHIKHRYNNPPIYILENGSPMKHDSMLQDTPRVEYIQAYIGAVLNAIKYGHPFSNFSPHVGYKSSFGMYYVNFSDPGRKRSPKLSASWYTGFLNGTIDVASQDMTQLQRNFSGSSSL

SEQ ID NO: 82110 - DNA, 660 bp, Arabidopsis thaliana
  misc_feature (1)..(660): Ceres Seq. ID no. 12663434
  misc_feature (1)..(660): Ortholog of  Ceres SEQ ID NO 13638567 as cited in SEQ ID NO 51303
  misc_feature (1)..(660): Ortholog of  Ceres SEQ ID NO 14301396 as cited in SEQ ID NO 51789
  misc_feature (1)..(660): Ortholog of  Ceres SEQ ID NO 12610031 as cited in SEQ ID NO 55811
  misc_feature (1)..(660): Ortholog of  Ceres SEQ ID NO 12610896 as cited in SEQ ID NO 55861
  misc_feature (1)..(660): Ortholog of  Ceres SEQ ID NO 12619664 as cited in SEQ ID NO 66048
  misc_feature (1)..(660): Ortholog of  Ceres SEQ ID NO 12635952 as cited in SEQ ID NO 0
atggcgatgaagctatatggagatgagatgtcagcgtgcgtggcacgtgttcttctctgccttcatgagaagaacactgagttcgagcttgtccctgtcaatctctttgcttgccaccacaagctcccttcttttctctccatgaacccctttggcaaagttccagctctacaagatgacgatcttaccctttttgagtcgagggcaatcactgcatatatagcagagaagcatagagacaaaggaacggatttgacaagacacgaagaccctaaagaagcagcgattgtgaagttatggtcggaagtggaggctcaccacttcaaccctgcgatctccgccgtcatccaccagctcatcgtcgtgccgcttcaaggtgagtctcctaatgcagccatcgtggaggagaatctggagaatctagggaaaatacttgacgtgtacgaagagagacttgggaagacaaaatacttagccggagatacttacacactcgccgatctccaccacgtgccttacacttactacttcatgaagacgattcatgccggtttgatcaacgaccgtcctaatgtcaaggcgtggtgggaagatctctgttctcgtccggctttccttaaagtctctccaggcttgaccgttgctcccaccacaaattga

SEQ ID NO: 82111 - protein, 219 aa, Arabidopsis thaliana
  peptide (1)..(219): Ceres Seq. ID no. 12663435
MAMKLYGDEMSACVARVLLCLHEKNTEFELVPVNLFACHHKLPSFLSMNPFGKVPALQDDDLTLFESRAITAYIAEKHRDKGTDLTRHEDPKEAAIVKLWSEVEAHHFNPAISAVIHQLIVVPLQGESPNAAIVEENLENLGKILDVYEERLGKTKYLAGDTYTLADLHHVPYTYYFMKTIHAGLINDRPNVKAWWEDLCSRPAFLKVSPGLTVAPTTN

SEQ ID NO: 82112 - protein, 217 aa, Arabidopsis thaliana
  peptide (1)..(217): Ceres Seq. ID no. 12663436
MKLYGDEMSACVARVLLCLHEKNTEFELVPVNLFACHHKLPSFLSMNPFGKVPALQDDDLTLFESRAITAYIAEKHRDKGTDLTRHEDPKEAAIVKLWSEVEAHHFNPAISAVIHQLIVVPLQGESPNAAIVEENLENLGKILDVYEERLGKTKYLAGDTYTLADLHHVPYTYYFMKTIHAGLINDRPNVKAWWEDLCSRPAFLKVSPGLTVAPTTN

SEQ ID NO: 82113 - protein, 210 aa, Arabidopsis thaliana
  peptide (1)..(210): Ceres Seq. ID no. 12663437
MSACVARVLLCLHEKNTEFELVPVNLFACHHKLPSFLSMNPFGKVPALQDDDLTLFESRAITAYIAEKHRDKGTDLTRHEDPKEAAIVKLWSEVEAHHFNPAISAVIHQLIVVPLQGESPNAAIVEENLENLGKILDVYEERLGKTKYLAGDTYTLADLHHVPYTYYFMKTIHAGLINDRPNVKAWWEDLCSRPAFLKVSPGLTVAPTTN

SEQ ID NO: 82114 - DNA, 1077 bp, Arabidopsis thaliana
  misc_feature (1)..(1077): Ceres Seq. ID no. 12663464
  misc_feature (1)..(1077): Ortholog of  Ceres SEQ ID NO 12608276 as cited in SEQ ID NO 57871
  misc_feature (1)..(1077): Ortholog of  Ceres SEQ ID NO 13595877 as cited in SEQ ID NO 67702
  misc_feature (1)..(1077): Ortholog of  Ceres SEQ ID NO 13654367 as cited in SEQ ID NO 67993
atggctggtggtaacgaagtcaaccttaacgaatgcaagagaattgtcccactcaacacatgggtcctcatttccaatttcaagcttgcttacaaagtcctccgtcgccctgacggttctttcaaccgcgacctcgccgagttccttgaccgtaaagttcccgccaactctttccccctcgacggcgttttctccttcgaccacgtcgactcaacaactaaccttctcaccagaatctaccaacctgcgtctctccttcatcagacccgtcacggaaccctcgagctaaccaaacctctcagtactacagagatcgtccctgttctcattttcttccatggaggcagcttcactcattcctccgccaatagtgctatctacgacactttctgccgacgccttgtcaccatttgcggtgttgttgttgtctctgttgattaccggagatcccctgagcatcgctacccttgtgcttacgacgatggatggaacgctctcaactgggtcaagtccagagtctggcttcagagtggtaaagactccaatgtttatgtttatttggctggagatagctctggaggcaacattgctcacaatgtcgctgtcagagctaccaatgaaggagtcaaagtgttggggaacattcttcttcatccaatgtttggtggacaggagaggactcagtctgagaagacccttgatggcaaatactttgtgactatacaagatcgagattggtattggagggcttatctaccggaaggtgaagatagagatcatccagcatgtaatccctttggcccgagaggtcaaagccttaaaggagtcaactttccaaagagtcttgttgttgtcgctggtttagatcttgttcaagattggcaattagcctatgtggatgggcttaagaagactggtcttgaagtcaatcttttgtatttgaaacaagctaccattggcttttacttcttgcctaacaatgatcactttcattgtcttatggaagagttgaataagtttgtgcactccatagaggattctcaaagcaagtcaagtcctgtgcttcttactccttag

SEQ ID NO: 82115 - protein, 358 aa, Arabidopsis thaliana
  peptide (1)..(358): Ceres Seq. ID no. 12663465
MAGGNEVNLNECKRIVPLNTWVLISNFKLAYKVLRRPDGSFNRDLAEFLDRKVPANSFPLDGVFSFDHVDSTTNLLTRIYQPASLLHQTRHGTLELTKPLSTTEIVPVLIFFHGGSFTHSSANSAIYDTFCRRLVTICGVVVVSVDYRRSPEHRYPCAYDDGWNALNWVKSRVWLQSGKDSNVYVYLAGDSSGGNIAHNVAVRATNEGVKVLGNILLHPMFGGQERTQSEKTLDGKYFVTIQDRDWYWRAYLPEGEDRDHPACNPFGPRGQSLKGVNFPKSLVVVAGLDLVQDWQLAYVDGLKKTGLEVNLLYLKQATIGFYFLPNNDHFHCLMEELNKFVHSIEDSQSKSSPVLLTP

SEQ ID NO: 82116 - DNA, 720 bp, Arabidopsis thaliana
  misc_feature (1)..(720): Ceres Seq. ID no. 12663485
  misc_feature (1)..(720): Ortholog of  Ceres SEQ ID NO 14304124 as cited in SEQ ID NO 56378
  misc_feature (1)..(720): Ortholog of  Ceres SEQ ID NO 12585331 as cited in SEQ ID NO 62912
  misc_feature (1)..(720): Ortholog of  Ceres SEQ ID NO 13654964 as cited in SEQ ID NO 63176
atgtggaatcagaagcatgatttggagtcggctcagacgcctctctacccgatgatgtcggagagcccggagctccgatggtctttcatccgcaaggtctattccatcatctccatccagctgctcgttacaatcgccgtcgctgccaccgtcgttaaggttcattctatttctgtattcttcaccaccaccaccgccggcttcgctctctacatacttcttatattgactccattgatcgttatgtgtcctttgtattactatcaccagaagcaccctgtgaactatctgttactcgggattttcaccgtcgctcttgcctttgcggttggcttgacctgcgcctttacaagcgggaaggtgattctggaatctgtgattttgaccgctgttgtggtcatatccctcactctatacactttctgggcggccaaaagaggccatgacttcaacttcctcggacctttcttgttcggtgctgtcattgtcctcatggtgttttccttcatccagattctcttccctttaggaaagatctctgtgatgatctatggttgtttggcatccatcatcttctgtggctacattgtatatgataccgacaacttgatcaagaggcactcctatgacgagtacatctgggctgctgtttctctttatttggatgtcattaatctcttcctatctctcctcactctcttaagggctgttgatagttag

SEQ ID NO: 82117 - protein, 239 aa, Arabidopsis thaliana
  peptide (1)..(239): Ceres Seq. ID no. 12663486
MWNQKHDLESAQTPLYPMMSESPELRWSFIRKVYSIISIQLLVTIAVAATVVKVHSISVFFTTTTAGFALYILLILTPLIVMCPLYYYHQKHPVNYLLLGIFTVALAFAVGLTCAFTSGKVILESVILTAVVVISLTLYTFWAAKRGHDFNFLGPFLFGAVIVLMVFSFIQILFPLGKISVMIYGCLASIIFCGYIVYDTDNLIKRHSYDEYIWAAVSLYLDVINLFLSLLTLLRAVDS

SEQ ID NO: 82118 - protein, 222 aa, Arabidopsis thaliana
  peptide (1)..(222): Ceres Seq. ID no. 12663487
MMSESPELRWSFIRKVYSIISIQLLVTIAVAATVVKVHSISVFFTTTTAGFALYILLILTPLIVMCPLYYYHQKHPVNYLLLGIFTVALAFAVGLTCAFTSGKVILESVILTAVVVISLTLYTFWAAKRGHDFNFLGPFLFGAVIVLMVFSFIQILFPLGKISVMIYGCLASIIFCGYIVYDTDNLIKRHSYDEYIWAAVSLYLDVINLFLSLLTLLRAVDS

SEQ ID NO: 82119 - protein, 221 aa, Arabidopsis thaliana
  peptide (1)..(221): Ceres Seq. ID no. 12663488
MSESPELRWSFIRKVYSIISIQLLVTIAVAATVVKVHSISVFFTTTTAGFALYILLILTPLIVMCPLYYYHQKHPVNYLLLGIFTVALAFAVGLTCAFTSGKVILESVILTAVVVISLTLYTFWAAKRGHDFNFLGPFLFGAVIVLMVFSFIQILFPLGKISVMIYGCLASIIFCGYIVYDTDNLIKRHSYDEYIWAAVSLYLDVINLFLSLLTLLRAVDS

SEQ ID NO: 82120 - DNA, 1563 bp, Arabidopsis thaliana
  misc_feature (1)..(1563): Ceres Seq. ID no. 12663530
  misc_feature (1)..(1563): Ortholog of  Ceres SEQ ID NO 14316039 as cited in SEQ ID NO 62062
  misc_feature (1)..(1563): Ortholog of  Ceres SEQ ID NO 15176783 as cited in SEQ ID NO 65590
  misc_feature (1)..(1563): Ortholog of  Ceres SEQ ID NO 14308019 as cited in SEQ ID NO 65849
  misc_feature (1)..(1563): Ortholog of  Ceres SEQ ID NO 15169599 as cited in SEQ ID NO 66096
  misc_feature (1)..(1563): Ortholog of  Ceres SEQ ID NO 15170167 as cited in SEQ ID NO 66224
  misc_feature (1)..(1563): Ortholog of  Ceres SEQ ID NO 13502874 as cited in SEQ ID NO 66298
  misc_feature (1)..(1563): Ortholog of  Ceres SEQ ID NO 12614124 as cited in SEQ ID NO 68392
  misc_feature (1)..(1563): Ortholog of  Ceres SEQ ID NO 14307980 as cited in SEQ ID NO 69214
atgtctatgctttcaaatctcttccccgacaacgcaatcagtctcactccttacgcttacgcagtactcattctcacagctaccttctcgattctatggtacatcttcaaacgctcgccgcaaccgcctctaccacctggaccgcgagggctacctatagtcggaaaccttcccttccttgacccggatcttcacacctacttcacaaaactcgctcaaagtcatggtccaatcttcaaactcaatcttggctcaaaactaactgtcgtggtaaactctccatcgctggctagcgagatccttaaagatcaagatatcaatttctcaaaccatgacgtccctctcacggcccgagccgttacttatggtggtctggaccttgtatggttaccatacggtgccgaatggagaatgcttagaaaagtttgtgctgccaaactttttagccgcaaaactttggattccttttatgagcttcgacgcaaagaaatccgagaaagaacgagatgtttgtaccagaaaggtctagaaaaatcaccggtgaatgttggagagcagttgtttttgacgatgatgaatctaatgatgaatatgttatggggagggtcagtgaaagcagaggatatggagagtgttggaacagagtttaaaggagtgatttctgagataactaggcttttgggtgtgcctaatgtttctgattttttcccgatgctagctagattcgatcttcaagggcttgttaagaagatgcatttgtatgctcgagatctcgatgcgatactcgatcgagccatcgagcagatgcaacggctaagaagtagggatggtgatgatggtgaatgtaaagattttttacaacacttgatgaagttaagggaccaagaagctgactcggacgtccctattacaatgaaccatgtcaaagccgtactcatggatatggtagttggtggtacagagtcatcaaccaacacgatagagtttgtgatggctgaactaataagtaacccagagttgatgagaagagcgcaacaagagctagatgaagttgtgggcaaagacaacattgttgaagaatcacatatcactagccttccttacatattagccgttttgaaagaaacacttagactttatccaaccattcctttgctagtccctcaccgtccgtctgaaaccgcgctggtcggcggctacaccatcccaaaaaacactaagatcttcatcaatgtttggtctatccagagagacccaaatgtgtgggagtatccgactgagtttcgtcccgagaggtttcttgataagaagtcttgtgatttcactggaactgattatagctatcttccgtttggatctggcaggagaatttgcgcaggtatagcactcgccgagaggatgattttgtacactctcgcgactctattgcattcattcgattggacgattccggatggacacgtgttggatttggaagagaagtttgggattgtcttgaagctcaagacccctcttgttgccttgcccattccaaggttgtccaattccaatttttatttctaa

SEQ ID NO: 82121 - protein, 520 aa, Arabidopsis thaliana
  peptide (1)..(520): Ceres Seq. ID no. 12663531
MSMLSNLFPDNAISLTPYAYAVLILTATFSILWYIFKRSPQPPLPPGPRGLPIVGNLPFLDPDLHTYFTKLAQSHGPIFKLNLGSKLTVVVNSPSLASEILKDQDINFSNHDVPLTARAVTYGGLDLVWLPYGAEWRMLRKVCAAKLFSRKTLDSFYELRRKEIRERTRCLYQKGLEKSPVNVGEQLFLTMMNLMMNMLWGGSVKAEDMESVGTEFKGVISEITRLLGVPNVSDFFPMLARFDLQGLVKKMHLYARDLDAILDRAIEQMQRLRSRDGDDGECKDFLQHLMKLRDQEADSDVPITMNHVKAVLMDMVVGGTESSTNTIEFVMAELISNPELMRRAQQELDEVVGKDNIVEESHITSLPYILAVLKETLRLYPTIPLLVPHRPSETALVGGYTIPKNTKIFINVWSIQRDPNVWEYPTEFRPERFLDKKSCDFTGTDYSYLPFGSGRRICAGIALAERMILYTLATLLHSFDWTIPDGHVLDLEEKFGIVLKLKTPLVALPIPRLSNSNFYF

SEQ ID NO: 82122 - protein, 518 aa, Arabidopsis thaliana
  peptide (1)..(518): Ceres Seq. ID no. 12663532
MLSNLFPDNAISLTPYAYAVLILTATFSILWYIFKRSPQPPLPPGPRGLPIVGNLPFLDPDLHTYFTKLAQSHGPIFKLNLGSKLTVVVNSPSLASEILKDQDINFSNHDVPLTARAVTYGGLDLVWLPYGAEWRMLRKVCAAKLFSRKTLDSFYELRRKEIRERTRCLYQKGLEKSPVNVGEQLFLTMMNLMMNMLWGGSVKAEDMESVGTEFKGVISEITRLLGVPNVSDFFPMLARFDLQGLVKKMHLYARDLDAILDRAIEQMQRLRSRDGDDGECKDFLQHLMKLRDQEADSDVPITMNHVKAVLMDMVVGGTESSTNTIEFVMAELISNPELMRRAQQELDEVVGKDNIVEESHITSLPYILAVLKETLRLYPTIPLLVPHRPSETALVGGYTIPKNTKIFINVWSIQRDPNVWEYPTEFRPERFLDKKSCDFTGTDYSYLPFGSGRRICAGIALAERMILYTLATLLHSFDWTIPDGHVLDLEEKFGIVLKLKTPLVALPIPRLSNSNFYF

SEQ ID NO: 82123 - protein, 383 aa, Arabidopsis thaliana
  peptide (1)..(383): Ceres Seq. ID no. 12663533
MLRKVCAAKLFSRKTLDSFYELRRKEIRERTRCLYQKGLEKSPVNVGEQLFLTMMNLMMNMLWGGSVKAEDMESVGTEFKGVISEITRLLGVPNVSDFFPMLARFDLQGLVKKMHLYARDLDAILDRAIEQMQRLRSRDGDDGECKDFLQHLMKLRDQEADSDVPITMNHVKAVLMDMVVGGTESSTNTIEFVMAELISNPELMRRAQQELDEVVGKDNIVEESHITSLPYILAVLKETLRLYPTIPLLVPHRPSETALVGGYTIPKNTKIFINVWSIQRDPNVWEYPTEFRPERFLDKKSCDFTGTDYSYLPFGSGRRICAGIALAERMILYTLATLLHSFDWTIPDGHVLDLEEKFGIVLKLKTPLVALPIPRLSNSNFYF

SEQ ID NO: 82124 - DNA, 1739 bp, Arabidopsis thaliana
  misc_feature (1)..(1739): Ceres Seq. ID no. 12663534
  misc_feature (1)..(1739): Ortholog of  Ceres SEQ ID NO 15170167 as cited in SEQ ID NO 66224
  misc_feature (1)..(1739): Ortholog of  Ceres SEQ ID NO 13502874 as cited in SEQ ID NO 66298
  misc_feature (1)..(1739): Ortholog of  Ceres SEQ ID NO 12614124 as cited in SEQ ID NO 68392
  misc_feature (1)..(1739): Ortholog of  Ceres SEQ ID NO 14307980 as cited in SEQ ID NO 69214
ctacaaaacagctgtgaataatgtctcccatatcaaatctcttcgctggcaacacaatcaatctcactccttacgcaattctcattctcattgctatcttctcgatactatggtacctcttcaaacgctcgccgcaaccgcatctaccccctggaccgcgagggctacctattgtcggaaaccttccctttcttgacccggaccttcacacctacttcacaaaacttgctgaaagttatggtccaatcttcaaactccaatcttggctcaaaactaactgtcgtggtcaacactccatcgctggctcgagagatcttgaaagatcaagatatcaatttctcaaaccatgacgtccctctcacagcccgagccgttacctatggcggtctcgaccttgtctggttaccatacggtgctgaatggaggatgcttaggaaagtttgcgttcttaagcttcttagccacagaacgttgaattctttctacgagcttcgacgtaaagaaatccgggaaagaacgagatatttgtaccagaaaggtcaagaagaatcaccggtgaatgttggagaacaggtctttttgacgatgatgaatctaactatgaatatgttatggggaggttctgtgaaagcagaggaaatggagagtgttggaacagagtttaaagaagtgatttctgaaattactaggcttttgggagagcctaatgtttctgactttttcccacggttagcgagattcgatcttcaaggacttgtgaagaagatgcatgtgtgtgctcgggagctcgatgccatacttgatcgagccatcgagcagatgcaactactaagaactagggatggtgatgatggtgaatgtaaagactttttgcaacatttgatgaagttaaaggaccaagaagctgactcggaggttcccattacggttaaccatgtcaaagccgtactcgtggatttggtggttggtggtacggatacatcgaccaacacaatagagtttgcaatggccgaactaataagaaagccggagttgatgaagagagcacaacaagagctagacgaagttgtaggcaaagataacattattgaagaatcacacatcactagattgcctttcatatcagccataatgaaagaaacacttagactttatccaaccattcccctgctagtccctcaccgtccgtctgaaaccgcgctggtcggcggctacaccatcccaaaaaacactaagatcttcatcaatgtttggtctatccagagagacccaaatgtgtgggagtatccgactgagtttcgtcccgagaggtttcttgataagaagtcttgtgatttcactggaactgattatagctatcttccgtttggatctggcaggagaatttgcgcaggtatagcactcgccgagaggatgattttgtacactctcgcgacgctattgcattcgtttgattggaagataccggaaggccacattttggatttgaaagagaagtttgggattgtcttgaagctcaagtcccctcttgttgccttgcccgttccgaggttgtccaattcgaatctttatttataaacgctatactcgttacttttccttaaaaaaaggaaaaagatttttatattgaacatttttatgatagacaaaaataacgcctggttttatttagttttttcttttctgaagtttttaatcatcatataagttagtaatgagaatcatacatcggtttctat

SEQ ID NO: 82125 - protein, 446 aa, Arabidopsis thaliana
  peptide (1)..(446): Ceres Seq. ID no. 12663535
MVQSSNSNLGSKLTVVVNTPSLAREILKDQDINFSNHDVPLTARAVTYGGLDLVWLPYGAEWRMLRKVCVLKLLSHRTLNSFYELRRKEIRERTRYLYQKGQEESPVNVGEQVFLTMMNLTMNMLWGGSVKAEEMESVGTEFKEVISEITRLLGEPNVSDFFPRLARFDLQGLVKKMHVCARELDAILDRAIEQMQLLRTRDGDDGECKDFLQHLMKLKDQEADSEVPITVNHVKAVLVDLVVGGTDTSTNTIEFAMAELIRKPELMKRAQQELDEVVGKDNIIEESHITRLPFISAIMKETLRLYPTIPLLVPHRPSETALVGGYTIPKNTKIFINVWSIQRDPNVWEYPTEFRPERFLDKKSCDFTGTDYSYLPFGSGRRICAGIALAERMILYTLATLLHSFDWKIPEGHILDLKEKFGIVLKLKSPLVALPVPRLSNSNLYL

SEQ ID NO: 82126 - protein, 383 aa, Arabidopsis thaliana
  peptide (1)..(383): Ceres Seq. ID no. 12663536
MLRKVCVLKLLSHRTLNSFYELRRKEIRERTRYLYQKGQEESPVNVGEQVFLTMMNLTMNMLWGGSVKAEEMESVGTEFKEVISEITRLLGEPNVSDFFPRLARFDLQGLVKKMHVCARELDAILDRAIEQMQLLRTRDGDDGECKDFLQHLMKLKDQEADSEVPITVNHVKAVLVDLVVGGTDTSTNTIEFAMAELIRKPELMKRAQQELDEVVGKDNIIEESHITRLPFISAIMKETLRLYPTIPLLVPHRPSETALVGGYTIPKNTKIFINVWSIQRDPNVWEYPTEFRPERFLDKKSCDFTGTDYSYLPFGSGRRICAGIALAERMILYTLATLLHSFDWKIPEGHILDLKEKFGIVLKLKSPLVALPVPRLSNSNLYL

SEQ ID NO: 82127 - protein, 330 aa, Arabidopsis thaliana
  peptide (1)..(330): Ceres Seq. ID no. 12663537
MMNLTMNMLWGGSVKAEEMESVGTEFKEVISEITRLLGEPNVSDFFPRLARFDLQGLVKKMHVCARELDAILDRAIEQMQLLRTRDGDDGECKDFLQHLMKLKDQEADSEVPITVNHVKAVLVDLVVGGTDTSTNTIEFAMAELIRKPELMKRAQQELDEVVGKDNIIEESHITRLPFISAIMKETLRLYPTIPLLVPHRPSETALVGGYTIPKNTKIFINVWSIQRDPNVWEYPTEFRPERFLDKKSCDFTGTDYSYLPFGSGRRICAGIALAERMILYTLATLLHSFDWKIPEGHILDLKEKFGIVLKLKSPLVALPVPRLSNSNLYL

SEQ ID NO: 82128 - DNA, 1853 bp, Arabidopsis thaliana
  misc_feature (1)..(1853): Ceres Seq. ID no. 12663538
  misc_feature (1)..(1853): Ortholog of  Ceres SEQ ID NO 15170167 as cited in SEQ ID NO 66224
  misc_feature (1)..(1853): Ortholog of  Ceres SEQ ID NO 13502874 as cited in SEQ ID NO 66298
  misc_feature (1)..(1853): Ortholog of  Ceres SEQ ID NO 12614124 as cited in SEQ ID NO 68392
  misc_feature (1)..(1853): Ortholog of  Ceres SEQ ID NO 14307980 as cited in SEQ ID NO 69214
acaaagagaaaaacattggaacaattaaaagaaacaaaatttccaaattgattcttgtgttttctacataaacaagaaccaatgacagatattttcactttctttacgatccaaaatcgtaatgaccacttcgactttgttttagctacaatagtcatatcctctgttttttggtatatatgggtttacgtcaaatcgaaacgactgtttccaccgttaccaccgggacctcggggtcttcccatcgtcggaaacctcccattcctccacccggagcttcacacctactttcacagtctagctcaaaaacacggacccgttttcaaactatggctcggcgcaaaactaaccatcgtgataacctcttccgaagcaacgcgggatattctaagaactaatgacgtcatctttgcgaacgacgacgttcccgtcgcaggctcactcagcacgtatggtggcgtagacattgtctggtcaccgtacggaccagaatggccaatgctaagaaaaatctgcattaacaaaatgttaagcaacgccacgttggattcaaattcttttagtgcacttcgccgccaggagaccaggcgaacagtccggtatttggcagaccgggctcgggccgggttggcggttaacgttggagaacaaatatttgtcacgatattaaatgtggtgactcagatgttgtggggagaaactgttgcggacgacgaggagagagagaaagttggagctgaatttttggaattgattacggaaataattgatgttgtgggaaagccaaatgtctctgattttttcccggttttgagccggtttgaccttcagggtttggctaagcgtgtgcgtagatcggctcagaggatggaccggatgttcgaccggattataagtcaacggatgggaatggataagggaagtaaagggaacggtggagattttttgatggttttgttgaatgctaaggatgaagatgaaaacatgtccatgaaccatgtcaaggccttgctaatggatatggtgcttggtggtacagacacatctttgaacacaatagagttcgcaatggcagagcttataaacaaactggagatcatgaagagagctcaacaagagcttgacaaggttgtggggaaaaacaacatcgtcgaagaaaaacatatcactaaacttccatacattctctccattatgaaagaaaccctaaggcttcacccagctcttcctcttctaatacctcgctgcccatctgaaaccacggttataggtggctacacaattcctaatgattctaaggttttcatcaatgtgtgggcgattcatagaaatccgaacgtatgggagaatccgttggagtttaatcctgataggtttcttgataaaggttacgactttagtggtaatgactatagttatttcccgtttggatctggccggagaatttgtgcgggaatggccatggccgagaaagttgttctttacaatcttgcaacgcttttgcattcttttgattggagaattggggaaggagagaaagtggagctcgaggagaagtttgggattttattgaagttgaagaatccacttgttgcaacacccgtgctaagattgtcggatccaaacctttttctttaacagtttaagtgaaaggagaaaagtaattgctctttttgtttatgtgaacttatataatgttcaatgtgacggtgtcttatctaatgccgtattatgtattgttacatatatgatgattccacctatattttagtactatgcatgatgtaatatgtgttttagacatggtcgcatggactatatatgtccacatatccaaatccaagtgatttcat

SEQ ID NO: 82129 - protein, 518 aa, Arabidopsis thaliana
  peptide (1)..(518): Ceres Seq. ID no. 12663539
MTDIFTFFTIQNRNDHFDFVLATIVISSVFWYIWVYVKSKRLFPPLPPGPRGLPIVGNLPFLHPELHTYFHSLAQKHGPVFKLWLGAKLTIVITSSEATRDILRTNDVIFANDDVPVAGSLSTYGGVDIVWSPYGPEWPMLRKICINKMLSNATLDSNSFSALRRQETRRTVRYLADRARAGLAVNVGEQIFVTILNVVTQMLWGETVADDEEREKVGAEFLELITEIIDVVGKPNVSDFFPVLSRFDLQGLAKRVRRSAQRMDRMFDRIISQRMGMDKGSKGNGGDFLMVLLNAKDEDENMSMNHVKALLMDMVLGGTDTSLNTIEFAMAELINKLEIMKRAQQELDKVVGKNNIVEEKHITKLPYILSIMKETLRLHPALPLLIPRCPSETTVIGGYTIPNDSKVFINVWAIHRNPNVWENPLEFNPDRFLDKGYDFSGNDYSYFPFGSGRRICAGMAMAEKVVLYNLATLLHSFDWRIGEGEKVELEEKFGILLKLKNPLVATPVLRLSDPNLFL

SEQ ID NO: 82130 - protein, 379 aa, Arabidopsis thaliana
  peptide (1)..(379): Ceres Seq. ID no. 12663540
MLRKICINKMLSNATLDSNSFSALRRQETRRTVRYLADRARAGLAVNVGEQIFVTILNVVTQMLWGETVADDEEREKVGAEFLELITEIIDVVGKPNVSDFFPVLSRFDLQGLAKRVRRSAQRMDRMFDRIISQRMGMDKGSKGNGGDFLMVLLNAKDEDENMSMNHVKALLMDMVLGGTDTSLNTIEFAMAELINKLEIMKRAQQELDKVVGKNNIVEEKHITKLPYILSIMKETLRLHPALPLLIPRCPSETTVIGGYTIPNDSKVFINVWAIHRNPNVWENPLEFNPDRFLDKGYDFSGNDYSYFPFGSGRRICAGMAMAEKVVLYNLATLLHSFDWRIGEGEKVELEEKFGILLKLKNPLVATPVLRLSDPNLFL

SEQ ID NO: 82131 - protein, 370 aa, Arabidopsis thaliana
  peptide (1)..(370): Ceres Seq. ID no. 12663541
MLSNATLDSNSFSALRRQETRRTVRYLADRARAGLAVNVGEQIFVTILNVVTQMLWGETVADDEEREKVGAEFLELITEIIDVVGKPNVSDFFPVLSRFDLQGLAKRVRRSAQRMDRMFDRIISQRMGMDKGSKGNGGDFLMVLLNAKDEDENMSMNHVKALLMDMVLGGTDTSLNTIEFAMAELINKLEIMKRAQQELDKVVGKNNIVEEKHITKLPYILSIMKETLRLHPALPLLIPRCPSETTVIGGYTIPNDSKVFINVWAIHRNPNVWENPLEFNPDRFLDKGYDFSGNDYSYFPFGSGRRICAGMAMAEKVVLYNLATLLHSFDWRIGEGEKVELEEKFGILLKLKNPLVATPVLRLSDPNLFL

SEQ ID NO: 82132 - DNA, 828 bp, Arabidopsis thaliana
  misc_feature (1)..(828): Ceres Seq. ID no. 12663560
  misc_feature (1)..(828): Ortholog of  Ceres SEQ ID NO 13598143 as cited in SEQ ID NO 60554
  misc_feature (1)..(828): Ortholog of  Ceres SEQ ID NO 13598157 as cited in SEQ ID NO 61570
  misc_feature (1)..(828): Ortholog of  Ceres SEQ ID NO 15173774 as cited in SEQ ID NO 61771
  misc_feature (1)..(828): Ortholog of  Ceres SEQ ID NO 15175549 as cited in SEQ ID NO 0
atctctcactctctcaaagacactgaataaatccttaaaacaaacttttgaaagaaaaaaatggcttcaaagaactcagcctctattgctcttttcttcgcccttaacatcatattcttcaccttaaccgctgcaacagattgtggttgcaacccaagtcctaagcacaagcctgtcccaagtcctaaacccaagccggtcccaagtcccaaacccaagccggtcccaagtccttcagtaccaagtccttcggtcccaagtcctaaccctaggccggtcacgcctccgagaacccctggctcatctggaaactgtcctatcgatgctctcagactcggtgtatgtgcgaacgttttaagcagtctactcaacattcaattgggtcagccatcagctcaaccatgttgctcgctcatccaaggtttggttgacctcgacgctgccatttgtctttgcactgcgcttagggctaacgttcttggtatcaaccttaacgtcccgatatctctcagtgttcttctcaacgtttgtaacagaaaggttccgtctggcttccaatgtgcttgaaggatatcagctatgcatacgatgtgatgcccgtgcacaaatatcttcttcgaaattgttacagtatgaataaatgcatgtaagctatagagtttatgttttaaattttgaatttgttaaagtgaaataaccaatgtgtgagagtgagactttcttagttttttttttccgtcaacgttcctgtattccggtcttgtatgcttttgtagcaatctattactattttcaacccgtttaataaaagagattttgtactcattt

SEQ ID NO: 82133 - protein, 168 aa, Arabidopsis thaliana
  peptide (1)..(168): Ceres Seq. ID no. 12663561
MASKNSASIALFFALNIIFFTLTAATDCGCNPSPKHKPVPSPKPKPVPSPKPKPVPSPSVPSPSVPSPNPRPVTPPRTPGSSGNCPIDALRLGVCANVLSSLLNIQLGQPSAQPCCSLIQGLVDLDAAICLCTALRANVLGINLNVPISLSVLLNVCNRKVPSGFQCA

SEQ ID NO: 82134 - DNA, 771 bp, Arabidopsis thaliana
  misc_feature (1)..(771): Ceres Seq. ID no. 12663562
  misc_feature (1)..(771): Ortholog of  Ceres SEQ ID NO 13599506 as cited in SEQ ID NO 334
  misc_feature (1)..(771): Ortholog of  Ceres SEQ ID NO 13598143 as cited in SEQ ID NO 60554
  misc_feature (1)..(771): Ortholog of  Ceres SEQ ID NO 13598157 as cited in SEQ ID NO 61570
  misc_feature (1)..(771): Ortholog of  Ceres SEQ ID NO 15175549 as cited in SEQ ID NO 0
atctctcactcaaacattctccataacaatggcttcaaagaactcagcctctcttgctcttttctttgccctcaacatcctttttttcaccttaaccgctggtactaattgtagatgcaacccgagtcctaagcctaggccgctcccaaatcctaaggtcccaagtcctaaggtcccaactccttcggtcccaagtccatatgttccaactccttcggtcccaagtccttccgtaccaactccttcggtcccaagtccttccgtaccaagtcctaaccctacgccagtcattcctccgagaacccctggttcatccggaaactgtcctatcgatgctctcagactcggtgtatgtgcgaatgtgctaagcggtctacttaacgtgcagttgggacagccatcacctcaaccatgctgctcactcattcaaggtttggttgaccttgacgctgcggtttgcctatgcactgctcttagggctaacgttcttggcatcaaccttaacgttcctatatctctcagtgttcttctcaacgtttgcaacagaaggcttccgtctaatttccaatgtgcttgagggatatcaattacacatacgacgcacacagtttactctttaaaataatcacagtttgaataattgcatgcatgtatgcaagttaagggttcaatgtttcaatcttttgtttaagtgtgaggcgttatctttttccgcgcatatatgtttttgttgtaacttttattgtttaaatgaaagacgtttcatagtcc

SEQ ID NO: 82135 - protein, 191 aa, Arabidopsis thaliana
  peptide (1)..(191): Ceres Seq. ID no. 12663563
SLTQTFSITMASKNSASLALFFALNILFFTLTAGTNCRCNPSPKPRPLPNPKVPSPKVPTPSVPSPYVPTPSVPSPSVPTPSVPSPSVPSPNPTPVIPPRTPGSSGNCPIDALRLGVCANVLSGLLNVQLGQPSPQPCCSLIQGLVDLDAAVCLCTALRANVLGINLNVPISLSVLLNVCNRRLPSNFQCA

SEQ ID NO: 82136 - protein, 182 aa, Arabidopsis thaliana
  peptide (1)..(182): Ceres Seq. ID no. 12663564
MASKNSASLALFFALNILFFTLTAGTNCRCNPSPKPRPLPNPKVPSPKVPTPSVPSPYVPTPSVPSPSVPTPSVPSPSVPSPNPTPVIPPRTPGSSGNCPIDALRLGVCANVLSGLLNVQLGQPSPQPCCSLIQGLVDLDAAVCLCTALRANVLGINLNVPISLSVLLNVCNRRLPSNFQCA

SEQ ID NO: 82137 - DNA, 1686 bp, Arabidopsis thaliana
  misc_feature (1)..(1686): Ceres Seq. ID no. 12663575
  misc_feature (1)..(1686): Ortholog of  Ceres SEQ ID NO 14308413 as cited in SEQ ID NO 55196
atgtcaggaagatctgcattttccagaaccggaggtttccgacctgagaatctagggcaaaacgcagtatccttaatcggaagcataggcttctctgtactcgtaatcggagtcgtagttttcaccattatcgctgctacatatgaaccagaagatccactatttcacccatctgacaaaatcacaactttcctcacatccaattcaaacgctactcttaaatccgacgacagtattgtcaaaaccggtgaagatttcatggcggcgaaccaaaccgcgtttggcggattcatcaatatagctgatgttgaaacatctgagaatgactctgatggtaatcaattggattgtgataccaatatcccaattgattgcaaagatcctgaagtttttcacttgatgatgaaagctactatggagaagtttaaagacagtcacttttataagtttggtaaacctgtgattgtggaaggtagtagtagttcttgtgatatggcttggcgttatagacctaaggatggtaaagcggctgcgttttataaggattataggaggtttgtgattgaaaagtctgggaattgtagtgttagtgtgatggggattggtgagtatcattcgggtgtgaatgcgaggaagcggaagaggcccgggtttcgaaattcgagtggtggtaaggttgatgatttcgcattgcctgtagttggtgaagcagtgaatgattcacttcctgttgttgagtctgaaaatgtgtttaaagaaggtcattacttggtttattctggtggaggagataggtgtaagagtatgaaccatttcttgtggagtttcttgtgtgctttaggggaagctcagtatttgaatagaacattagtgatggatttgactctttgtttgtcttctgtttatacattgtctggtcaaaacgaggaagggaaggactttaggttttactttgatttcgagcatttgaaagaggctgcttctatgttagaccaggtgcagttttgggctgattgggggaaatggtataagaagaatggattaaagcttcatcttgtggaagattttcgggtcacaccgatgaagcttgttgatgtgaaggacacgttgataatgaggaagttcgggacagtagaaccagataactattggtatagagtatgcgaaggggagacagaatctgttgtgcaaaggccttggaatctattgtggaaatctaaacgactgatggagattgtttctgcgattgcttcgaggttaaactgggattatgatgctattcacattgagagaggagacaaggcgagaaacaaggaagtttggcctaatcttgaaaaggatacttcaccaagctccattttatctaccctccaggacaaaatcgaacaaggaaggaatctttatattgcaacaaatgaaccagagttatctttctttaaccccttgaaagacaagtacaaaccccattttctggatgagtttaaggatctctgggacgagagcagcgaatggtattcagagacaacgaagcttaatggaggaaacccagttgagtttgacggttacatgagagcgtctgttgatacagaggtgttcttgagagggaagaagcagattgaaacattcaatgatcttaccaatgactgtagagatggaatcggcacttgcaacgtagcagcaagctga

SEQ ID NO: 82138 - protein, 561 aa, Arabidopsis thaliana
  peptide (1)..(561): Ceres Seq. ID no. 12663576
MSGRSAFSRTGGFRPENLGQNAVSLIGSIGFSVLVIGVVVFTIIAATYEPEDPLFHPSDKITTFLTSNSNATLKSDDSIVKTGEDFMAANQTAFGGFINIADVETSENDSDGNQLDCDTNIPIDCKDPEVFHLMMKATMEKFKDSHFYKFGKPVIVEGSSSSCDMAWRYRPKDGKAAAFYKDYRRFVIEKSGNCSVSVMGIGEYHSGVNARKRKRPGFRNSSGGKVDDFALPVVGEAVNDSLPVVESENVFKEGHYLVYSGGGDRCKSMNHFLWSFLCALGEAQYLNRTLVMDLTLCLSSVYTLSGQNEEGKDFRFYFDFEHLKEAASMLDQVQFWADWGKWYKKNGLKLHLVEDFRVTPMKLVDVKDTLIMRKFGTVEPDNYWYRVCEGETESVVQRPWNLLWKSKRLMEIVSAIASRLNWDYDAIHIERGDKARNKEVWPNLEKDTSPSSILSTLQDKIEQGRNLYIATNEPELSFFNPLKDKYKPHFLDEFKDLWDESSEWYSETTKLNGGNPVEFDGYMRASVDTEVFLRGKKQIETFNDLTNDCRDGIGTCNVAAS

SEQ ID NO: 82139 - protein, 475 aa, Arabidopsis thaliana
  peptide (1)..(475): Ceres Seq. ID no. 12663577
MAANQTAFGGFINIADVETSENDSDGNQLDCDTNIPIDCKDPEVFHLMMKATMEKFKDSHFYKFGKPVIVEGSSSSCDMAWRYRPKDGKAAAFYKDYRRFVIEKSGNCSVSVMGIGEYHSGVNARKRKRPGFRNSSGGKVDDFALPVVGEAVNDSLPVVESENVFKEGHYLVYSGGGDRCKSMNHFLWSFLCALGEAQYLNRTLVMDLTLCLSSVYTLSGQNEEGKDFRFYFDFEHLKEAASMLDQVQFWADWGKWYKKNGLKLHLVEDFRVTPMKLVDVKDTLIMRKFGTVEPDNYWYRVCEGETESVVQRPWNLLWKSKRLMEIVSAIASRLNWDYDAIHIERGDKARNKEVWPNLEKDTSPSSILSTLQDKIEQGRNLYIATNEPELSFFNPLKDKYKPHFLDEFKDLWDESSEWYSETTKLNGGNPVEFDGYMRASVDTEVFLRGKKQIETFNDLTNDCRDGIGTCNVAAS

SEQ ID NO: 82140 - protein, 428 aa, Arabidopsis thaliana
  peptide (1)..(428): Ceres Seq. ID no. 12663578
MMKATMEKFKDSHFYKFGKPVIVEGSSSSCDMAWRYRPKDGKAAAFYKDYRRFVIEKSGNCSVSVMGIGEYHSGVNARKRKRPGFRNSSGGKVDDFALPVVGEAVNDSLPVVESENVFKEGHYLVYSGGGDRCKSMNHFLWSFLCALGEAQYLNRTLVMDLTLCLSSVYTLSGQNEEGKDFRFYFDFEHLKEAASMLDQVQFWADWGKWYKKNGLKLHLVEDFRVTPMKLVDVKDTLIMRKFGTVEPDNYWYRVCEGETESVVQRPWNLLWKSKRLMEIVSAIASRLNWDYDAIHIERGDKARNKEVWPNLEKDTSPSSILSTLQDKIEQGRNLYIATNEPELSFFNPLKDKYKPHFLDEFKDLWDESSEWYSETTKLNGGNPVEFDGYMRASVDTEVFLRGKKQIETFNDLTNDCRDGIGTCNVAAS

SEQ ID NO: 82141 - DNA, 696 bp, Arabidopsis thaliana
  misc_feature (1)..(696): Ceres Seq. ID no. 12663591
  misc_feature (1)..(696): Ortholog of  Ceres SEQ ID NO 12633896 as cited in SEQ ID NO 0
atggcttcttcttcttcgttggcttcttcaaccaagcttgtattctttgcttgcctcctcctattcacattctcatcacacaatctcgtggctggagaatccgacaaagtaaagctcaatctttactatgaatcactttgtccttcttgtcagaatttcatcgtccatcatctaggcaaaatctttaacactgatctccacacaatcaccgatctcaagctcattccattcggtaacgcccatgtctccgatgatcttaccgtcacttgccagcatggtgaagaagaatgcaaattaaacgcccttgaagcttgcgccataagaacttggcctaatcagagattgcactacaagttcattcggtgcgttgaaactaacacgaatgcttgggaatcttgtgttaagaagtatggaggtgaaaaagcgataaatgattgttacaatggtgatctctctaaagagctgatacttgggtatgcaaaccagacattgagtttgaaaccggagcataaatacgtaccatggatgacactcaacggcgaaccactctacgaaaatattggtgattttgtggacttagtctgcaaagcgtataaaggaaaggctgctctccctaaactctgttattcctctgtcttgtctcagaggacaatgatgcttgaattctcctatgttgatgaagctatcaatcactaa

SEQ ID NO: 82142 - protein, 231 aa, Arabidopsis thaliana
  peptide (1)..(231): Ceres Seq. ID no. 12663592
MASSSSLASSTKLVFFACLLLFTFSSHNLVAGESDKVKLNLYYESLCPSCQNFIVHHLGKIFNTDLHTITDLKLIPFGNAHVSDDLTVTCQHGEEECKLNALEACAIRTWPNQRLHYKFIRCVETNTNAWESCVKKYGGEKAINDCYNGDLSKELILGYANQTLSLKPEHKYVPWMTLNGEPLYENIGDFVDLVCKAYKGKAALPKLCYSSVLSQRTMMLEFSYVDEAINH

SEQ ID NO: 82143 - DNA, 747 bp, Arabidopsis thaliana
  misc_feature (1)..(747): Ceres Seq. ID no. 12663593
  misc_feature (1)..(747): Ortholog of  Ceres SEQ ID NO 13655934 as cited in SEQ ID NO 65278
  misc_feature (1)..(747): Ortholog of  Ceres SEQ ID NO 15180098 as cited in SEQ ID NO 0
atgtccgatcaccagaaaattcatccggtgagcgaccccgaagcgccgccacatccaacggctccccttgttccacgtggttcctcaagatcggaacatggtgatcctaccaagacacagcaagcagcaccgttggatcctccgagggagaagaaaggatcaagaagttgttggtgcagatgcgtgtgctacacgcttcttgtcctctttctccttattgtcatcgtaggagcgatcgttggtatactctaccttgtatttagaccaaaatttccggattacaatattgaccggttacagctaacccggtttcaactaaaccaagacttgagtttatccaccgcatttaacgttaccataaccgcgaaaaatcccaacgagaaaattggaatttactatgaagatggaagcaagattagtgtcttgtacatgcaaaccagaatcagtaatgggtcgttgccaaaattctaccaaggacatgagaatactactattatattggtagaaatgactggttttactcaaaatgcaacaagtttaatgacgacattgcaagagcaacaacggttaacaggaagtataccgttgcggattagagttacccaaccggttcggatcaaactcgggaaattaaagttgatgaaagtaagatttttggttaggtgtggtgtatccgttgatagcttggctgctaacagtgtgattagggttagaagtagtaactgcaaatacaggtttagactataa

SEQ ID NO: 82144 - protein, 248 aa, Arabidopsis thaliana
  peptide (1)..(248): Ceres Seq. ID no. 12663594
MSDHQKIHPVSDPEAPPHPTAPLVPRGSSRSEHGDPTKTQQAAPLDPPREKKGSRSCWCRCVCYTLLVLFLLIVIVGAIVGILYLVFRPKFPDYNIDRLQLTRFQLNQDLSLSTAFNVTITAKNPNEKIGIYYEDGSKISVLYMQTRISNGSLPKFYQGHENTTIILVEMTGFTQNATSLMTTLQEQQRLTGSIPLRIRVTQPVRIKLGKLKLMKVRFLVRCGVSVDSLAANSVIRVRSSNCKYRFRL

SEQ ID NO: 82145 - DNA, 513 bp, Arabidopsis thaliana
  misc_feature (1)..(513): Ceres Seq. ID no. 12663602
  misc_feature (1)..(513): Ortholog of  Ceres SEQ ID NO 13598422 as cited in SEQ ID NO 68856
atggatcagatactgaacaaagttggctcttactggttagggcaaaaggcaaacaaagagttcaattccgtcggtgacgatttcaattcattgtctagcagtattgaaggaggtaccaagtggttagtcaacaaactcaaaggaaaaatgcagaagccattacctgaattgttgaaggaatttggtctaccagttgggatcttcccacaggatgctacaaactatgaattcaacgaagagacgggtaaattgactgtattcatccctgagacatgtgaagttgggtacagagattcatcggttctgcggttttcaactacggtaacgggttacttggagaaagggaagctagcagaagtggaaggcatgaagacaaaggttatgatatgggtgaaagtgacttgtatctcagctgattcatcaaaggtatatttcacagccgggattaagaaaagcagaagcagagatgcttatgaggtaatacgacctggtgttggtgttgataaattctaa

SEQ ID NO: 82146 - protein, 170 aa, Arabidopsis thaliana
  peptide (1)..(170): Ceres Seq. ID no. 12663603
MDQILNKVGSYWLGQKANKEFNSVGDDFNSLSSSIEGGTKWLVNKLKGKMQKPLPELLKEFGLPVGIFPQDATNYEFNEETGKLTVFIPETCEVGYRDSSVLRFSTTVTGYLEKGKLAEVEGMKTKVMIWVKVTCISADSSKVYFTAGIKKSRSRDAYEVIRPGVGVDKF

SEQ ID NO: 82147 - protein, 121 aa, Arabidopsis thaliana
  peptide (1)..(121): Ceres Seq. ID no. 12663604
MQKPLPELLKEFGLPVGIFPQDATNYEFNEETGKLTVFIPETCEVGYRDSSVLRFSTTVTGYLEKGKLAEVEGMKTKVMIWVKVTCISADSSKVYFTAGIKKSRSRDAYEVIRPGVGVDKF

SEQ ID NO: 82148 - DNA, 1966 bp, Arabidopsis thaliana
  misc_feature (1)..(1966): Ceres Seq. ID no. 12663682
  misc_feature (1)..(1966): Ortholog of  Ceres SEQ ID NO 13597407 as cited in SEQ ID NO 64106
aacaaaacttggtttaatgaaatttgacttgatcttgtttaaaaaaacgtctcacgtccacacgttagcttttccaatccaaaacccctaaagagtagaaaaccaaaataaccatttttaattcccagcctctttttatacgtagtctaaattgacaaacacatcattcgctctctttctcttctttctctagctctcttggttttttgctaaaaacagagcattttctctctagctctcactgtttctttaccataagtttcgtcatattagtacatgcaagtgtaagggatggtgatggaggaaggaagaagcatagaagaagggcttttgcagctcaagaacaaaaacgacgattcagagtgtcgtattactgcttgtgttatccttagcacttttgtcgccgtttgtggctccttctcttttggtgttgctactggttacacttcaggtgctgagacaggagttatgaaggacttggatctttctatcgcgcaattttcagcttttggctcattcgccactttaggagctgcaattggtgcactgttctgcggtaatctggcaatggtcattggcagaagagggacaatgtgggtctccgatttcctatgcatcactggttggctctccatcgcttttgctaaggaagtagtgttgctgaacttcggaagaatcatttcagggataggtttcggcttgacgagctatgtggtacctgtctacatagcagaaattacgccaaaacatgttcgtggtacatttacgttttcaaaccagcttcttcaaaacgctggactcgccatgatttatttctgtgggaatttcatcacttggaggacgttggctttattaggtgctttaccatgcttcattcaagtaatcggtttattcttcgtgccagagtctccaagatggctggccaaagttggctccgataaagaactagaaaattcactgtttcggcttagaggaagagatgctgatatttcacgtgaagcctcagaaattcaagtaatgaccaaaatggtggaaaatgattcaaagtcgagtttttcagatttgttccagagaaagtatagatacaccctcgtggtaggaatcgggctaatgttgatacaacaattctcaggaagtgctgctgtaatctcttatgcaagtaccatttttagaaaagctggtttttcggtggccattggaacgacgatgctaggtatcttcgtgattccaaaagccatgattggcctcattcttgtcgataaatggggcagacgtcctctcctgatgacttcagcgtttgggatgagcatgacttgcatgctacttggggtcgccttcacattacagaaaatgcaattgctttcggaactaactccaatattatcgtttatatgcgtaatgatgtatattgcaacttatgcaataggcttgggaggtctaccttgggtaattatgtcggagatatttccaataaatataaaagtaactgcaggaagtatagttacgttagtctcattttcaagtagttcaatcgtcacttacgctttcaactttctgttcgaatggagcactcaaggaacgtttttcatattcgcgggtatcggtggagcagcgttgctttttatatggttgctcgttccagaaacgaaaggattatcactcgaagaaatacaagtttcacttattcatcagcccgatgaaagaaatcaaacttaatttgaattattttattttattataaaaatgatcaaattcagtttatggtgttatatttgtttatttacaaacaaggatttttttttttcattatgtaattactactttatttttctgggtaattagccccatttttatgatgtatatttacgagatgtaaaacttggcctacgtacatgtgtattttatctctaaaattgcaaatgtaatatttttcggacatatattaaagaagagattgatttctagt

SEQ ID NO: 82149 - protein, 474 aa, Arabidopsis thaliana
  peptide (1)..(474): Ceres Seq. ID no. 12663683
MVMEEGRSIEEGLLQLKNKNDDSECRITACVILSTFVAVCGSFSFGVATGYTSGAETGVMKDLDLSIAQFSAFGSFATLGAAIGALFCGNLAMVIGRRGTMWVSDFLCITGWLSIAFAKEVVLLNFGRIISGIGFGLTSYVVPVYIAEITPKHVRGTFTFSNQLLQNAGLAMIYFCGNFITWRTLALLGALPCFIQVIGLFFVPESPRWLAKVGSDKELENSLFRLRGRDADISREASEIQVMTKMVENDSKSSFSDLFQRKYRYTLVVGIGLMLIQQFSGSAAVISYASTIFRKAGFSVAIGTTMLGIFVIPKAMIGLILVDKWGRRPLLMTSAFGMSMTCMLLGVAFTLQKMQLLSELTPILSFICVMMYIATYAIGLGGLPWVIMSEIFPINIKVTAGSIVTLVSFSSSSIVTYAFNFLFEWSTQGTFFIFAGIGGAALLFIWLLVPETKGLSLEEIQVSLIHQPDERNQT

SEQ ID NO: 82150 - protein, 472 aa, Arabidopsis thaliana
  peptide (1)..(472): Ceres Seq. ID no. 12663684
MEEGRSIEEGLLQLKNKNDDSECRITACVILSTFVAVCGSFSFGVATGYTSGAETGVMKDLDLSIAQFSAFGSFATLGAAIGALFCGNLAMVIGRRGTMWVSDFLCITGWLSIAFAKEVVLLNFGRIISGIGFGLTSYVVPVYIAEITPKHVRGTFTFSNQLLQNAGLAMIYFCGNFITWRTLALLGALPCFIQVIGLFFVPESPRWLAKVGSDKELENSLFRLRGRDADISREASEIQVMTKMVENDSKSSFSDLFQRKYRYTLVVGIGLMLIQQFSGSAAVISYASTIFRKAGFSVAIGTTMLGIFVIPKAMIGLILVDKWGRRPLLMTSAFGMSMTCMLLGVAFTLQKMQLLSELTPILSFICVMMYIATYAIGLGGLPWVIMSEIFPINIKVTAGSIVTLVSFSSSSIVTYAFNFLFEWSTQGTFFIFAGIGGAALLFIWLLVPETKGLSLEEIQVSLIHQPDERNQT

SEQ ID NO: 82151 - protein, 415 aa, Arabidopsis thaliana
  peptide (1)..(415): Ceres Seq. ID no. 12663685
MKDLDLSIAQFSAFGSFATLGAAIGALFCGNLAMVIGRRGTMWVSDFLCITGWLSIAFAKEVVLLNFGRIISGIGFGLTSYVVPVYIAEITPKHVRGTFTFSNQLLQNAGLAMIYFCGNFITWRTLALLGALPCFIQVIGLFFVPESPRWLAKVGSDKELENSLFRLRGRDADISREASEIQVMTKMVENDSKSSFSDLFQRKYRYTLVVGIGLMLIQQFSGSAAVISYASTIFRKAGFSVAIGTTMLGIFVIPKAMIGLILVDKWGRRPLLMTSAFGMSMTCMLLGVAFTLQKMQLLSELTPILSFICVMMYIATYAIGLGGLPWVIMSEIFPINIKVTAGSIVTLVSFSSSSIVTYAFNFLFEWSTQGTFFIFAGIGGAALLFIWLLVPETKGLSLEEIQVSLIHQPDERNQT

SEQ ID NO: 82152 - DNA, 1110 bp, Arabidopsis thaliana
  misc_feature (1)..(1110): Ceres Seq. ID no. 12663692
  misc_feature (1)..(1110): Ortholog of  Ceres SEQ ID NO 15178472 as cited in SEQ ID NO 65628
atggcggcggagacggaggcagaatcacagtaccttaatgtactctctgctttcctcgccatcgaaccggtggactccgtcatcactctcgctagagggtgcactggaggatcaattactgagaacgcccagagatttttctgggaaatttgcgttgaagctgctgcgaatggtaacggatcatacgcgaagaagttactgaagaaactcataaatgaagttgagttagagaatggtgaagtattggatgaagtgtatgaagagtatgctctttacatgttaacttctaaggaagatatattggtgaaagaaaacataaggataaccaaattcatttcttttcttttccctgaaggttcgtacaaacacccgagttgtccaaggtcgaggaaattagttattccgctgcattgttcgttgaacatgcttgaaggagataccgggtgttccatctggccatcgagtctgtttctgtcagaatttgttttgtcatttccagagttattcgccaataaagcctgttttgaggttggttctggagttggtatggtcgggatttgccttgcacatgtaaaggccaaagaggtgatactaacagacggagatcttttaactttgtctaacatgaagcttaatttggagagaaatcacttaaactatgatgacgagtttctcaaacaacccggagaagctcagagtacacgagttaaatgcactcatcttccatgggaaactgcatcggaaagtgaactaagccaatatcgtccagatattgttctaggcgcagatgtaatctatgatccgtcatgtctccctcatctacttcgggtgctagtagcccttttaaagaacccacccaaaagaggaaatggctctctcgagactgaagacagagacacgacacaagaagaacacagtcccgcggtggcttatatcgcatctgtgatccgcaatgtagacacttttaatgtgtgcttgacacttgcagaccaaatggacctttccatcacagacgtgaccgcagaacttacgcctcgctttgagcttttaccatatatgcattcgtatgaccgctcaaccgttcggctcttctccatatcctccagataa

SEQ ID NO: 82153 - protein, 369 aa, Arabidopsis thaliana
  peptide (1)..(369): Ceres Seq. ID no. 12663693
MAAETEAESQYLNVLSAFLAIEPVDSVITLARGCTGGSITENAQRFFWEICVEAAANGNGSYAKKLLKKLINEVELENGEVLDEVYEEYALYMLTSKEDILVKENIRITKFISFLFPEGSYKHPSCPRSRKLVIPLHCSLNMLEGDTGCSIWPSSLFLSEFVLSFPELFANKACFEVGSGVGMVGICLAHVKAKEVILTDGDLLTLSNMKLNLERNHLNYDDEFLKQPGEAQSTRVKCTHLPWETASESELSQYRPDIVLGADVIYDPSCLPHLLRVLVALLKNPPKRGNGSLETEDRDTTQEEHSPAVAYIASVIRNVDTFNVCLTLADQMDLSITDVTAELTPRFELLPYMHSYDRSTVRLFSISSR

SEQ ID NO: 82154 - protein, 277 aa, Arabidopsis thaliana
  peptide (1)..(277): Ceres Seq. ID no. 12663694
MLTSKEDILVKENIRITKFISFLFPEGSYKHPSCPRSRKLVIPLHCSLNMLEGDTGCSIWPSSLFLSEFVLSFPELFANKACFEVGSGVGMVGICLAHVKAKEVILTDGDLLTLSNMKLNLERNHLNYDDEFLKQPGEAQSTRVKCTHLPWETASESELSQYRPDIVLGADVIYDPSCLPHLLRVLVALLKNPPKRGNGSLETEDRDTTQEEHSPAVAYIASVIRNVDTFNVCLTLADQMDLSITDVTAELTPRFELLPYMHSYDRSTVRLFSISSR

SEQ ID NO: 82155 - protein, 228 aa, Arabidopsis thaliana
  peptide (1)..(228): Ceres Seq. ID no. 12663695
MLEGDTGCSIWPSSLFLSEFVLSFPELFANKACFEVGSGVGMVGICLAHVKAKEVILTDGDLLTLSNMKLNLERNHLNYDDEFLKQPGEAQSTRVKCTHLPWETASESELSQYRPDIVLGADVIYDPSCLPHLLRVLVALLKNPPKRGNGSLETEDRDTTQEEHSPAVAYIASVIRNVDTFNVCLTLADQMDLSITDVTAELTPRFELLPYMHSYDRSTVRLFSISSR

SEQ ID NO: 82156 - DNA, 897 bp, Arabidopsis thaliana
  misc_feature (1)..(897): Ceres Seq. ID no. 12663700
  misc_feature (1)..(897): Ortholog of  Ceres SEQ ID NO 15224418 as cited in SEQ ID NO 51528
  misc_feature (1)..(897): Ortholog of  Ceres SEQ ID NO 13593846 as cited in SEQ ID NO 53152
  misc_feature (1)..(897): Ortholog of  Ceres SEQ ID NO 12781936 as cited in SEQ ID NO 56320
  misc_feature (1)..(897): Ortholog of  Ceres SEQ ID NO 13659489 as cited in SEQ ID NO 66986
  misc_feature (1)..(897): Ortholog of  Ceres SEQ ID NO 15175169 as cited in SEQ ID NO 0
atgatgatgtccggtggaagctacacgaacatcgatcaccagaaagtttctggatctgtacccgctgttccagatcctggacatgtcaccgtcaaattcgcagactcaaatctacaaacgtttcctccatctgctactcagggaaagatttctggtggtactaatcctcctcgagatgctgacgttttgtatgccttattggctaatcttatcgactttcaaccggtggcagatacattttcgaggcctgtgaatggtactacagatgaacctcagtctagtggttggcttcatagattcactgttggtgcttacaagccttactttgatgtggacacttcagatgtcgtagagagactcaaagaatcgctctttccgtttagaggaacatttacggaaaagacagccaacaaccctgatttgtacgggccattctggatatgcacaacattgatctttgtagcagcatccataggaacatttgttacatacatagcacacaaattgaagaaacaggaatggaactacgatattaatctggtgacttggtctgcaggagttttctacggttatgtaactattgtccctctcgcattatacgttgttctcaagtacttctctgcaccatcaggcttagtccaactcttctgtctatacggatattccctattcgtcttcatccctgcattgtgtctctctgttgtgccattagagatcttcagatgggttattgcgggtttagctggattcatgtctgctacatttgtagcattgaatctcaaagcacatattaactctgcaggagagagatggttcttgattgtggtcagcatatttcttctacagctcgctctctcagtagtgctgaagctatatctgttcactgtcaccgtataa

SEQ ID NO: 82157 - protein, 298 aa, Arabidopsis thaliana
  peptide (1)..(298): Ceres Seq. ID no. 12663701
MMMSGGSYTNIDHQKVSGSVPAVPDPGHVTVKFADSNLQTFPPSATQGKISGGTNPPRDADVLYALLANLIDFQPVADTFSRPVNGTTDEPQSSGWLHRFTVGAYKPYFDVDTSDVVERLKESLFPFRGTFTEKTANNPDLYGPFWICTTLIFVAASIGTFVTYIAHKLKKQEWNYDINLVTWSAGVFYGYVTIVPLALYVVLKYFSAPSGLVQLFCLYGYSLFVFIPALCLSVVPLEIFRWVIAGLAGFMSATFVALNLKAHINSAGERWFLIVVSIFLLQLALSVVLKLYLFTVTV

SEQ ID NO: 82158 - protein, 297 aa, Arabidopsis thaliana
  peptide (1)..(297): Ceres Seq. ID no. 12663702
MMSGGSYTNIDHQKVSGSVPAVPDPGHVTVKFADSNLQTFPPSATQGKISGGTNPPRDADVLYALLANLIDFQPVADTFSRPVNGTTDEPQSSGWLHRFTVGAYKPYFDVDTSDVVERLKESLFPFRGTFTEKTANNPDLYGPFWICTTLIFVAASIGTFVTYIAHKLKKQEWNYDINLVTWSAGVFYGYVTIVPLALYVVLKYFSAPSGLVQLFCLYGYSLFVFIPALCLSVVPLEIFRWVIAGLAGFMSATFVALNLKAHINSAGERWFLIVVSIFLLQLALSVVLKLYLFTVTV

SEQ ID NO: 82159 - protein, 296 aa, Arabidopsis thaliana
  peptide (1)..(296): Ceres Seq. ID no. 12663703
MSGGSYTNIDHQKVSGSVPAVPDPGHVTVKFADSNLQTFPPSATQGKISGGTNPPRDADVLYALLANLIDFQPVADTFSRPVNGTTDEPQSSGWLHRFTVGAYKPYFDVDTSDVVERLKESLFPFRGTFTEKTANNPDLYGPFWICTTLIFVAASIGTFVTYIAHKLKKQEWNYDINLVTWSAGVFYGYVTIVPLALYVVLKYFSAPSGLVQLFCLYGYSLFVFIPALCLSVVPLEIFRWVIAGLAGFMSATFVALNLKAHINSAGERWFLIVVSIFLLQLALSVVLKLYLFTVTV

SEQ ID NO: 82160 - DNA, 2247 bp, Arabidopsis thaliana
  misc_feature (1)..(2247): Ceres Seq. ID no. 12663731
  misc_feature (1)..(2247): Ortholog of  Ceres SEQ ID NO 14307496 as cited in SEQ ID NO 58986
aactaaaaccaaattagtattaatccgaaaacttgaaactgtggcttcctcctcaaatctccgatcaacggaaacaaaatggctcacatggtgagagcgagctctggcctttcttacccggagagattctacgccgccgcatcgtacgtcggcctcgacggatctcaatcgtcggtcaaacaactcagctccaaattctccaacgatacctctttgcttctctacacgttgcaccagcaggctactctaggaccttgtagtattccaaaaccgagtgcgtggaatccagtagagcaaagcaaatggaaaagttggcaggggcttggaaccatgccctccattgaggcaatgcgtctatttgtgaaaatcttggaggaagcagatcctggttggtatccaaggacatctaactctgttcttgaccctgctgtacatgtccaaatcaatagcacaaaggctgagcctagttttgagagtggagcttcatttggtgagacaaagacgattacttctgaggatgggcgcttgacagaaacgcaagataaagatgtagttttggaagacccagatactgtttctgtgtataatcagtggactgcaccacgaacatcaggtcagccaccaaaagcccgatatcagcatggagcagcggttattcaagataagatgtatatgtatggtggaaaccacaacggccgttatctaggtgatcttcatgttctggatttaaaaaactggacttggtcaagagttgaaaccaaggttgtgactggatcacaggaaacatcatctccagcaaaactaactcactgtgctggtcattctttgataccatgggataaccagcttttgtctatcggtggtcatacaaaagatccttcagaatccatgccagtgatggtctttgatctacattgctgttcatggtcaatcttaaagacatacgggaagccaccgatttcgcgtggaggtcagtcagtgacccttgtgggaaaaagcttggtgatatttggtggccaggatgcaaagagatcgcttctgaacgatttgcatatacttgatttagataccatgacctgggaggaaattgatgccgtgggttctcctccaactccaaggtctgatcatgctgctgcagtgcacgctgagcgttaccttctaatctttggtggaggatcacatgcaacttgttttgatgatctgcacgtccttgatctgcaaactatggaatggtcaagacatacacaacaaggtgacgcaccaactccacgtgctggacacgctggtgtgacgattggggaaaattggtatattgttggtggtggagataacaaaagcggggcatctaagactgttgtattaaatatgtcaactcttgcatggtcagttgtcacttcagtccaagaacatgtacctctcgctagtgagggattgagtttagttgtgagctcatacaatggagaagacatagtggttgcttttggtggatacaacggacattacaacaatgaagtgaatgttcttaaaccaagccacaaatcaagcttgaaatccaagattatgggagcttctgctgtgccagatagtttttccgctgttaataacgccacgactagagatattgagtctgagatcaaggttgaaggaaaagccgaccgcattatcacaacccttaaatccgaaaaagaagaagtggaggcatcactcaacaaggaaaagatacaaactctccaactaaaggaagagttagcagagatagacacacgaaatacagagttatacaaggaacttcaatctgtgcggaaccaacttgcagcggaacaatcaaggtgtttcaaactagaggttgaagttgcagagctaagacaaaagcttcagacaatggaaacacttcaaaaggaactcgaactcctccaacgtcaaagagccgttgcgtctgaacaagccgccaccatgaacgccaaacgacaaagctctggtggcgtctggggttggctcgctggaactcctccgcctaaaacatgagtgcccatgaaactttttttcgggtaactcttttttgtcattaccaatatcagtatttacttttagaaagaaagaaaaagagagaaatacagtatagacaatttttagcgtctccgcattgttactagtgaaaataaggtctatagttgtttctactacagtatgattgatgagttgccatttgaagattcagtttctatataagctctaccgatttgtgtg

SEQ ID NO: 82161 - protein, 648 aa, Arabidopsis thaliana
  peptide (1)..(648): Ceres Seq. ID no. 12663732
MAHMVRASSGLSYPERFYAAASYVGLDGSQSSVKQLSSKFSNDTSLLLYTLHQQATLGPCSIPKPSAWNPVEQSKWKSWQGLGTMPSIEAMRLFVKILEEADPGWYPRTSNSVLDPAVHVQINSTKAEPSFESGASFGETKTITSEDGRLTETQDKDVVLEDPDTVSVYNQWTAPRTSGQPPKARYQHGAAVIQDKMYMYGGNHNGRYLGDLHVLDLKNWTWSRVETKVVTGSQETSSPAKLTHCAGHSLIPWDNQLLSIGGHTKDPSESMPVMVFDLHCCSWSILKTYGKPPISRGGQSVTLVGKSLVIFGGQDAKRSLLNDLHILDLDTMTWEEIDAVGSPPTPRSDHAAAVHAERYLLIFGGGSHATCFDDLHVLDLQTMEWSRHTQQGDAPTPRAGHAGVTIGENWYIVGGGDNKSGASKTVVLNMSTLAWSVVTSVQEHVPLASEGLSLVVSSYNGEDIVVAFGGYNGHYNNEVNVLKPSHKSSLKSKIMGASAVPDSFSAVNNATTRDIESEIKVEGKADRIITTLKSEKEEVEASLNKEKIQTLQLKEELAEIDTRNTELYKELQSVRNQLAAEQSRCFKLEVEVAELRQKLQTMETLQKELELLQRQRAVASEQAATMNAKRQSSGGVWGWLAGTPPPKT

SEQ ID NO: 82162 - protein, 645 aa, Arabidopsis thaliana
  peptide (1)..(645): Ceres Seq. ID no. 12663733
MVRASSGLSYPERFYAAASYVGLDGSQSSVKQLSSKFSNDTSLLLYTLHQQATLGPCSIPKPSAWNPVEQSKWKSWQGLGTMPSIEAMRLFVKILEEADPGWYPRTSNSVLDPAVHVQINSTKAEPSFESGASFGETKTITSEDGRLTETQDKDVVLEDPDTVSVYNQWTAPRTSGQPPKARYQHGAAVIQDKMYMYGGNHNGRYLGDLHVLDLKNWTWSRVETKVVTGSQETSSPAKLTHCAGHSLIPWDNQLLSIGGHTKDPSESMPVMVFDLHCCSWSILKTYGKPPISRGGQSVTLVGKSLVIFGGQDAKRSLLNDLHILDLDTMTWEEIDAVGSPPTPRSDHAAAVHAERYLLIFGGGSHATCFDDLHVLDLQTMEWSRHTQQGDAPTPRAGHAGVTIGENWYIVGGGDNKSGASKTVVLNMSTLAWSVVTSVQEHVPLASEGLSLVVSSYNGEDIVVAFGGYNGHYNNEVNVLKPSHKSSLKSKIMGASAVPDSFSAVNNATTRDIESEIKVEGKADRIITTLKSEKEEVEASLNKEKIQTLQLKEELAEIDTRNTELYKELQSVRNQLAAEQSRCFKLEVEVAELRQKLQTMETLQKELELLQRQRAVASEQAATMNAKRQSSGGVWGWLAGTPPPKT

SEQ ID NO: 82163 - protein, 564 aa, Arabidopsis thaliana
  peptide (1)..(564): Ceres Seq. ID no. 12663734
MPSIEAMRLFVKILEEADPGWYPRTSNSVLDPAVHVQINSTKAEPSFESGASFGETKTITSEDGRLTETQDKDVVLEDPDTVSVYNQWTAPRTSGQPPKARYQHGAAVIQDKMYMYGGNHNGRYLGDLHVLDLKNWTWSRVETKVVTGSQETSSPAKLTHCAGHSLIPWDNQLLSIGGHTKDPSESMPVMVFDLHCCSWSILKTYGKPPISRGGQSVTLVGKSLVIFGGQDAKRSLLNDLHILDLDTMTWEEIDAVGSPPTPRSDHAAAVHAERYLLIFGGGSHATCFDDLHVLDLQTMEWSRHTQQGDAPTPRAGHAGVTIGENWYIVGGGDNKSGASKTVVLNMSTLAWSVVTSVQEHVPLASEGLSLVVSSYNGEDIVVAFGGYNGHYNNEVNVLKPSHKSSLKSKIMGASAVPDSFSAVNNATTRDIESEIKVEGKADRIITTLKSEKEEVEASLNKEKIQTLQLKEELAEIDTRNTELYKELQSVRNQLAAEQSRCFKLEVEVAELRQKLQTMETLQKELELLQRQRAVASEQAATMNAKRQSSGGVWGWLAGTPPPKT

SEQ ID NO: 82164 - DNA, 1544 bp, Arabidopsis thaliana
  misc_feature (1)..(1544): Ceres Seq. ID no. 12663769
  misc_feature (1)..(1544): Ortholog of  Ceres SEQ ID NO 13596392 as cited in SEQ ID NO 62136
  misc_feature (1)..(1544): Ortholog of  Ceres SEQ ID NO 13654360 as cited in SEQ ID NO 67980
  misc_feature (1)..(1544): Ortholog of  Ceres SEQ ID NO 13596394 as cited in SEQ ID NO 68561
aagacaaaatagatttcttcttctctttgtttgacccacattttctctggaaaaaattcgtctactttctccgatcgtctcttcattgatcggaaaaccaacaacgacccattattcctctcctgtttctggcgcaaacccttgtagcaagttttgattttggtgagaaaatattttagggatctgaagagaaagaacacgatgatgacgagtatggaagggatggtggagaaaggagtattggatgatattataagaagattgttagaaggtaaaggaggcaaacaggttcagctttccgagagcgagattcgtcaactctgctttaacgctcgtcaaatcttcctctctcaacctaatctccttgatctccatgccccaattcgcatctgcggtgatattcatggtcaatatcaagatcttttgaggttgtttgaatacggaggttatcctccttcagcaaactatctattccttggtgattacgttgacagaggcaaacaaagtcttgagaccatatgtttgcttcttgcttacaagatacggtacccatcgaagatatatctgttgagagggaaccatgaggatgctaagatcaacaggatttacgggttttatgacgagtgcaaacggagattcaatgtacgactctggaaggtgtttactgattgcttcaactgtttacctgtagctgcacttattgatgagaagatactgtgtatgcacggtggtttgtcaccagatttggataatttgaatcagattcgagagattcaaaggcctattgagattccagacagtggtcttctttgtgatttactttggtcagatcctgatcagaagattgaaggttgggctgatagtgatcgaggtatctcttgcacttttggagctgataaagtcgctgagttcttggataagaatgatcttgacctcatttgccgaggccatcaggtagtagaagacgggtatgagtttttcgcaaaacggagattagtcacgatattctcagctccaaactatggtggggagtttgacaacgctggtgcgttattaagcgttgacgagtctcttgtatgttcctttgagattatgaaaccagccccagcttcaagcagtcatcctctcaagaaggtaccgaagatggggaagtcttgaatatctagtcctctctatgtcaatatcacggttccacagctcaagctaggctcaagattctgagtgtcattacaactgtgtctgtgtctccaattatgggttgaatgcaatgaagaacccaaagggtacttacttagtcatcaaacaacttctgtaaaaaaacaaaaaaagtgagaaaacaaaaacacactttgttttctttgtatagatgcagaaaatgatctgtcttctgcttctggagattttatctccttattagtctctcttttctttcttcttttagcccttttagtttaatatagtaccacttagatttttttttctcggttatttttttccttgttgtacaaacccttttgcatatcgtcaagattccacattttctt

SEQ ID NO: 82165 - protein, 318 aa, Arabidopsis thaliana
  peptide (1)..(318): Ceres Seq. ID no. 12663770
MMTSMEGMVEKGVLDDIIRRLLEGKGGKQVQLSESEIRQLCFNARQIFLSQPNLLDLHAPIRICGDIHGQYQDLLRLFEYGGYPPSANYLFLGDYVDRGKQSLETICLLLAYKIRYPSKIYLLRGNHEDAKINRIYGFYDECKRRFNVRLWKVFTDCFNCLPVAALIDEKILCMHGGLSPDLDNLNQIREIQRPIEIPDSGLLCDLLWSDPDQKIEGWADSDRGISCTFGADKVAEFLDKNDLDLICRGHQVVEDGYEFFAKRRLVTIFSAPNYGGEFDNAGALLSVDESLVCSFEIMKPAPASSSHPLKKVPKMGKS

SEQ ID NO: 82166 - protein, 317 aa, Arabidopsis thaliana
  peptide (1)..(317): Ceres Seq. ID no. 12663771
MTSMEGMVEKGVLDDIIRRLLEGKGGKQVQLSESEIRQLCFNARQIFLSQPNLLDLHAPIRICGDIHGQYQDLLRLFEYGGYPPSANYLFLGDYVDRGKQSLETICLLLAYKIRYPSKIYLLRGNHEDAKINRIYGFYDECKRRFNVRLWKVFTDCFNCLPVAALIDEKILCMHGGLSPDLDNLNQIREIQRPIEIPDSGLLCDLLWSDPDQKIEGWADSDRGISCTFGADKVAEFLDKNDLDLICRGHQVVEDGYEFFAKRRLVTIFSAPNYGGEFDNAGALLSVDESLVCSFEIMKPAPASSSHPLKKVPKMGKS

SEQ ID NO: 82167 - protein, 314 aa, Arabidopsis thaliana
  peptide (1)..(314): Ceres Seq. ID no. 12663772
MEGMVEKGVLDDIIRRLLEGKGGKQVQLSESEIRQLCFNARQIFLSQPNLLDLHAPIRICGDIHGQYQDLLRLFEYGGYPPSANYLFLGDYVDRGKQSLETICLLLAYKIRYPSKIYLLRGNHEDAKINRIYGFYDECKRRFNVRLWKVFTDCFNCLPVAALIDEKILCMHGGLSPDLDNLNQIREIQRPIEIPDSGLLCDLLWSDPDQKIEGWADSDRGISCTFGADKVAEFLDKNDLDLICRGHQVVEDGYEFFAKRRLVTIFSAPNYGGEFDNAGALLSVDESLVCSFEIMKPAPASSSHPLKKVPKMGKS

SEQ ID NO: 82168 - DNA, 543 bp, Arabidopsis thaliana
  misc_feature (1)..(543): Ceres Seq. ID no. 12663844
  misc_feature (1)..(543): Ortholog of  Ceres SEQ ID NO 15172237 as cited in SEQ ID NO 55116
atgtcaaatccgagtttcaagcttgatgataatgccccaactgtaagctgggctgaatcaaggagtggaggagaaggagacttttctgcctctcaggtcaaggcattgtacatcaagaatttacctagagatataacacaagaacgtctaaaggcattacttgaacatcacgggaaaatactgaaagtggtgatcccaccagcaaaaccaggaaaggaagacagtagatacggatttgtgcactacgcagagaggacaagcgtaatgcgagctttgaaaaacactgaaagatatgagattgatgcttctgcctattcacaaccattaatgcatgcgggaggtcacgcagctggtggaatgtcgatgatgccaatcatgttacctgatggaaggatccgatacgtcttgcaacagcctggactagcagcgatgccacaaccaccaccgaggccttctccaccgtataggggatgcagcggttcgagcagcagcaaacaaagtagcgacaacggtagaggacgaagctgttacaatccttattag

SEQ ID NO: 82169 - protein, 180 aa, Arabidopsis thaliana
  peptide (1)..(180): Ceres Seq. ID no. 12663845
MSNPSFKLDDNAPTVSWAESRSGGEGDFSASQVKALYIKNLPRDITQERLKALLEHHGKILKVVIPPAKPGKEDSRYGFVHYAERTSVMRALKNTERYEIDASAYSQPLMHAGGHAAGGMSMMPIMLPDGRIRYVLQQPGLAAMPQPPPRPSPPYRGCSGSSSSKQSSDNGRGRSCYNPY

SEQ ID NO: 82170 - protein, 92 aa, Arabidopsis thaliana
  peptide (1)..(92): Ceres Seq. ID no. 12663846
MRALKNTERYEIDASAYSQPLMHAGGHAAGGMSMMPIMLPDGRIRYVLQQPGLAAMPQPPPRPSPPYRGCSGSSSSKQSSDNGRGRSCYNPY

SEQ ID NO: 82171 - DNA, 543 bp, Arabidopsis thaliana
  misc_feature (1)..(543): Ceres Seq. ID no. 12663858
  misc_feature (1)..(543): Ortholog of  Ceres SEQ ID NO 15172237 as cited in SEQ ID NO 55116
atgtcaaatccgagtttcaagcttgatgataatgccccaactgtaagctgggctgaatcaaggagtggaggagaaggagactcttctgcctctcaggtcaaggcattgtacatcaagaatttacctagagatataacacaagaacgtctaaaggcattatttgaacatcacgggaaaatactgaaagtggtgatcccaccagcaaaaccaggaaaggaagacagtagatacggatttgtgcactacgcagagaggacaagcgtaatgcgagctttgaaaaacactgaaagatatgagattgatgcttctgcctattcacaaccattaatgcatgcgggaggtcacgcagctggtggaatgtcgatgatgccaatcatgttacctgatggaaggatccgatacgtcttgcaacagcctggactagcagcgatgccacaaccaccaccgaggccttctccaccgtataggggaggcagcggttcgagcagtagcaaacaaagtagcgacaatggtagaggacgaagccgttacaatccttattag

SEQ ID NO: 82172 - protein, 180 aa, Arabidopsis thaliana
  peptide (1)..(180): Ceres Seq. ID no. 12663859
MSNPSFKLDDNAPTVSWAESRSGGEGDSSASQVKALYIKNLPRDITQERLKALFEHHGKILKVVIPPAKPGKEDSRYGFVHYAERTSVMRALKNTERYEIDASAYSQPLMHAGGHAAGGMSMMPIMLPDGRIRYVLQQPGLAAMPQPPPRPSPPYRGGSGSSSSKQSSDNGRGRSRYNPY

SEQ ID NO: 82173 - protein, 92 aa, Arabidopsis thaliana
  peptide (1)..(92): Ceres Seq. ID no. 12663860
MRALKNTERYEIDASAYSQPLMHAGGHAAGGMSMMPIMLPDGRIRYVLQQPGLAAMPQPPPRPSPPYRGGSGSSSSKQSSDNGRGRSRYNPY

SEQ ID NO: 82174 - DNA, 1602 bp, Arabidopsis thaliana
  misc_feature (1)..(1602): Ceres Seq. ID no. 12663881
  misc_feature (1)..(1602): Ortholog of  Ceres SEQ ID NO 13600220 as cited in SEQ ID NO 0
atggtattgcaaaaacttcctctcatgtctattgggctgctttggctactaatcatcgtaggtccgctggtaaatgccgatggacctgtttgcccaccgaaaccgtcggacaaactaagccgggcacattttcctaaaggttttttatttggcacagcgactgcggcatatcaggttgaaggtgcagtgaatgaaacttgtcgtggaccatccgtatgggatatctattgtaaaaaatatccagaaaaatgcaatggcgataatggtactcaagctgttgatttcttctatcgttacaaggaagatattcaattaatgaagaatctaaacacagattccttcagattatctatctcatggacaagaatttttcctcacgggagagaagagaatggagtgagtaaatctggtgttcaattctaccatgacctcattgacgagctcaaaagaaacggtataattccgttcgtgactgtttttcattgggacacgccacaaactctagagaatgaatatgggggcttcttaagcgcacacattgtgaaagattttcgggagtatgctgagtttgttttcaaagaatatggtggaaaagttaaacattggatcacttttaacgagccatgggttttcgcgcatgccggttatgacgttggaaagaaagcacctggacgttgttctccttacgccaaggacgaaactgtcaagggagattgtctaggcggacgatcaggttatgaggcttatctagtcagtcacaacctcctcaacgctcatgcagaagccgttgaagcttttcgacaatgtgaaaaatgtaagggtggaaagatcggaatcgcacatagtccggcttggtttgaaccacatgactttaaagatgaacaaagtggtgcgaccattgaccgtgcacttgactttataatgggatggcatctggacacaactatgtttggggattatccacagacaatgaaagacattgttggacatagattgcctaaatttactactgagcagatagcaaaactcaaaaactcagccgatttcgtagggatcaattactatacttctacattttcaaaacacttggagaagccaaaccatgcagaaccaaaatttaaacaagattctcttgttgaatggaaaaataaaaatgtaaacaatatcactattggtagcaagcctgaaaccggtccattgccagtttattctacaggctttagaaaagttttgaaatacgtcaaagataaatacgcaaatcctgaaattatcatcatggaaaacggatatggagaaaaccttaaagagaacgattcggttgaaaatggtactgctgattacaacagggaaagttatcttaagaagcatctttggagtatgcacaaagctatttgcgaagacaaggtaaatgttacaggatattttgtatggtcattgatggataactttgagtggcaagatggttttaaaaacagatttggactgtattacattgattacaaaaacaacctcacacgtcatgagaaagtttcgggcaagtattatagagaattccttagtgagggagttcgtccatccgctatcaagaaggatgagctttga

SEQ ID NO: 82175 - protein, 533 aa, Arabidopsis thaliana
  peptide (1)..(533): Ceres Seq. ID no. 12663882
MVLQKLPLMSIGLLWLLIIVGPLVNADGPVCPPKPSDKLSRAHFPKGFLFGTATAAYQVEGAVNETCRGPSVWDIYCKKYPEKCNGDNGTQAVDFFYRYKEDIQLMKNLNTDSFRLSISWTRIFPHGREENGVSKSGVQFYHDLIDELKRNGIIPFVTVFHWDTPQTLENEYGGFLSAHIVKDFREYAEFVFKEYGGKVKHWITFNEPWVFAHAGYDVGKKAPGRCSPYAKDETVKGDCLGGRSGYEAYLVSHNLLNAHAEAVEAFRQCEKCKGGKIGIAHSPAWFEPHDFKDEQSGATIDRALDFIMGWHLDTTMFGDYPQTMKDIVGHRLPKFTTEQIAKLKNSADFVGINYYTSTFSKHLEKPNHAEPKFKQDSLVEWKNKNVNNITIGSKPETGPLPVYSTGFRKVLKYVKDKYANPEIIIMENGYGENLKENDSVENGTADYNRESYLKKHLWSMHKAICEDKVNVTGYFVWSLMDNFEWQDGFKNRFGLYYIDYKNNLTRHEKVSGKYYREFLSEGVRPSAIKKDEL

SEQ ID NO: 82176 - protein, 525 aa, Arabidopsis thaliana
  peptide (1)..(525): Ceres Seq. ID no. 12663883
MSIGLLWLLIIVGPLVNADGPVCPPKPSDKLSRAHFPKGFLFGTATAAYQVEGAVNETCRGPSVWDIYCKKYPEKCNGDNGTQAVDFFYRYKEDIQLMKNLNTDSFRLSISWTRIFPHGREENGVSKSGVQFYHDLIDELKRNGIIPFVTVFHWDTPQTLENEYGGFLSAHIVKDFREYAEFVFKEYGGKVKHWITFNEPWVFAHAGYDVGKKAPGRCSPYAKDETVKGDCLGGRSGYEAYLVSHNLLNAHAEAVEAFRQCEKCKGGKIGIAHSPAWFEPHDFKDEQSGATIDRALDFIMGWHLDTTMFGDYPQTMKDIVGHRLPKFTTEQIAKLKNSADFVGINYYTSTFSKHLEKPNHAEPKFKQDSLVEWKNKNVNNITIGSKPETGPLPVYSTGFRKVLKYVKDKYANPEIIIMENGYGENLKENDSVENGTADYNRESYLKKHLWSMHKAICEDKVNVTGYFVWSLMDNFEWQDGFKNRFGLYYIDYKNNLTRHEKVSGKYYREFLSEGVRPSAIKKDEL

SEQ ID NO: 82177 - protein, 428 aa, Arabidopsis thaliana
  peptide (1)..(428): Ceres Seq. ID no. 12663884
MKNLNTDSFRLSISWTRIFPHGREENGVSKSGVQFYHDLIDELKRNGIIPFVTVFHWDTPQTLENEYGGFLSAHIVKDFREYAEFVFKEYGGKVKHWITFNEPWVFAHAGYDVGKKAPGRCSPYAKDETVKGDCLGGRSGYEAYLVSHNLLNAHAEAVEAFRQCEKCKGGKIGIAHSPAWFEPHDFKDEQSGATIDRALDFIMGWHLDTTMFGDYPQTMKDIVGHRLPKFTTEQIAKLKNSADFVGINYYTSTFSKHLEKPNHAEPKFKQDSLVEWKNKNVNNITIGSKPETGPLPVYSTGFRKVLKYVKDKYANPEIIIMENGYGENLKENDSVENGTADYNRESYLKKHLWSMHKAICEDKVNVTGYFVWSLMDNFEWQDGFKNRFGLYYIDYKNNLTRHEKVSGKYYREFLSEGVRPSAIKKDEL

SEQ ID NO: 82178 - DNA, 993 bp, Arabidopsis thaliana
  misc_feature (1)..(993): Ceres Seq. ID no. 12663920
  misc_feature (1)..(993): Ortholog of  Ceres SEQ ID NO 14306949 as cited in SEQ ID NO 54919
atggaagaagttgaagctgcaaacaaagcagcagtggaaagttgtcatggagtattgaatctcttatcacaacaaaccaatgattccaaatcaataatggttgaaacaagagaagctgtttgcaagttcaagagagtctcctctcttttgtctagagggttaggtcaaaggaagataaagaaactcaacaacaacaactacaagtttagctcttctttgttgccacaacacatgtttttggagagtcctgtttgcagtaataatgctataagtggttgtattccaattctagcaccaaagcctcttcagattgtaccagctggtcctcctccattgatgttgtttaaccagaatatgtgtcttgataagtcgtttctcgagctgaagccaccctcttcacgagctgttgatccaaaaccttatcagtttattcatacccatcagcaaggagtgtactcaaggagcaaaagtggtttgaatctaaagtttgatgggtctattggtgctagttgttattcaccaagtatatcaaatgggtcaagatcgtttgtttcatctcttagtatggatggtagtgtgacggattacgatagaaactcttttcatttgattggattacctcaaggttccgatcatatatcgcaacattctaggaggactagttgctctggtagtttaaaatgtggaagtaaaagcaaatgccattgttccaagaaaaggaaattaagggtgaaacgatcgattaaagtaccggcaatcagtaacaagattgcggacatacctcccgatgaatattcatggaggaaatacggacaaaagccgattaagggttctcctcatcctaggggatactataaatgtagcagtgtgcgcggttgtccagcgaggaagcatgttgagcgatgtgtagaagaaacttcgatgcttattgtgacttatgaaggcgagcataaccattcaagaatactctcttctcaatcagctcatacttga

SEQ ID NO: 82179 - protein, 330 aa, Arabidopsis thaliana
  peptide (1)..(330): Ceres Seq. ID no. 12663921
MEEVEAANKAAVESCHGVLNLLSQQTNDSKSIMVETREAVCKFKRVSSLLSRGLGQRKIKKLNNNNYKFSSSLLPQHMFLESPVCSNNAISGCIPILAPKPLQIVPAGPPPLMLFNQNMCLDKSFLELKPPSSRAVDPKPYQFIHTHQQGVYSRSKSGLNLKFDGSIGASCYSPSISNGSRSFVSSLSMDGSVTDYDRNSFHLIGLPQGSDHISQHSRRTSCSGSLKCGSKSKCHCSKKRKLRVKRSIKVPAISNKIADIPPDEYSWRKYGQKPIKGSPHPRGYYKCSSVRGCPARKHVERCVEETSMLIVTYEGEHNHSRILSSQSAHT

SEQ ID NO: 82180 - protein, 298 aa, Arabidopsis thaliana
  peptide (1)..(298): Ceres Seq. ID no. 12663922
MVETREAVCKFKRVSSLLSRGLGQRKIKKLNNNNYKFSSSLLPQHMFLESPVCSNNAISGCIPILAPKPLQIVPAGPPPLMLFNQNMCLDKSFLELKPPSSRAVDPKPYQFIHTHQQGVYSRSKSGLNLKFDGSIGASCYSPSISNGSRSFVSSLSMDGSVTDYDRNSFHLIGLPQGSDHISQHSRRTSCSGSLKCGSKSKCHCSKKRKLRVKRSIKVPAISNKIADIPPDEYSWRKYGQKPIKGSPHPRGYYKCSSVRGCPARKHVERCVEETSMLIVTYEGEHNHSRILSSQSAHT

SEQ ID NO: 82181 - protein, 253 aa, Arabidopsis thaliana
  peptide (1)..(253): Ceres Seq. ID no. 12663923
MFLESPVCSNNAISGCIPILAPKPLQIVPAGPPPLMLFNQNMCLDKSFLELKPPSSRAVDPKPYQFIHTHQQGVYSRSKSGLNLKFDGSIGASCYSPSISNGSRSFVSSLSMDGSVTDYDRNSFHLIGLPQGSDHISQHSRRTSCSGSLKCGSKSKCHCSKKRKLRVKRSIKVPAISNKIADIPPDEYSWRKYGQKPIKGSPHPRGYYKCSSVRGCPARKHVERCVEETSMLIVTYEGEHNHSRILSSQSAHT

SEQ ID NO: 82182 - DNA, 2577 bp, Arabidopsis thaliana
  misc_feature (1)..(2577): Ceres Seq. ID no. 12663930
  misc_feature (1)..(2577): Ortholog of  Ceres SEQ ID NO 14310362 as cited in SEQ ID NO 54251
  misc_feature (1)..(2577): Ortholog of  Ceres SEQ ID NO 12583314 as cited in SEQ ID NO 56435
  misc_feature (1)..(2577): Ortholog of  Ceres SEQ ID NO 13654989 as cited in SEQ ID NO 63117
  misc_feature (1)..(2577): Ortholog of  Ceres SEQ ID NO 13584744 as cited in SEQ ID NO 69137
atgaacgagaaactccggattctgttctccttcctctgtttcttctatgttcttctagtttctccatctcaatctaatggccaagacatctccttgagctgcggagcatcagaaccagctgttgatcaagacaagaaaaaatgggaacccgataccaaattcttgaaaacaccaaacacggttcatgcaccagctacttatcaagatccttcacttctttcaacggttccttacatgacatcaagaatctttacagctccagcaacgtatgagatcccggttaaaggcgacaaaagacatatgctccgcttacatttctatccatcaacatacacaggactcaacattctcgactcttatttctccgtggctgctaatgatcttacccttctcagcaattttagtgcagctatcacatgtcaagccttgactcaagcttacctcgtgagagaatattctcttgcaccatccgaaaaagatgttttgagcatcatatttactccctcggataaacatccaaaagcgtttgctttcattaatggtattgaggtcattccgatgccagaattgtttgatacagcttctcttgttggattctcagaccagacttcagatactaagaccgcgaatcttcaaacgatgtttaggctcaatgtcggtgggcaggatattcccggaagtcaagactctggtggattaacaagaacttggtacaatgacgcgccttatatattcagcgcaggtcttggtgttactttacaagcaagcaacaattttagaattgattatcagaaaatgccggtttctaccgctccagcggatgtttacaaaacagctcgatcacaaggaccaaacggagatatcaacatgaagtcaaatctcacatggatgtttcaagttgacactaatttcacctatatcatgaggctccacttctgtgaattccagcttgctaaaatcaaccagaaagtattcaacattttcatcaacaacagaaccgcgcaaggggatacaaaccccgcagatatactcgggtggacaggtgggaaaggtatccctacttacaaagattacgcgatatatgttgatgctaataccggaggaggaggggaagagatatcgcttcaaatgacgccttcgacatttggtcaaccggaatattacgattcacagcttaatgggctagagattttcaagattgacacaatgaagaaccttgccggtccaaaccctaagccatcacctatgcaagctaatgaagatgttaaaaaggactttcaaggtgacaaaagaatcacagcttttgtcattggttctgctggaggagtagcagctgttttattttgtgcattgtgtttcacaatgtaccagagaaaaagaaagttttcgggcagcgattctcacacatcaagctggcttcctatatatggaaactcacacacatctgcaacaaaatctactatatcgggtaagagcaacaacggaagccacctatcgaatcttgcagcgggtttatgtcgaagattctcattgtccgaaataaaacacggaactcataacttcgatgagtcaaacgtaatcggagtaggagggtttggtaaggtttacaaaggagttatagatggaggcacaaaagtggcaatcaagaaatcaaaccctaattcagaacaagggctcaacgaattcgagacagaaatcgaacttctctcaagattaagacacaaacacttagtctcattaattggatactgcgatgaaggtggagaaatgtgtctaatatacgattacatgtctcttggaacactcagagaacatctttacaacacaaagagacctcagttaacttggaaacgaagactcgaaatcgccattggagctgcaagaggattacattacctacacacaggagcaaagtacactatcattcaccgtgacgtcaaaacaactaacatcttactagatgagaattgggttgctaaagtctcagatttcggattgtccaaaaccggaccaaacatgaatggtggtcatgtcacaaccgttgtgaaaggaagtttcggttacttggatccagagtatttcagaagacaacagttaactgagaagtcagatgtgtactcatttggagttgttctattcgaggttttatgcgctaggccagcgttaaaccctagtttatctaaagaacaagttagtcttggagattgggctatgaactgtaaacgtaaagggacattagaagacatcattgatcctaatcttaaaggaaagattaatccagagtgtttgaagaaatttgcggatacggcggagaagtgtttatctgatagtggcttagatcgaccaacgatgggagatgtcttgtggaatcttgaatttgcacttcagttacaagaaactgctgatggatcacgtcaccgaacgccgagcaatggtggtggttctgtggatttaggtggaggaggaggaggtgtgacggtgaacatcagcgccggagaaagtgacttgggtgatgacttgtcatctgaagaaaacagtggaatattttctcagattgtaaaccctaaaggacgataa

SEQ ID NO: 82183 - protein, 858 aa, Arabidopsis thaliana
  peptide (1)..(858): Ceres Seq. ID no. 12663931
MNEKLRILFSFLCFFYVLLVSPSQSNGQDISLSCGASEPAVDQDKKKWEPDTKFLKTPNTVHAPATYQDPSLLSTVPYMTSRIFTAPATYEIPVKGDKRHMLRLHFYPSTYTGLNILDSYFSVAANDLTLLSNFSAAITCQALTQAYLVREYSLAPSEKDVLSIIFTPSDKHPKAFAFINGIEVIPMPELFDTASLVGFSDQTSDTKTANLQTMFRLNVGGQDIPGSQDSGGLTRTWYNDAPYIFSAGLGVTLQASNNFRIDYQKMPVSTAPADVYKTARSQGPNGDINMKSNLTWMFQVDTNFTYIMRLHFCEFQLAKINQKVFNIFINNRTAQGDTNPADILGWTGGKGIPTYKDYAIYVDANTGGGGEEISLQMTPSTFGQPEYYDSQLNGLEIFKIDTMKNLAGPNPKPSPMQANEDVKKDFQGDKRITAFVIGSAGGVAAVLFCALCFTMYQRKRKFSGSDSHTSSWLPIYGNSHTSATKSTISGKSNNGSHLSNLAAGLCRRFSLSEIKHGTHNFDESNVIGVGGFGKVYKGVIDGGTKVAIKKSNPNSEQGLNEFETEIELLSRLRHKHLVSLIGYCDEGGEMCLIYDYMSLGTLREHLYNTKRPQLTWKRRLEIAIGAARGLHYLHTGAKYTIIHRDVKTTNILLDENWVAKVSDFGLSKTGPNMNGGHVTTVVKGSFGYLDPEYFRRQQLTEKSDVYSFGVVLFEVLCARPALNPSLSKEQVSLGDWAMNCKRKGTLEDIIDPNLKGKINPECLKKFADTAEKCLSDSGLDRPTMGDVLWNLEFALQLQETADGSRHRTPSNGGGSVDLGGGGGGVTVNISAGESDLGDDLSSEENSGIFSQIVNPKGR

SEQ ID NO: 82184 - protein, 780 aa, Arabidopsis thaliana
  peptide (1)..(780): Ceres Seq. ID no. 12663932
MTSRIFTAPATYEIPVKGDKRHMLRLHFYPSTYTGLNILDSYFSVAANDLTLLSNFSAAITCQALTQAYLVREYSLAPSEKDVLSIIFTPSDKHPKAFAFINGIEVIPMPELFDTASLVGFSDQTSDTKTANLQTMFRLNVGGQDIPGSQDSGGLTRTWYNDAPYIFSAGLGVTLQASNNFRIDYQKMPVSTAPADVYKTARSQGPNGDINMKSNLTWMFQVDTNFTYIMRLHFCEFQLAKINQKVFNIFINNRTAQGDTNPADILGWTGGKGIPTYKDYAIYVDANTGGGGEEISLQMTPSTFGQPEYYDSQLNGLEIFKIDTMKNLAGPNPKPSPMQANEDVKKDFQGDKRITAFVIGSAGGVAAVLFCALCFTMYQRKRKFSGSDSHTSSWLPIYGNSHTSATKSTISGKSNNGSHLSNLAAGLCRRFSLSEIKHGTHNFDESNVIGVGGFGKVYKGVIDGGTKVAIKKSNPNSEQGLNEFETEIELLSRLRHKHLVSLIGYCDEGGEMCLIYDYMSLGTLREHLYNTKRPQLTWKRRLEIAIGAARGLHYLHTGAKYTIIHRDVKTTNILLDENWVAKVSDFGLSKTGPNMNGGHVTTVVKGSFGYLDPEYFRRQQLTEKSDVYSFGVVLFEVLCARPALNPSLSKEQVSLGDWAMNCKRKGTLEDIIDPNLKGKINPECLKKFADTAEKCLSDSGLDRPTMGDVLWNLEFALQLQETADGSRHRTPSNGGGSVDLGGGGGGVTVNISAGESDLGDDLSSEENSGIFSQIVNPKGR

SEQ ID NO: 82185 - protein, 758 aa, Arabidopsis thaliana
  peptide (1)..(758): Ceres Seq. ID no. 12663933
MLRLHFYPSTYTGLNILDSYFSVAANDLTLLSNFSAAITCQALTQAYLVREYSLAPSEKDVLSIIFTPSDKHPKAFAFINGIEVIPMPELFDTASLVGFSDQTSDTKTANLQTMFRLNVGGQDIPGSQDSGGLTRTWYNDAPYIFSAGLGVTLQASNNFRIDYQKMPVSTAPADVYKTARSQGPNGDINMKSNLTWMFQVDTNFTYIMRLHFCEFQLAKINQKVFNIFINNRTAQGDTNPADILGWTGGKGIPTYKDYAIYVDANTGGGGEEISLQMTPSTFGQPEYYDSQLNGLEIFKIDTMKNLAGPNPKPSPMQANEDVKKDFQGDKRITAFVIGSAGGVAAVLFCALCFTMYQRKRKFSGSDSHTSSWLPIYGNSHTSATKSTISGKSNNGSHLSNLAAGLCRRFSLSEIKHGTHNFDESNVIGVGGFGKVYKGVIDGGTKVAIKKSNPNSEQGLNEFETEIELLSRLRHKHLVSLIGYCDEGGEMCLIYDYMSLGTLREHLYNTKRPQLTWKRRLEIAIGAARGLHYLHTGAKYTIIHRDVKTTNILLDENWVAKVSDFGLSKTGPNMNGGHVTTVVKGSFGYLDPEYFRRQQLTEKSDVYSFGVVLFEVLCARPALNPSLSKEQVSLGDWAMNCKRKGTLEDIIDPNLKGKINPECLKKFADTAEKCLSDSGLDRPTMGDVLWNLEFALQLQETADGSRHRTPSNGGGSVDLGGGGGGVTVNISAGESDLGDDLSSEENSGIFSQIVNPKGR

SEQ ID NO: 82186 - DNA, 1117 bp, Arabidopsis thaliana
  misc_feature (1)..(1117): Ceres Seq. ID no. 12663942
  misc_feature (1)..(1117): Ortholog of  Ceres SEQ ID NO 14310350 as cited in SEQ ID NO 20670
  misc_feature (1)..(1117): Ortholog of  Ceres SEQ ID NO 15177648 as cited in SEQ ID NO 58917
aaaagatggaaaaagttttctccgacgaagaaatctccggtaaccatcactggtcggttaatggaatgacgtcgttgaatcgcagtgcttccgaatgggcattcaatcgtttcatacaagaatcctccgccgctgcagacgacggagaatctacgacggcgtgtggtgtttccgtctcctctcctcctaatgttcctgtagattcagaggaatacagagcatttctcaagagtaaacttaatcttgcttgtgctgctgtcgccatgaaaagggatacttctggtagatctgacaatggtggagccaatgaatcagaacaagcctctcttgcttcttccaaagctacaccaatgatgagcagtgctataacaagtggatctgagctctctggtgatgaagaagaagctgatggtgaaactaatatgaaccctactaatgttaaacgcgttaaaaggatgctctctaatagagaatcagctagacggtccagaagaagaaagcaagcacacttgagtgagctagagacacaagtttcacagcttcgtgtagagaattcaaaactcatgaagggtctcactgatgtaactcaaacattcaatgatgcatctgtagaaaacagagttttaaaagccaatattgagacactacgagcaaaggtgaaaatggctgaagagacagtgaagagactcactggctttaacccaatgttccacaatatgcctcagattgtttcaactgtctctcttccttcagagacatcaaattctccagacactacaagcagccaagtgactacaccagagatcattagctcggggaacaaaggcaaggccttgatagggtgcaagatgaacagaacagcttcgatgcgtagagttgagagcttggaacatctgcagaaacgtattcgaagcgttggggatcagtagctgttaaagaagaatcttgatttgtaacattaatcttaagacatatgttaagacaaaatgttgtatgtttttgtaaagaattgttttttcagattatttaaatttttttttgtcttcttcgttgattgtttgtgttgaacttctaattttcattgtacatgtcttttgttaaatttacaaagtttttc

SEQ ID NO: 82187 - protein, 308 aa, Arabidopsis thaliana
  peptide (1)..(308): Ceres Seq. ID no. 12663943
KMEKVFSDEEISGNHHWSVNGMTSLNRSASEWAFNRFIQESSAAADDGESTTACGVSVSSPPNVPVDSEEYRAFLKSKLNLACAAVAMKRDTSGRSDNGGANESEQASLASSKATPMMSSAITSGSELSGDEEEADGETNMNPTNVKRVKRMLSNRESARRSRRRKQAHLSELETQVSQLRVENSKLMKGLTDVTQTFNDASVENRVLKANIETLRAKVKMAEETVKRLTGFNPMFHNMPQIVSTVSLPSETSNSPDTTSSQVTTPEIISSGNKGKALIGCKMNRTASMRRVESLEHLQKRIRSVGDQ

SEQ ID NO: 82188 - protein, 307 aa, Arabidopsis thaliana
  peptide (1)..(307): Ceres Seq. ID no. 12663944
MEKVFSDEEISGNHHWSVNGMTSLNRSASEWAFNRFIQESSAAADDGESTTACGVSVSSPPNVPVDSEEYRAFLKSKLNLACAAVAMKRDTSGRSDNGGANESEQASLASSKATPMMSSAITSGSELSGDEEEADGETNMNPTNVKRVKRMLSNRESARRSRRRKQAHLSELETQVSQLRVENSKLMKGLTDVTQTFNDASVENRVLKANIETLRAKVKMAEETVKRLTGFNPMFHNMPQIVSTVSLPSETSNSPDTTSSQVTTPEIISSGNKGKALIGCKMNRTASMRRVESLEHLQKRIRSVGDQ

SEQ ID NO: 82189 - protein, 287 aa, Arabidopsis thaliana
  peptide (1)..(287): Ceres Seq. ID no. 12663945
MTSLNRSASEWAFNRFIQESSAAADDGESTTACGVSVSSPPNVPVDSEEYRAFLKSKLNLACAAVAMKRDTSGRSDNGGANESEQASLASSKATPMMSSAITSGSELSGDEEEADGETNMNPTNVKRVKRMLSNRESARRSRRRKQAHLSELETQVSQLRVENSKLMKGLTDVTQTFNDASVENRVLKANIETLRAKVKMAEETVKRLTGFNPMFHNMPQIVSTVSLPSETSNSPDTTSSQVTTPEIISSGNKGKALIGCKMNRTASMRRVESLEHLQKRIRSVGDQ

SEQ ID NO: 82190 - DNA, 1893 bp, Arabidopsis thaliana
  misc_feature (1)..(1893): Ceres Seq. ID no. 12664124
  misc_feature (1)..(1893): Ortholog of  Ceres SEQ ID NO 13582040 as cited in SEQ ID NO 51006
atgtttgcgaagaacatcaaggaggttgagttgcggatacctcttgttgacgctctagcgctaatcctagatacccacaagtttttgaaagacttgatcgtggagagaattcaagaagtgcaagggatggtagtattgagtcatgaatgcagtgctatcatacagaagaagatcgttcctaagaagcttagtgatcctggttcattcactctaccatgctttttaggtacagtggctttcaacagatgcctatgtgatttaggagcattagtcagtcccatgccactctctattgccaaaagattggggttcactcaatataaatcctgcaacatatcccttatcctagctgacaggtcagtaaggatctcgcatggtttactcaaaaacctaccaatcagaattggagctgcagagatatcaactgactttgtaatcctggagatggatgaagagcccaaggaccctttgattttgagaagacctttcttagcaactgcaggagctatgattgatgtcaagaaagggaagattgatctaaaccttggcaaagactttaggatgacctttgacatcaaagatgcaatgaagaagcctaacatagaagggcaactcttttggatcgaagaaatggatcagttagctgatgagttactagaagagcttgcacaagaagatcaccttaacagtgctttaaccaaaactggtcaagatgggtttctgcatttgaaggttttgggataccagaagcttttagactcacataaagcgatggaagaatccaaaccctttgaggaattgaatggaccagcaacaaaggtaatggtaatgaatgaagaaggatcaacacaagttcaacctgctcactcgagaacttactcgaccaatcactcgacctcgactgtcagcaactctggggagcagatcattccaacttcagatgactggtctaaactcaaagcaccgaaggtttctccagtgcaatgcatccctaaaaagggcggaattactgttattaaaaatgaaaaggatgaattgatccctattagaactataactggtcttagaatgtgtattgattatagaaatctaaatgctgcatctaggaatgatcattttcctttaccattcactgatcaaatgcttgaacgcttagctaatcacccatactattgctttcttgatggatatagtggtttctttcaaataccaattcaccctaatgatcatgagaaaaccactttcacttgtccttatggaacttttgcttatgagagaatgccatttggtttatgcaatgctcctgcaacctttcagaggtgtatgacctctatattttcggatataatcgaggagatggtggaggtcttcatggacgatttttcggtctatggcccctctttctcctcatgtttgttgaatcttggtagggtactaaccaggtgcgaagagactaatcttgttctcaattgggaaaagtgtcatttcatggtgaaggaaggcataatgttgggtcacaagatatcagagaagggtatagaggttgacaagggttgttttcttggtcatgcggggttctacagaagatttattaaggacttctccaaaatagccaggccgttaacaagactattgtgcaaggagaccgagttcgaattcgatgaggactgccccaaatcgtttcacaccatcaaggaagctttggtatctgctcctgttgttcgagctactaattgggattatccgttcgagattatgtgtgatgcattagattacgccgtaggagctgttctaggccagaaaatagacaagaagcttcacgtcatatactacgccagccgaacgttggatgaagctcaaggaagatatgcaaccactgaaaaggagctttaa

SEQ ID NO: 82191 - protein, 630 aa, Arabidopsis thaliana
  peptide (1)..(630): Ceres Seq. ID no. 12664125
MFAKNIKEVELRIPLVDALALILDTHKFLKDLIVERIQEVQGMVVLSHECSAIIQKKIVPKKLSDPGSFTLPCFLGTVAFNRCLCDLGALVSPMPLSIAKRLGFTQYKSCNISLILADRSVRISHGLLKNLPIRIGAAEISTDFVILEMDEEPKDPLILRRPFLATAGAMIDVKKGKIDLNLGKDFRMTFDIKDAMKKPNIEGQLFWIEEMDQLADELLEELAQEDHLNSALTKTGQDGFLHLKVLGYQKLLDSHKAMEESKPFEELNGPATKVMVMNEEGSTQVQPAHSRTYSTNHSTSTVSNSGEQIIPTSDDWSKLKAPKVSPVQCIPKKGGITVIKNEKDELIPIRTITGLRMCIDYRNLNAASRNDHFPLPFTDQMLERLANHPYYCFLDGYSGFFQIPIHPNDHEKTTFTCPYGTFAYERMPFGLCNAPATFQRCMTSIFSDIIEEMVEVFMDDFSVYGPSFSSCLLNLGRVLTRCEETNLVLNWEKCHFMVKEGIMLGHKISEKGIEVDKGCFLGHAGFYRRFIKDFSKIARPLTRLLCKETEFEFDEDCPKSFHTIKEALVSAPVVRATNWDYPFEIMCDALDYAVGAVLGQKIDKKLHVIYYASRTLDEAQGRYATTEKEL

SEQ ID NO: 82192 - protein, 588 aa, Arabidopsis thaliana
  peptide (1)..(588): Ceres Seq. ID no. 12664126
MVVLSHECSAIIQKKIVPKKLSDPGSFTLPCFLGTVAFNRCLCDLGALVSPMPLSIAKRLGFTQYKSCNISLILADRSVRISHGLLKNLPIRIGAAEISTDFVILEMDEEPKDPLILRRPFLATAGAMIDVKKGKIDLNLGKDFRMTFDIKDAMKKPNIEGQLFWIEEMDQLADELLEELAQEDHLNSALTKTGQDGFLHLKVLGYQKLLDSHKAMEESKPFEELNGPATKVMVMNEEGSTQVQPAHSRTYSTNHSTSTVSNSGEQIIPTSDDWSKLKAPKVSPVQCIPKKGGITVIKNEKDELIPIRTITGLRMCIDYRNLNAASRNDHFPLPFTDQMLERLANHPYYCFLDGYSGFFQIPIHPNDHEKTTFTCPYGTFAYERMPFGLCNAPATFQRCMTSIFSDIIEEMVEVFMDDFSVYGPSFSSCLLNLGRVLTRCEETNLVLNWEKCHFMVKEGIMLGHKISEKGIEVDKGCFLGHAGFYRRFIKDFSKIARPLTRLLCKETEFEFDEDCPKSFHTIKEALVSAPVVRATNWDYPFEIMCDALDYAVGAVLGQKIDKKLHVIYYASRTLDEAQGRYATTEKEL

SEQ ID NO: 82193 - protein, 537 aa, Arabidopsis thaliana
  peptide (1)..(537): Ceres Seq. ID no. 12664127
MPLSIAKRLGFTQYKSCNISLILADRSVRISHGLLKNLPIRIGAAEISTDFVILEMDEEPKDPLILRRPFLATAGAMIDVKKGKIDLNLGKDFRMTFDIKDAMKKPNIEGQLFWIEEMDQLADELLEELAQEDHLNSALTKTGQDGFLHLKVLGYQKLLDSHKAMEESKPFEELNGPATKVMVMNEEGSTQVQPAHSRTYSTNHSTSTVSNSGEQIIPTSDDWSKLKAPKVSPVQCIPKKGGITVIKNEKDELIPIRTITGLRMCIDYRNLNAASRNDHFPLPFTDQMLERLANHPYYCFLDGYSGFFQIPIHPNDHEKTTFTCPYGTFAYERMPFGLCNAPATFQRCMTSIFSDIIEEMVEVFMDDFSVYGPSFSSCLLNLGRVLTRCEETNLVLNWEKCHFMVKEGIMLGHKISEKGIEVDKGCFLGHAGFYRRFIKDFSKIARPLTRLLCKETEFEFDEDCPKSFHTIKEALVSAPVVRATNWDYPFEIMCDALDYAVGAVLGQKIDKKLHVIYYASRTLDEAQGRYATTEKEL

SEQ ID NO: 82194 - DNA, 570 bp, Arabidopsis thaliana
  misc_feature (1)..(570): Ceres Seq. ID no. 12664269
  misc_feature (1)..(570): Ortholog of  Ceres SEQ ID NO 13595804 as cited in SEQ ID NO 59306
  misc_feature (1)..(570): Ortholog of  Ceres SEQ ID NO 13599185 as cited in SEQ ID NO 0
ataattaattgatctctggagatttgctgttgacgaataagaagaagaacccagaattctactttaatggcgtacgtcgaaggaggtgtggttaaagcgaagaggccaatatggagactaaggacgatcaaagatttcttcttgtccatcattaatctaatacaagtcttctttgtaaccatgttttcgatggagaaatcagatgcatacaggaaaggctctaagcctaataagaagtggggtggtggcatgggtggcggtggtggtggaggcggaggcagtggcggtggtggtggtggtaggggtggtggacctcctcgtgggggcctcgacaatgttcgtggtttgaatgatatccgtggagctgaccacaattccctacctgcatgtggctcgtgctgtggctaatccttgtttgtgtggacagtggagcgcccaagaataaacgaagggatatatcatatatttacatattacttagtgttgaaaacgatgcttttggaatatgaaaaatcaaaggaacaatgattctggtgtattttgtaattgggtctaatcaaagctttttgt

SEQ ID NO: 82195 - protein, 113 aa, Arabidopsis thaliana
  peptide (1)..(113): Ceres Seq. ID no. 12664270
MAYVEGGVVKAKRPIWRLRTIKDFFLSIINLIQVFFVTMFSMEKSDAYRKGSKPNKKWGGGMGGGGGGGGGSGGGGGGRGGGPPRGGLDNVRGLNDIRGADHNSLPACGSCCG

SEQ ID NO: 82196 - protein, 75 aa, Arabidopsis thaliana
  peptide (1)..(75): Ceres Seq. ID no. 12664271
MFSMEKSDAYRKGSKPNKKWGGGMGGGGGGGGGSGGGGGGRGGGPPRGGLDNVRGLNDIRGADHNSLPACGSCCG

SEQ ID NO: 82197 - protein, 72 aa, Arabidopsis thaliana
  peptide (1)..(72): Ceres Seq. ID no. 12664272
MEKSDAYRKGSKPNKKWGGGMGGGGGGGGGSGGGGGGRGGGPPRGGLDNVRGLNDIRGADHNSLPACGSCCG

SEQ ID NO: 82198 - DNA, 639 bp, Arabidopsis thaliana
  misc_feature (1)..(639): Ceres Seq. ID no. 12664273
  misc_feature (1)..(639): Ortholog of  Ceres SEQ ID NO 14316158 as cited in SEQ ID NO 52413
atggaggatcggttctccgctatcaccaatcttcatggagatcataaacaggcaatatttggagtctatgttggtcatggaggagttaaagcggctgagtttgcagctaagaacttagataagaacattgtagaagaagtagttgacgcaacgtttcttaaggaggaaggttttaagggtggttcatcctgtgtcacggctttggttagcgaagggagccttgttgtgtcaaacgccggtgactgtcgtgctgttatgagtgtaggagagatgatgaacggaaaagaattgaaaccacgggaggatatgttgatacgtttcacgttgtggagaatccagggatccttagttgtgccaagaggaatcggagatgctcaacttaagaaatgggttatagctgaaccagagacaaagatctcgagagttgagcatgaccatgagttcttaatcttggcatcacatggtttatgggataaggtaagtaaccaagaagcagtagacattgctcgtcccttctgcttacgaaccgagaagccattgttgttagcagcttgtaagaagcttgttgatctctcggcttcacgaggctcgtttgatgatatcagtgtgatgttgatcccattgcgccagttcgtatag

SEQ ID NO: 82199 - protein, 212 aa, Arabidopsis thaliana
  peptide (1)..(212): Ceres Seq. ID no. 12664274
MEDRFSAITNLHGDHKQAIFGVYVGHGGVKAAEFAAKNLDKNIVEEVVDATFLKEEGFKGGSSCVTALVSEGSLVVSNAGDCRAVMSVGEMMNGKELKPREDMLIRFTLWRIQGSLVVPRGIGDAQLKKWVIAEPETKISRVEHDHEFLILASHGLWDKVSNQEAVDIARPFCLRTEKPLLLAACKKLVDLSASRGSFDDISVMLIPLRQFV

SEQ ID NO: 82200 - protein, 127 aa, Arabidopsis thaliana
  peptide (1)..(127): Ceres Seq. ID no. 12664275
MSVGEMMNGKELKPREDMLIRFTLWRIQGSLVVPRGIGDAQLKKWVIAEPETKISRVEHDHEFLILASHGLWDKVSNQEAVDIARPFCLRTEKPLLLAACKKLVDLSASRGSFDDISVMLIPLRQFV

SEQ ID NO: 82201 - protein, 122 aa, Arabidopsis thaliana
  peptide (1)..(122): Ceres Seq. ID no. 12664276
MMNGKELKPREDMLIRFTLWRIQGSLVVPRGIGDAQLKKWVIAEPETKISRVEHDHEFLILASHGLWDKVSNQEAVDIARPFCLRTEKPLLLAACKKLVDLSASRGSFDDISVMLIPLRQFV

SEQ ID NO: 82202 - DNA, 1107 bp, Arabidopsis thaliana
  misc_feature (1)..(1107): Ceres Seq. ID no. 12664280
  misc_feature (1)..(1107): Ortholog of  Ceres SEQ ID NO 13595351 as cited in SEQ ID NO 55934
  misc_feature (1)..(1107): Ortholog of  Ceres SEQ ID NO 13639645 as cited in SEQ ID NO 57488
atggataaattgaagccaataatagcaatcatatcactccaatttggatatgcaggcatgtacatcattactatggtctccttcaagcatggcatgaaccattggatccttgctacttaccgacatgtcgtcgccacaattgtcatagctccttttgctctcattctcgagaggaaaataaggcctaagatgacatggccattgttccttaggattcttgcccttggattcctagaaccacttttggaccagaacttgtactacataggaatgaaagccacgtcagcaacgtatagttctgcctttgttaatgcacttcccgccattaccttcataatggctgtcattttcaggatagaaactgtaaatttgaagaagacacgaagtcttgcaaaagtgattggaacagcaataactgtgggaggagcaatggttatgacgttgtacaaaggtccagccattgagctctttaagactgctcatagctctttacacggcggctcctcgggcacctcctccgagaccactgatcagaattgggttaccggaactctagcggttatgggtagtatcaccacttgggcaggtttcttcattctacaatcgttcacgttgaaaaaatatccggctgagctttcgctagtgatgtggatttgtgccatgggaacggtcttaaacaccatcgcttcgctcataatggtgcgcgacgtaagcgcatggaaagtcggtatggactcgggcacacttgcggctgtttactccggagtggtttgttcgggtatggcgtattacatacaaagcattgtgattagggaacgaggtccggtttttacgacatcgtttagtcctatgtgcatgatcatcactgctttcctcggcgtgttagttttggctgaaaagattcaccttggaagtataatcggggcgatttttatcgtcttcgggctatatagcgttgtgtgggggaaagctaaggacgaagtgatatcggtggaagagaaaataggaatgcaggagctgccgatcaccaacacatcgacaaaagtggagggtggtggtattaccagtgaagtaaacgaaggtgtgactaacaatacccaagtgtaa

SEQ ID NO: 82203 - protein, 368 aa, Arabidopsis thaliana
  peptide (1)..(368): Ceres Seq. ID no. 12664281
MDKLKPIIAIISLQFGYAGMYIITMVSFKHGMNHWILATYRHVVATIVIAPFALILERKIRPKMTWPLFLRILALGFLEPLLDQNLYYIGMKATSATYSSAFVNALPAITFIMAVIFRIETVNLKKTRSLAKVIGTAITVGGAMVMTLYKGPAIELFKTAHSSLHGGSSGTSSETTDQNWVTGTLAVMGSITTWAGFFILQSFTLKKYPAELSLVMWICAMGTVLNTIASLIMVRDVSAWKVGMDSGTLAAVYSGVVCSGMAYYIQSIVIRERGPVFTTSFSPMCMIITAFLGVLVLAEKIHLGSIIGAIFIVFGLYSVVWGKAKDEVISVEEKIGMQELPITNTSTKVEGGGITSEVNEGVTNNTQV

SEQ ID NO: 82204 - protein, 349 aa, Arabidopsis thaliana
  peptide (1)..(349): Ceres Seq. ID no. 12664282
MYIITMVSFKHGMNHWILATYRHVVATIVIAPFALILERKIRPKMTWPLFLRILALGFLEPLLDQNLYYIGMKATSATYSSAFVNALPAITFIMAVIFRIETVNLKKTRSLAKVIGTAITVGGAMVMTLYKGPAIELFKTAHSSLHGGSSGTSSETTDQNWVTGTLAVMGSITTWAGFFILQSFTLKKYPAELSLVMWICAMGTVLNTIASLIMVRDVSAWKVGMDSGTLAAVYSGVVCSGMAYYIQSIVIRERGPVFTTSFSPMCMIITAFLGVLVLAEKIHLGSIIGAIFIVFGLYSVVWGKAKDEVISVEEKIGMQELPITNTSTKVEGGGITSEVNEGVTNNTQV

SEQ ID NO: 82205 - protein, 344 aa, Arabidopsis thaliana
  peptide (1)..(344): Ceres Seq. ID no. 12664283
MVSFKHGMNHWILATYRHVVATIVIAPFALILERKIRPKMTWPLFLRILALGFLEPLLDQNLYYIGMKATSATYSSAFVNALPAITFIMAVIFRIETVNLKKTRSLAKVIGTAITVGGAMVMTLYKGPAIELFKTAHSSLHGGSSGTSSETTDQNWVTGTLAVMGSITTWAGFFILQSFTLKKYPAELSLVMWICAMGTVLNTIASLIMVRDVSAWKVGMDSGTLAAVYSGVVCSGMAYYIQSIVIRERGPVFTTSFSPMCMIITAFLGVLVLAEKIHLGSIIGAIFIVFGLYSVVWGKAKDEVISVEEKIGMQELPITNTSTKVEGGGITSEVNEGVTNNTQV

SEQ ID NO: 82206 - DNA, 2311 bp, Arabidopsis thaliana
  misc_feature (1)..(2311): Ceres Seq. ID no. 12664333
  misc_feature (1)..(2311): Ortholog of  Ceres SEQ ID NO 13586013 as cited in SEQ ID NO 1182
attccaatctctcaagaaaatctacagttcctccaaataataataccctccctctaaggcaactaattttcagcaatcatgtccgggactattaatcccccggacggaggagggtccggtgcaagaaacccaccagtcgttcgtcagagagtgctagctcctccgaaagcgggtttactaaaggacatcaagtccgtggttgaagaaactttcttccatgatgctccgcttagggatttcaagggccaaaccccagctaaaaaagcgttgctcgggatccaggctgtcttcccgatcatcgggtgggccagagaatacactcttcgcaaatttagaggtgatctcatcgccggtctcaccattgctagtctttgtatccctcaggatatcggatatgcaaaactcgcgaatgtcgatccgaaatacggactttattcgagtttcgtgccaccgctgatttacgcgggcatggggagttctagggatattgcgataggaccagtcgctgtggtgtctcttcttgtgggaactttgtgccaggccgtgatcgacccaaagaaaaacccggaggattatctccgacttgtcttcactgccactttctttgctggcattttccaagccggcctcggatttctacggttgggattcttgatagactttctgtcgcatgcggccgtggttgggttcatgggaggagcagccatcacaatcgctctccaacagcttaagggctttcttggcatcaaaacatttaccaagaaaactgatattgtttctgtcatgcactccgtattcaaaaacgctgagcatgggtggaattggcaaactatagtcattggcgccagtttcttgacctttcttctcgtcaccaaattcattgggaagagaaacaggaaactattttgggttccggcaattgcgcctcttatttcagtcattatctctaccttctttgtcttcatttttcgtgctgataaacaaggagtccaaattgtgaaacatatagatcaaggaatcaatccgatttccgttcataagattttcttctccggaaaatatttcaccgaaggaatccgaatcggaggcattgcgggtatggtcgccttaacggaggctgtagcgattgcaagaacatttgcggcaatgaaagactatcaaattgatggaaacaaagagatgattgccctagggactatgaacgtcgtcggttcaatgacctcttgttacattgccacgggttcgttttcgcgatctgccgtgaacttcatggcgggagtcgaaacggcggtttcaaacatagttatggccatagttgtagctctaaccttagagttcatcacaccactcttcaagtacactccaaatgctatcctcgcggccatcattatatcggctgtcctcggtcttatcgatattgacgcagcgattctcatatggaggatcgataaactcgacttcttggcttgcatgggagctttcttaggagtcatcttcatctcggttgagatcggtctcttgatcgctgtggtgatctcttttgcaaagatattgcttcaagtgacgagaccaagaaccacggttctagggaagctgccaaattcgaatgtatatcggaacactctacagtatccggacgctgcccaaattcccggaatcttgatcatccgtgttgactcggccatctacttttccaactccaactatgtccgagaaagggcatcaagatgggtgcgagaggagcaagaaaatgctaaggaatatggcatgccggcaatcagatttgtgattattgagatgtcaccggttaccgatatcgataccagtggtatccactccatcgaagaacttctcaagagcctcgagaagcaagaaattcagttgattctagcaaatccaggaccagtggtgattgagaaactttatgcttcaaagttcgtcgaggagattggagagaaaaatatcttccttactgttggcgacgcggtcgcagtttgttctacggaagtggctgagcaacaaacttaatatcgtctattcatatacataaacacatccatatatgtatgtgtatatatatatgaaagaaactaatttaagaactatgggttattttcatttttttgagatgatatgatattatgtgtgtaatatatgcatgattgttgaatttgtttggttcacacaatggtgagatgggaacaaagtcgaacgtttgacttttatttttattttttaatctttcaaatgttattttctcgtgatttgtgtttcgtttgagatgatgaataaattgtattttcaacttata

SEQ ID NO: 82207 - protein, 649 aa, Arabidopsis thaliana
  peptide (1)..(649): Ceres Seq. ID no. 12664334
MSGTINPPDGGGSGARNPPVVRQRVLAPPKAGLLKDIKSVVEETFFHDAPLRDFKGQTPAKKALLGIQAVFPIIGWAREYTLRKFRGDLIAGLTIASLCIPQDIGYAKLANVDPKYGLYSSFVPPLIYAGMGSSRDIAIGPVAVVSLLVGTLCQAVIDPKKNPEDYLRLVFTATFFAGIFQAGLGFLRLGFLIDFLSHAAVVGFMGGAAITIALQQLKGFLGIKTFTKKTDIVSVMHSVFKNAEHGWNWQTIVIGASFLTFLLVTKFIGKRNRKLFWVPAIAPLISVIISTFFVFIFRADKQGVQIVKHIDQGINPISVHKIFFSGKYFTEGIRIGGIAGMVALTEAVAIARTFAAMKDYQIDGNKEMIALGTMNVVGSMTSCYIATGSFSRSAVNFMAGVETAVSNIVMAIVVALTLEFITPLFKYTPNAILAAIIISAVLGLIDIDAAILIWRIDKLDFLACMGAFLGVIFISVEIGLLIAVVISFAKILLQVTRPRTTVLGKLPNSNVYRNTLQYPDAAQIPGILIIRVDSAIYFSNSNYVRERASRWVREEQENAKEYGMPAIRFVIIEMSPVTDIDTSGIHSIEELLKSLEKQEIQLILANPGPVVIEKLYASKFVEEIGEKNIFLTVGDAVAVCSTEVAEQQT

SEQ ID NO: 82208 - protein, 519 aa, Arabidopsis thaliana
  peptide (1)..(519): Ceres Seq. ID no. 12664335
MGSSRDIAIGPVAVVSLLVGTLCQAVIDPKKNPEDYLRLVFTATFFAGIFQAGLGFLRLGFLIDFLSHAAVVGFMGGAAITIALQQLKGFLGIKTFTKKTDIVSVMHSVFKNAEHGWNWQTIVIGASFLTFLLVTKFIGKRNRKLFWVPAIAPLISVIISTFFVFIFRADKQGVQIVKHIDQGINPISVHKIFFSGKYFTEGIRIGGIAGMVALTEAVAIARTFAAMKDYQIDGNKEMIALGTMNVVGSMTSCYIATGSFSRSAVNFMAGVETAVSNIVMAIVVALTLEFITPLFKYTPNAILAAIIISAVLGLIDIDAAILIWRIDKLDFLACMGAFLGVIFISVEIGLLIAVVISFAKILLQVTRPRTTVLGKLPNSNVYRNTLQYPDAAQIPGILIIRVDSAIYFSNSNYVRERASRWVREEQENAKEYGMPAIRFVIIEMSPVTDIDTSGIHSIEELLKSLEKQEIQLILANPGPVVIEKLYASKFVEEIGEKNIFLTVGDAVAVCSTEVAEQQT

SEQ ID NO: 82209 - protein, 445 aa, Arabidopsis thaliana
  peptide (1)..(445): Ceres Seq. ID no. 12664336
MGGAAITIALQQLKGFLGIKTFTKKTDIVSVMHSVFKNAEHGWNWQTIVIGASFLTFLLVTKFIGKRNRKLFWVPAIAPLISVIISTFFVFIFRADKQGVQIVKHIDQGINPISVHKIFFSGKYFTEGIRIGGIAGMVALTEAVAIARTFAAMKDYQIDGNKEMIALGTMNVVGSMTSCYIATGSFSRSAVNFMAGVETAVSNIVMAIVVALTLEFITPLFKYTPNAILAAIIISAVLGLIDIDAAILIWRIDKLDFLACMGAFLGVIFISVEIGLLIAVVISFAKILLQVTRPRTTVLGKLPNSNVYRNTLQYPDAAQIPGILIIRVDSAIYFSNSNYVRERASRWVREEQENAKEYGMPAIRFVIIEMSPVTDIDTSGIHSIEELLKSLEKQEIQLILANPGPVVIEKLYASKFVEEIGEKNIFLTVGDAVAVCSTEVAEQQT

SEQ ID NO: 82210 - DNA, 900 bp, Arabidopsis thaliana
  misc_feature (1)..(900): Ceres Seq. ID no. 12664380
  misc_feature (1)..(900): Ortholog of  Ceres SEQ ID NO 13599568 as cited in SEQ ID NO 509
  misc_feature (1)..(900): Ortholog of  Ceres SEQ ID NO 13638595 as cited in SEQ ID NO 52050
  misc_feature (1)..(900): Ortholog of  Ceres SEQ ID NO 13594748 as cited in SEQ ID NO 52114
  misc_feature (1)..(900): Ortholog of  Ceres SEQ ID NO 12623490 as cited in SEQ ID NO 61136
  misc_feature (1)..(900): Ortholog of  Ceres SEQ ID NO 12583993 as cited in SEQ ID NO 68098
  misc_feature (1)..(900): Ortholog of  Ceres SEQ ID NO 13654535 as cited in SEQ ID NO 68227
ctctcaacaactacttgtttagagagagtcccaccaccaccactaccacaatcccaatggcttcaccaactcttactctcctcctcctcctcaccaccgtctccttcttcatctcctcctccgcagatcctgacatgcttcaagatctctgcgtcgctgatcttccctctggaatcaaaatcaatggcttcccttgcaaagacgcagctacagtcacatcagccgatttcttctcacaaggattagctaaaccaggtcttaccaacaacacattcggtgccttagtcacaggagctaacgttatgacaatcccaggactcaacacacttggtgtctccctctctcgtatcgactacgcaccaggaggcttaaacccacctcacacccacccacgtgccactgaggtcgttttcgtcctcgaaggaacacttgacgttgggtttctcactactgccaataagctaatctctcaatctctcaagaaaggagatgtctttgctttccccaaaggacttgtccatttccagaagaacaatggtgatgtccctgcttctgttattgcagctttcaatagtcagcttcctggaactcaatctcttggtgctactttgtttggttctactcctcctgttcctgacaacatcttggctcaagcctttcagacttctccaggaactgttaaacacatcaaatccaagttccaacccaagaaatgatcatcacccttcctttatattcattactacagttctgtttttttctaaagggaagatctttttatcttctttgatttgtcttctgtaataaaaaaggaacaataactgatgatcttcagtgtgcatttgagctccatagtctcatgtattcgtcttcttgtataatccatattattttttgttc

SEQ ID NO: 82211 - protein, 237 aa, Arabidopsis thaliana
  peptide (1)..(237): Ceres Seq. ID no. 12664381
LNNYLFRESPTTTTTTIPMASPTLTLLLLLTTVSFFISSSADPDMLQDLCVADLPSGIKINGFPCKDAATVTSADFFSQGLAKPGLTNNTFGALVTGANVMTIPGLNTLGVSLSRIDYAPGGLNPPHTHPRATEVVFVLEGTLDVGFLTTANKLISQSLKKGDVFAFPKGLVHFQKNNGDVPASVIAAFNSQLPGTQSLGATLFGSTPPVPDNILAQAFQTSPGTVKHIKSKFQPKK

SEQ ID NO: 82212 - protein, 219 aa, Arabidopsis thaliana; identical to SEQ ID NO: 30505
  peptide (1)..(219): Ceres Seq. ID no. 12664382

SEQ ID NO: 82213 - protein, 193 aa, Arabidopsis thaliana; identical to SEQ ID NO: 30506
  peptide (1)..(193): Ceres Seq. ID no. 12664383

SEQ ID NO: 82214 - DNA, 648 bp, Arabidopsis thaliana
  misc_feature (1)..(648): Ceres Seq. ID no. 12664388
  misc_feature (1)..(648): Ortholog of  Ceres SEQ ID NO 12473977 as cited in SEQ ID NO 133
  misc_feature (1)..(648): Ortholog of  Ceres SEQ ID NO 12585294 as cited in SEQ ID NO 63023
atgactgctaagatgcgccgtgaattcccgacggcgttccttctcttgtttctggttccggtgatgattccggtcggtgaggctgtatggctagatgtgcctcccaccggaacaaagtgtgtatctgaagaaatccagagcaatgtcgtcgttttggctgattacctcatcatctccgaggatcacgaggtcatgcccactatatccgtcaaggtgacatccccatatggcaacaatctgcacaatatggaaaacgtaacgcatggccaatttgcatttacaacccaagaatcagggaactacttggcgtgcttttgggcagatgaaaagagtcacggaaacaaaaatgttagcatcaacattgactggagaactggaatcgctgctaaggattgggcctctattgctaagaaagagaagatcgagggtgtggagctggagatcaggaaactcgaaggcgcagtcgaagccatccatgaaaatatactctacctaagaaacagagaagcagacatgaggacaatgagtgagaaaacgaactcgcgggtggcttggtacagtataatgtcactaggtgtttgcattgctgtctctggtttccaggtactctacttgaagcagtactttgagaagaagaagcttatatag

SEQ ID NO: 82215 - protein, 215 aa, Arabidopsis thaliana; identical to SEQ ID NO: 47633
  peptide (1)..(215): Ceres Seq. ID no. 12664389

SEQ ID NO: 82216 - protein, 211 aa, Arabidopsis thaliana
  peptide (1)..(211): Ceres Seq. ID no. 12664390
MRREFPTAFLLLFLVPVMIPVGEAVWLDVPPTGTKCVSEEIQSNVVVLADYLIISEDHEVMPTISVKVTSPYGNNLHNMENVTHGQFAFTTQESGNYLACFWADEKSHGNKNVSINIDWRTGIAAKDWASIAKKEKIEGVELEIRKLEGAVEAIHENILYLRNREADMRTMSEKTNSRVAWYSIMSLGVCIAVSGFQVLYLKQYFEKKKLI

SEQ ID NO: 82217 - protein, 194 aa, Arabidopsis thaliana
  peptide (1)..(194): Ceres Seq. ID no. 12664391
MIPVGEAVWLDVPPTGTKCVSEEIQSNVVVLADYLIISEDHEVMPTISVKVTSPYGNNLHNMENVTHGQFAFTTQESGNYLACFWADEKSHGNKNVSINIDWRTGIAAKDWASIAKKEKIEGVELEIRKLEGAVEAIHENILYLRNREADMRTMSEKTNSRVAWYSIMSLGVCIAVSGFQVLYLKQYFEKKKLI

SEQ ID NO: 82218 - DNA, 1521 bp, Arabidopsis thaliana
  misc_feature (1)..(1521): Ceres Seq. ID no. 12664429
  misc_feature (1)..(1521): Ortholog of  Ceres SEQ ID NO 15175949 as cited in SEQ ID NO 58819
  misc_feature (1)..(1521): Ortholog of  Ceres SEQ ID NO 13596660 as cited in SEQ ID NO 63180
atggatgcaagattcttgtaccccttggagagctgtaaaatcattcacttgttgcgacatggacaagcgttgcacaatgtagaagctgagaaagatagaaatgcgttgttgtctcctcatctttttgatgctccgcttaccgatcatggtcaccaacaggttgagaatctccgcgaacgagttgtttcaagcgggctactaaagagggttgagctagttgtaacttctccgttgtttagaactatgcaaaccgcagttggtgtttttggaaatgaatacaaacaatcgagtatgacaagtagccctcccattttggcacttgaggttgctcgagaccgtaatggagtccgtcctcctgacatgagaagaaacattgaaagtgaagaggacaacctatggagaccggatgttagggagtccgaagaggagattttggcgagagggttagagttcatgaaatggttatggaagaggccagagaaggaggtcgcagttgttagccatggaatagttttgcagcatatgttgtatgtgtttgcaaacgattgtgacctgtcaattagacatgaactttgcaagaggtttgccaattgcgaaattcgtactgtcgtgattgtagacaaaggacttccaagttccttccaagtaaccaacctatctattccaaaagtcggtagtttaaggacgtcactacctacatacatggatttatgtggaactcagatgctgcgcctctcatcgcctcatttcaaaacccttcatttggtgaggcatgcacaaggagtccacaatatagcattagaagagaagggagagaaacctgaatcagaaaagctttttgacgcccacctttctccaaagggtttgcaacaggtttcggaaaggcgcaaccaaatccttgaatcaggattacttaacactgtcgagttagtgataacctctccgctgtgcagcacgaatagtaacactgttccatttaatttcagagcaatggaaacttcaataggaatatttaggggacaaggatatgtaaatatatccgaagactttgcaaaagctaacaacttccctccaattgtagcacttgagatctgtagagaacgcatgggactctatccatgtgatcgtagagcaagtataagtactcgccgcactttttttcctgagatcgactttacaatggtgatagagagtgatgaagacgctctatggcaagacaaggaaagggaaaaattagaagatgttgctactagaggtcttcactttgttaaatggttatgggagagaccagaaaaagagatagcaattgtaagccacgggattttcttgcaacaaacactttgtgcgctgcatggaaaagttggcatacctcttgaagatagtctccttacaaggtttgccaattgtgaactccggtcgattcggatagagaagagtgacatggaagcggatacattaatgacttgtaactgtagaaattacgttactccaccttcaacttccttccattcacacgcttga

SEQ ID NO: 82219 - protein, 506 aa, Arabidopsis thaliana
  peptide (1)..(506): Ceres Seq. ID no. 12664430
MDARFLYPLESCKIIHLLRHGQALHNVEAEKDRNALLSPHLFDAPLTDHGHQQVENLRERVVSSGLLKRVELVVTSPLFRTMQTAVGVFGNEYKQSSMTSSPPILALEVARDRNGVRPPDMRRNIESEEDNLWRPDVRESEEEILARGLEFMKWLWKRPEKEVAVVSHGIVLQHMLYVFANDCDLSIRHELCKRFANCEIRTVVIVDKGLPSSFQVTNLSIPKVGSLRTSLPTYMDLCGTQMLRLSSPHFKTLHLVRHAQGVHNIALEEKGEKPESEKLFDAHLSPKGLQQVSERRNQILESGLLNTVELVITSPLCSTNSNTVPFNFRAMETSIGIFRGQGYVNISEDFAKANNFPPIVALEICRERMGLYPCDRRASISTRRTFFPEIDFTMVIESDEDALWQDKEREKLEDVATRGLHFVKWLWERPEKEIAIVSHGIFLQQTLCALHGKVGIPLEDSLLTRFANCELRSIRIEKSDMEADTLMTCNCRNYVTPPSTSFHSHA

SEQ ID NO: 82220 - protein, 425 aa, Arabidopsis thaliana
  peptide (1)..(425): Ceres Seq. ID no. 12664431
MQTAVGVFGNEYKQSSMTSSPPILALEVARDRNGVRPPDMRRNIESEEDNLWRPDVRESEEEILARGLEFMKWLWKRPEKEVAVVSHGIVLQHMLYVFANDCDLSIRHELCKRFANCEIRTVVIVDKGLPSSFQVTNLSIPKVGSLRTSLPTYMDLCGTQMLRLSSPHFKTLHLVRHAQGVHNIALEEKGEKPESEKLFDAHLSPKGLQQVSERRNQILESGLLNTVELVITSPLCSTNSNTVPFNFRAMETSIGIFRGQGYVNISEDFAKANNFPPIVALEICRERMGLYPCDRRASISTRRTFFPEIDFTMVIESDEDALWQDKEREKLEDVATRGLHFVKWLWERPEKEIAIVSHGIFLQQTLCALHGKVGIPLEDSLLTRFANCELRSIRIEKSDMEADTLMTCNCRNYVTPPSTSFHSHA

SEQ ID NO: 82221 - protein, 409 aa, Arabidopsis thaliana
  peptide (1)..(409): Ceres Seq. ID no. 12664432
MTSSPPILALEVARDRNGVRPPDMRRNIESEEDNLWRPDVRESEEEILARGLEFMKWLWKRPEKEVAVVSHGIVLQHMLYVFANDCDLSIRHELCKRFANCEIRTVVIVDKGLPSSFQVTNLSIPKVGSLRTSLPTYMDLCGTQMLRLSSPHFKTLHLVRHAQGVHNIALEEKGEKPESEKLFDAHLSPKGLQQVSERRNQILESGLLNTVELVITSPLCSTNSNTVPFNFRAMETSIGIFRGQGYVNISEDFAKANNFPPIVALEICRERMGLYPCDRRASISTRRTFFPEIDFTMVIESDEDALWQDKEREKLEDVATRGLHFVKWLWERPEKEIAIVSHGIFLQQTLCALHGKVGIPLEDSLLTRFANCELRSIRIEKSDMEADTLMTCNCRNYVTPPSTSFHSHA

SEQ ID NO: 82222 - DNA, 2868 bp, Arabidopsis thaliana
  misc_feature (1)..(2868): Ceres Seq. ID no. 12664523
  misc_feature (1)..(2868): Ortholog of  Ceres SEQ ID NO 13663942 as cited in SEQ ID NO 67573
atgcgtctgcgtcaccaaggaggacaatacttggctcgcggtatggaacccgtgtactggtcaaacaaggtggattcaacccatgacttatatgacaactatactctcggatcctaccaaaataatagctacaatatattggcacacactggttttggctacgaccacgaattccaaatttatgaaattaactccaattcatggaggattattgatgccactttggacttcaaattagggtatattggtcgtggcgtgtctttgaagggaaagacttactggattgctagtggtgaagaagagaaacggcttggcaaattcttaatcagttttgattatacgacagaaagatttgaacgtctatgtcttccgaataagtatccttgttatgcaactctggctctatccgttgttagagaagagaaactttccatgttatcgcaacgcggaattaaatcaaaggcagaaatatgggtgacaaataagattggtgagacacaagtggtgtcgtggagcatggtcttagctttggatttgcagcctaaacgttgtattggggaaagcggaagtttcttggtcgacgagaagaagagagtggtcgtgtgttgtgataatattagagaccaaggaaaaaccacgtttgactcaaatctaccaaggtatcacaggcaaaagaaaaagggacgaatgatcatagtgtttgacgttgaatcaatgagactccccgtcaccgtcaaagccactaagccgtcgtttctcgtcatttggatccgatactcctccgccgcgtcgtcgccgacagtctccttgaatccaagtggacgattacagcaaactctcgcaggatctgtggaagtgaaaggaaaatctctgcactccggtaagttctcgacggtgaagctaaatccggagatcgccggagctggtaggttcttcgagtttcgatccagattcatccctgcgtcgattgaatttgctcaggaatcgcctctttgcacgacgctgttgaaagatgagctcaaaatccgaaccgttgagcatttgttatcagctcttgaggcgaagggagttgataattgcaggattcaaatcgagagcgaaagttccgatgatcgagaagtcgaggtccctatttttgatggatcagctaaagaatgggtcgatgcgatacaaggagttggcataaacgcggctcaaaaccatgatggtgaaagtgtagagaagatggtcgcacatgtgaacaagcctgtgtatgtttgcaagaacgatacttttgttgctgcatttccggctctagagactcggatcacttgtggtatcgacttcccacaggtgcctgctataggctgccaatggttttcttggagacctatccatgagtcttcttttgcaaaggatatcgcatcatcaagaaccttctgtgtctatgaagaggtggagcgtatgcgtgaagcagggctcattaaaggaggttctctggataacgccatagtttgtagcgctgagcatggatggatgaatcctcctctgcggtttgatgatgaagcatgtcgacataagattcttgacctaatcggtgacctctcccttgtttcacggggcggaaatggaggactccccgtggctcacatagtcgcatataagaatgaggaggaggaggtgcgatcttcaaccgaagagaacgagaatgtgcgatcttcaaccgaagagaacgagtatgtgcgatcttccaccgaagctggtaggggagaagatcctcacgaggattccgataacatctctgagagcggtgcgatccacttgcaaattatggaacgctttaaccaaagatcgggttctggcaaggaggaagaagaagacacgatggatctatctataaagcaggtagatttgcttaatcaagtcgagatatctagggtgtatcactgcgacggcttgttgttatgcgtggctaaggacaactcgagggtcgtggtttggaacccttatttggggcaaacaagatggatcagacccagaacagaatccaacataggagacagctatgctcttggatacgacatcaaccgtaaccacaaaatcttgaggatggtgcagacaagaaacgtttccgtttacaggtacgaaatctacgacttgcgctctaattcatggagggttctcgaggtcactcccaacggggaaatggaccctaatcatcccctctacggcgtttctgtgaagggaaatacctacttttttgcgcatgaggatagcagcagtggtgaaattgatgaagatggcgacataatcgatcttgaagatttcttactctgttttgattttacaacagagacatttggtctgcgtctgcctcttccgtttcactctactatcgatgcgactgtgaccctctcttgtgttagagaccagcagctcgcggtgctatatcataatgagggtcttcacagtgatgatcggtttaccacagttgagttttgggttactactagtattgagcccaactctgtgtcctggagcaagtttttgacagtggatatgagaccattggcactcactggtgttcggtttgacaatgatatgggtgccaccttcttcattgacgaggatgagaaagttgctgtggttttcgatctagacggatacctaagcaccgagagcgctcgttaccacaccgcttttatcagtggaaaggatggattctttaaacctgtgactctaggagtagctcccaatgtcggggaaccttgtcccagaaccgggcatattccgactacatatcgtcccccgcttgtctgctcgtctacttaccttccgagtttagtgcaagtcaaccaacagcgcaaaaggaaagaaagacatgtttag

SEQ ID NO: 82223 - protein, 955 aa, Arabidopsis thaliana; identical to SEQ ID NO: 80444
  peptide (1)..(955): Ceres Seq. ID no. 12664524

SEQ ID NO: 82224 - protein, 941 aa, Arabidopsis thaliana; identical to SEQ ID NO: 80445
  peptide (1)..(941): Ceres Seq. ID no. 12664525

SEQ ID NO: 82225 - protein, 811 aa, Arabidopsis thaliana; identical to SEQ ID NO: 80446
  peptide (1)..(811): Ceres Seq. ID no. 12664526

SEQ ID NO: 82226 - DNA, 1108 bp, Arabidopsis thaliana
  misc_feature (1)..(1108): Ceres Seq. ID no. 12664534
  misc_feature (1)..(1108): Ortholog of  Ceres SEQ ID NO 14307589 as cited in SEQ ID NO 20466
  misc_feature (1)..(1108): Ortholog of  Ceres SEQ ID NO 14313599 as cited in SEQ ID NO 54989
  misc_feature (1)..(1108): Ortholog of  Ceres SEQ ID NO 15176204 as cited in SEQ ID NO 55608
  misc_feature (1)..(1108): Ortholog of  Ceres SEQ ID NO 15225111 as cited in SEQ ID NO 58444
  misc_feature (1)..(1108): Ortholog of  Ceres SEQ ID NO 14313064 as cited in SEQ ID NO 59543
  misc_feature (1)..(1108): Ortholog of  Ceres SEQ ID NO 13584238 as cited in SEQ ID NO 64216
  misc_feature (1)..(1108): Ortholog of  Ceres SEQ ID NO 13661001 as cited in SEQ ID NO 67531
  misc_feature (1)..(1108): Ortholog of  Ceres SEQ ID NO 15178920 as cited in SEQ ID NO 0
aaatcataaaagcctctctcttagtctatttttatctcacggctctctctcccctctctacacacacaaacacaaataaagcgtaaaactgaaatattttaattacaattagaaagagaacatattaatatgtcaaatataacaaagaagaagtgtaatggaaatgaagagggtgcagagcagaggaaagggccttggacactcgaggaagacactcttctcaccaattacatttcccataacggtgaaggccgatggaatctgctcgctaaatcttctgggctaaagagagcaggaaaaagttgtagattgagatggttgaattaccttaaacccgacataaagcgtgggaatctcactcctcaagaacaacttttaatccttgagctccattctaaatggggtaataggtggtcaaaaatttcgaagtatttaccaggaagaacagacaacgatatcaaaaactactggagaactagagtccagaaacaagcacgccagctcaacatagattccaatagccacaagttcatagaagttgttcgtagcttttggtttccaagactgatcaacgagattaaagacaactcatacaccaacaatattaaagctaatgctcctgatttacttggaccaattttacgagacagcaaagatttgggtttcaacaacatggattgttccacttccatgtcagaagatctcaagaaaacttcacaattcatggatttttctgatcttgaaaccacaatgtccttggaaggatcacgagggggtagtagtcaatgtgtgagtgaggtttatagctccttcccttgcctagaggaggagtacatggtggccgttatgggcagttcagacatttcagcattgcatgattgtcacgtggctgattccaagtacgaggatgatgtgacacaagatctaatgtggaacatggatgacatttggcagtttaacgagtatgcacactttaattaggttatattatatttatgtacttcttacaacttggaggggtttatcggtcttttattaaattttgattgttttggattccttaaaaatgtgttcttattatagtttttaatgaaaaaaatgtttaagc

SEQ ID NO: 82227 - protein, 283 aa, Arabidopsis thaliana
  peptide (1)..(283): Ceres Seq. ID no. 12664535
MSNITKKKCNGNEEGAEQRKGPWTLEEDTLLTNYISHNGEGRWNLLAKSSGLKRAGKSCRLRWLNYLKPDIKRGNLTPQEQLLILELHSKWGNRWSKISKYLPGRTDNDIKNYWRTRVQKQARQLNIDSNSHKFIEVVRSFWFPRLINEIKDNSYTNNIKANAPDLLGPILRDSKDLGFNNMDCSTSMSEDLKKTSQFMDFSDLETTMSLEGSRGGSSQCVSEVYSSFPCLEEEYMVAVMGSSDISALHDCHVADSKYEDDVTQDLMWNMDDIWQFNEYAHFN

SEQ ID NO: 82228 - DNA, 2124 bp, Arabidopsis thaliana
  misc_feature (1)..(2124): Ceres Seq. ID no. 12664540
  misc_feature (1)..(2124): Ortholog of  Ceres SEQ ID NO 14306268 as cited in SEQ ID NO 51135
  misc_feature (1)..(2124): Ortholog of  Ceres SEQ ID NO 15225368 as cited in SEQ ID NO 58345
  misc_feature (1)..(2124): Ortholog of  Ceres SEQ ID NO 13654989 as cited in SEQ ID NO 63117
atctttagatctggctatcgaaaaacacactagcttcttctaatcagaatacctatggagactgtctctgttttgctcttcttcttcctcttccttctagcggcagaagcaaggagcaccaagcggacaggttgcaaggatttcacctgcggagaacatgacttcaagttccctttctttaggacagacatgccatctcgatgcggtcttttcaagctgaactgcagtgcaaatattccagagatacagcttgaaaaagatgggaaatggtatacagtcaagagcgtctctcaagccaacacgataaccatcatcgacccgaggcttaaccaaagcttgacaaccggaggctgcagtgacttgtcaagcttctctcttccagattctccatggctcaaattgaacacgttgtacaaatgcaacaatagtagtaggaagaatggtttcagctatgcgaattgcagaggagaaggaagcagcttgtactacaatttgggagatgatcatgatgtttcagggtgttcacctattaagactccagagagctgggtgactccaaaaaatgggaacctgtctgatgtaaatgctaccttctctcttcatatagaactgcctgggaactgctttcgctgccacaataacggtggagaatgtacaaaggttaaaaacaattaccgttgcgttggcgcaaacacagaaccaaataactaccatgcggagatgaggctaggattaggaataggaggatctgtcatcttgataatcatcttggtggcactctttgctgtcatccataggaattacagaaggaaagatggttcagagctctccagagacaactcaaaatctgacgttgagtttagtcaagtcttctttaagataccaatcttctcctataaggaacttcaagcagcaacagacaactttagtaaagacagattactaggagatggaggctttggcactgtgtactatggaaaagtgcgtgatgggcgagaagttgcagtgaagcgtctctatgagcacaattacagaagacttgagcaattcatgaacgagatagaaatcctcacacgtctccatcacaagaatctagtctccctctatggatgcacttcacgccgcagccgagagcttctccttgtctatgagtttattccaaatggcacagttgcagatcatctctatggcgaaaacacgccacaccaaggctttttaacatggtcaatgcgcctgagcatcgccatagaaacagcgagtgcattggcttaccttcatgcttcggatatcatacaccgggatgtcaagactacaaacattctcctcgacaggaatttcggagtaaaagtcgcggattttgggctatccaggttgctcccgagtgatgtaactcatgtttcaactgctcctcagggtactccgggatacgtggatccagaatatcatcgctgctatcatctaacagataagagtgacgtgtatagctttggggtggtgcttgtcgagctgatatcatcgaagcctgctgttgatataagtagatgcaagagtgagatcaatctatcaagcttagcaataaacaagatacaaaaccatgcgacccacgagctgattgatcagaatcttggatatgcaacgaatgaaggagttagaaaaatgactacaatggtggcagagttggcttttcagtgcttgcagcaagacaatacaatgagacccacaatggaacaagttgtgcacgagctaaaaggaatccagaatgaggagcaaaaatgtccaacctacgactacagagaggagacaataattccacacccttcgccaccagattggggtgaggctgcactattaaaaaatatgaaattcccacgttcaccagtctctgtgactgaccaatggacaagtaaatcaaccacaccgaataccagcgcctacgaattctaggatccaccaggtattggtttcttctcatttgtttcaatggaacgatataagatgaggcacagggttgtgaagcagtaggtaccgagagaatgtacatagtgacataacttgaactaccaatcaccaattttctatgtctaattttgtctactgtatgtaagattgaatcaaaaggtattt

SEQ ID NO: 82229 - protein, 629 aa, Arabidopsis thaliana
  peptide (1)..(629): Ceres Seq. ID no. 12664541
METVSVLLFFFLFLLAAEARSTKRTGCKDFTCGEHDFKFPFFRTDMPSRCGLFKLNCSANIPEIQLEKDGKWYTVKSVSQANTITIIDPRLNQSLTTGGCSDLSSFSLPDSPWLKLNTLYKCNNSSRKNGFSYANCRGEGSSLYYNLGDDHDVSGCSPIKTPESWVTPKNGNLSDVNATFSLHIELPGNCFRCHNNGGECTKVKNNYRCVGANTEPNNYHAEMRLGLGIGGSVILIIILVALFAVIHRNYRRKDGSELSRDNSKSDVEFSQVFFKIPIFSYKELQAATDNFSKDRLLGDGGFGTVYYGKVRDGREVAVKRLYEHNYRRLEQFMNEIEILTRLHHKNLVSLYGCTSRRSRELLLVYEFIPNGTVADHLYGENTPHQGFLTWSMRLSIAIETASALAYLHASDIIHRDVKTTNILLDRNFGVKVADFGLSRLLPSDVTHVSTAPQGTPGYVDPEYHRCYHLTDKSDVYSFGVVLVELISSKPAVDISRCKSEINLSSLAINKIQNHATHELIDQNLGYATNEGVRKMTTMVAELAFQCLQQDNTMRPTMEQVVHELKGIQNEEQKCPTYDYREETIIPHPSPPDWGEAALLKNMKFPRSPVSVTDQWTSKSTTPNTSAYEF

SEQ ID NO: 82230 - protein, 584 aa, Arabidopsis thaliana
  peptide (1)..(584): Ceres Seq. ID no. 12664542
MPSRCGLFKLNCSANIPEIQLEKDGKWYTVKSVSQANTITIIDPRLNQSLTTGGCSDLSSFSLPDSPWLKLNTLYKCNNSSRKNGFSYANCRGEGSSLYYNLGDDHDVSGCSPIKTPESWVTPKNGNLSDVNATFSLHIELPGNCFRCHNNGGECTKVKNNYRCVGANTEPNNYHAEMRLGLGIGGSVILIIILVALFAVIHRNYRRKDGSELSRDNSKSDVEFSQVFFKIPIFSYKELQAATDNFSKDRLLGDGGFGTVYYGKVRDGREVAVKRLYEHNYRRLEQFMNEIEILTRLHHKNLVSLYGCTSRRSRELLLVYEFIPNGTVADHLYGENTPHQGFLTWSMRLSIAIETASALAYLHASDIIHRDVKTTNILLDRNFGVKVADFGLSRLLPSDVTHVSTAPQGTPGYVDPEYHRCYHLTDKSDVYSFGVVLVELISSKPAVDISRCKSEINLSSLAINKIQNHATHELIDQNLGYATNEGVRKMTTMVAELAFQCLQQDNTMRPTMEQVVHELKGIQNEEQKCPTYDYREETIIPHPSPPDWGEAALLKNMKFPRSPVSVTDQWTSKSTTPNTSAYEF

SEQ ID NO: 82231 - protein, 407 aa, Arabidopsis thaliana
  peptide (1)..(407): Ceres Seq. ID no. 12664543
MRLGLGIGGSVILIIILVALFAVIHRNYRRKDGSELSRDNSKSDVEFSQVFFKIPIFSYKELQAATDNFSKDRLLGDGGFGTVYYGKVRDGREVAVKRLYEHNYRRLEQFMNEIEILTRLHHKNLVSLYGCTSRRSRELLLVYEFIPNGTVADHLYGENTPHQGFLTWSMRLSIAIETASALAYLHASDIIHRDVKTTNILLDRNFGVKVADFGLSRLLPSDVTHVSTAPQGTPGYVDPEYHRCYHLTDKSDVYSFGVVLVELISSKPAVDISRCKSEINLSSLAINKIQNHATHELIDQNLGYATNEGVRKMTTMVAELAFQCLQQDNTMRPTMEQVVHELKGIQNEEQKCPTYDYREETIIPHPSPPDWGEAALLKNMKFPRSPVSVTDQWTSKSTTPNTSAYEF

SEQ ID NO: 82232 - DNA, 963 bp, Arabidopsis thaliana
  misc_feature (1)..(963): Ceres Seq. ID no. 12664552
  misc_feature (1)..(963): Ortholog of  Ceres SEQ ID NO 12617197 as cited in SEQ ID NO 63406
  misc_feature (1)..(963): Ortholog of  Ceres SEQ ID NO 13597804 as cited in SEQ ID NO 64182
  misc_feature (1)..(963): Ortholog of  Ceres SEQ ID NO 13598565 as cited in SEQ ID NO 65250
  misc_feature (1)..(963): Ortholog of  Ceres SEQ ID NO 13598597 as cited in SEQ ID NO 65496
  misc_feature (1)..(963): Ortholog of  Ceres SEQ ID NO 13596284 as cited in SEQ ID NO 68273
atggcagagtacttggttaccggaggaaccagctttatagcctctcatgttatcaagtcacttctagaatttggtcattacgtaagaacaactgttagagactcagaagatgaagaaaaggtgggtttcttgtgggacttaaaaggagcaaaagaaaggttgaagatcttcgaagctgatctaacgatagagggaagctttgacgaagcagtcaacggtgttgatggagtcttccacatcgcatctcgagtttctgttcgtctggacaacaacaatctggataaatttgatcctaatataagtggaacaatgaatgtgatgaactcttgtgcaaagtcaagaaacactgtgaaaaggattgttctcacatcttcttcaaccgcgatacggtaccgttttgatgctacacaagtctctccacttaatgaatcgcattggaccgatcttgaatactgcaaacacttcaaaatttggtatgcttataaaaagactttaggggagaaagaagcttggaggatcgcagctgataagaagctaaacctagttgtcgtaatcccatcattttgtattggtccaatacttagtccaaaacctacaagctcccctctcatttttctgtccattatcaaagggactcgtggaacgtaccctaacttcaggggagggtttgtgcacatagacgatgtagttgctgcacaaatcttagcaatggaagaacctaaagcatcaggaagaatcttatgttcgagttcagtggctcactggtcagagatcattgagatgctacgaatcaaatacccattatacccatttgagaccaagtgtggcagtgaagaagggaaagatatgcctcatagcttagacacaacaaaaatacatgaacttggctttgcctccttcaagtcattaacagagatgtttgatgactgtatcaagtgttttcaagacaagggtttgctctga

SEQ ID NO: 82233 - protein, 320 aa, Arabidopsis thaliana
  peptide (1)..(320): Ceres Seq. ID no. 12664553
MAEYLVTGGTSFIASHVIKSLLEFGHYVRTTVRDSEDEEKVGFLWDLKGAKERLKIFEADLTIEGSFDEAVNGVDGVFHIASRVSVRLDNNNLDKFDPNISGTMNVMNSCAKSRNTVKRIVLTSSSTAIRYRFDATQVSPLNESHWTDLEYCKHFKIWYAYKKTLGEKEAWRIAADKKLNLVVVIPSFCIGPILSPKPTSSPLIFLSIIKGTRGTYPNFRGGFVHIDDVVAAQILAMEEPKASGRILCSSSVAHWSEIIEMLRIKYPLYPFETKCGSEEGKDMPHSLDTTKIHELGFASFKSLTEMFDDCIKCFQDKGLL

SEQ ID NO: 82234 - protein, 217 aa, Arabidopsis thaliana
  peptide (1)..(217): Ceres Seq. ID no. 12664554
MNVMNSCAKSRNTVKRIVLTSSSTAIRYRFDATQVSPLNESHWTDLEYCKHFKIWYAYKKTLGEKEAWRIAADKKLNLVVVIPSFCIGPILSPKPTSSPLIFLSIIKGTRGTYPNFRGGFVHIDDVVAAQILAMEEPKASGRILCSSSVAHWSEIIEMLRIKYPLYPFETKCGSEEGKDMPHSLDTTKIHELGFASFKSLTEMFDDCIKCFQDKGLL

SEQ ID NO: 82235 - protein, 214 aa, Arabidopsis thaliana
  peptide (1)..(214): Ceres Seq. ID no. 12664555
MNSCAKSRNTVKRIVLTSSSTAIRYRFDATQVSPLNESHWTDLEYCKHFKIWYAYKKTLGEKEAWRIAADKKLNLVVVIPSFCIGPILSPKPTSSPLIFLSIIKGTRGTYPNFRGGFVHIDDVVAAQILAMEEPKASGRILCSSSVAHWSEIIEMLRIKYPLYPFETKCGSEEGKDMPHSLDTTKIHELGFASFKSLTEMFDDCIKCFQDKGLL

SEQ ID NO: 82236 - DNA, 1323 bp, Arabidopsis thaliana
  misc_feature (1)..(1323): Ceres Seq. ID no. 12664560
  misc_feature (1)..(1323): Ortholog of  Ceres SEQ ID NO 13594068 as cited in SEQ ID NO 58624
atggtctctagttctccggtttctccgtctaaggaaactgaccggaagtccggcgagaaatggacggcggaagatccatcacggccagccaagtggtggtactccaccttccacaccgtcaccgccatgattggcgcgggagtcctcagccttccttatgccatggcttaccttggctggggaccagggacctttgtgttggcaatgacgtggggactgaccctaaacactatgtggcaaatggtgcagctccatgagtgtgtaccgggaacccggtttgaccggtatatcgatctaggccggtatgcttttggcccaaaacttggcccatggatcgtcctccctcaacagctaatcgtccaggtcggctgcaacatcgtttacatggtgacaggaggcaagtgcttgaagcagttcgtggagatcacttgttccacctgtacaccggtacgacagtcgtactggatcctcggcttcggtggagtccatttcattctctcccagctccctaacttcaactccgttgccggagtctccctggctgccgccgtcatgtctctctgctactcgacgatagcttggggaggaagtatcgcacatggaagagtgcctgacgtgagctatgattacaaggcgacgaatccgggtgacttcacattccgagtctttaatgcgttaggtcagatctcattcgctttcgctggccacgctgtggctctagagattcaagccacgatgccttccactcctgagagaccatccaaggtgcccatgtggcaaggagtgatcggagcttacgtggtcaacgccgtttgctattttcctgtggctctgatatgctattgggcctttggtcaagacgtggacgacaatgtgctgatgaatctacagagaccagcttggctcattgctgctgctaatctcatggttgttgtccatgtcattggtagctaccaagtgtttgctatgcctgtctttgatcttttggagaggatgatggttaacaaatttggttttaagcatggagttgttctgaggtttttcactcgaactatttatgtcgcatttacattgttcattggagtgagtttccccttctttggagaccttctaggcttctttggaggatttggttttgcacctacttctttcttcctcccaagtataatgtggcttatcatcaagaaaccaaggagattcagcgtcacctggttcgtcaattggatctccattatcgtaggagtgttcataatgttagcgtcaacaattggagggttgaggaacatcattgcagattcttctacttatagtttctacgcttaa

SEQ ID NO: 82237 - protein, 440 aa, Arabidopsis thaliana
  peptide (1)..(440): Ceres Seq. ID no. 12664561
MVSSSPVSPSKETDRKSGEKWTAEDPSRPAKWWYSTFHTVTAMIGAGVLSLPYAMAYLGWGPGTFVLAMTWGLTLNTMWQMVQLHECVPGTRFDRYIDLGRYAFGPKLGPWIVLPQQLIVQVGCNIVYMVTGGKCLKQFVEITCSTCTPVRQSYWILGFGGVHFILSQLPNFNSVAGVSLAAAVMSLCYSTIAWGGSIAHGRVPDVSYDYKATNPGDFTFRVFNALGQISFAFAGHAVALEIQATMPSTPERPSKVPMWQGVIGAYVVNAVCYFPVALICYWAFGQDVDDNVLMNLQRPAWLIAAANLMVVVHVIGSYQVFAMPVFDLLERMMVNKFGFKHGVVLRFFTRTIYVAFTLFIGVSFPFFGDLLGFFGGFGFAPTSFFLPSIMWLIIKKPRRFSVTWFVNWISIIVGVFIMLASTIGGLRNIIADSSTYSFYA

SEQ ID NO: 82238 - protein, 398 aa, Arabidopsis thaliana
  peptide (1)..(398): Ceres Seq. ID no. 12664562
MIGAGVLSLPYAMAYLGWGPGTFVLAMTWGLTLNTMWQMVQLHECVPGTRFDRYIDLGRYAFGPKLGPWIVLPQQLIVQVGCNIVYMVTGGKCLKQFVEITCSTCTPVRQSYWILGFGGVHFILSQLPNFNSVAGVSLAAAVMSLCYSTIAWGGSIAHGRVPDVSYDYKATNPGDFTFRVFNALGQISFAFAGHAVALEIQATMPSTPERPSKVPMWQGVIGAYVVNAVCYFPVALICYWAFGQDVDDNVLMNLQRPAWLIAAANLMVVVHVIGSYQVFAMPVFDLLERMMVNKFGFKHGVVLRFFTRTIYVAFTLFIGVSFPFFGDLLGFFGGFGFAPTSFFLPSIMWLIIKKPRRFSVTWFVNWISIIVGVFIMLASTIGGLRNIIADSSTYSFYA

SEQ ID NO: 82239 - protein, 386 aa, Arabidopsis thaliana
  peptide (1)..(386): Ceres Seq. ID no. 12664563
MAYLGWGPGTFVLAMTWGLTLNTMWQMVQLHECVPGTRFDRYIDLGRYAFGPKLGPWIVLPQQLIVQVGCNIVYMVTGGKCLKQFVEITCSTCTPVRQSYWILGFGGVHFILSQLPNFNSVAGVSLAAAVMSLCYSTIAWGGSIAHGRVPDVSYDYKATNPGDFTFRVFNALGQISFAFAGHAVALEIQATMPSTPERPSKVPMWQGVIGAYVVNAVCYFPVALICYWAFGQDVDDNVLMNLQRPAWLIAAANLMVVVHVIGSYQVFAMPVFDLLERMMVNKFGFKHGVVLRFFTRTIYVAFTLFIGVSFPFFGDLLGFFGGFGFAPTSFFLPSIMWLIIKKPRRFSVTWFVNWISIIVGVFIMLASTIGGLRNIIADSSTYSFYA

SEQ ID NO: 82240 - DNA, 2955 bp, Arabidopsis thaliana
  misc_feature (1)..(2955): Ceres Seq. ID no. 12664653
  misc_feature (1)..(2955): Ortholog of  Ceres SEQ ID NO 13648124 as cited in SEQ ID NO 20362
atggcggatcaatctcttctacactctccgatcaacccacatttctttcagcctattcttacagaatctcgcactcacctcaacattcctgtagctttcttctcgaagcatgttgaaggaagaaacaaccaaaacaagactgtgacgctaagatcagacgcgtcggataaaacttggttagtgaagatggacggtctaaaactaaccgacggatgggaagattttgcctttgcacatgatcttcgaactggtgacatcgtcgttttcagacttgaaggagaaatggtgtttcatgtcacagctttaggaccaagctgttgcgagattcaatatcatacatcatctcacaatatcaatgatgatgatcgtaatgatcagatcaacattgcttcaagaaacagttcaagagtgaagaagaatccacgaaagaaagtagagtcttctttagaccattctcgttttgtggcaaaagtctcagcttggtgcctaagcaatgatagactgtatataccactaagtttcgccaggttaaacggtctgaacaaaatcaacagtaagaaaatctatcttcagaacgaagaaggaagatcatggaagttagttttgagacatgacaaatcaggcatgcaaacttttgtccaatccggttggagaagattctgctctgaaaatgggattaggcaaggtcaatatacattcaaacttgtccgaaaatcagcaccacctgtcatccgtttgtgccgcgcaaaagctaaaccaaaacaaagatcagttgcagaatattcatcagaccattcttgttttgagggatctgtcactccttcaagcctaagaaatgatctactgtatcttccaaggagctttgtgaactcaaatcgtctggacaaaagatgcagtgagatagttttaaagaatgaacagggagtaaaatggcctttagttttgaaacgtttcaaatcagtcacttatctcccaaaaggctggactagtttctgtcaagtaaacaggatcaaagcaggagattcattcaagtttaaactggttggaacctggaaaaaacctgttctttctttgtgtccgacacaatccaacaatcacaaaactccattagagtgttcagaaggtaacaaatccgaagaaagtgaagaggattgcttggaggtaaagaaaaagaagtattggtcgagatgcagagcttctgtagaaaacatggatgatgatcagaccaacattggaaacagttcaagaaagaagagagtgagtaagaatccaagagagaaagtagagtcttcatcagaccattctagttttgtgggatctgtcaatccttcaagcctatacaaagatcaactgtatcttccaaggaattttgtgagctcaaattttctggacaaaagatgcagtgagatagttttaaagaatgaacggggagaaaaaaggactttagttttgaaacacttcaaaaaagaccttacttttctcaaaaaaggctggactagtttctgtcaagtaaataggatcaaagctggagattccttcaagtttaaactggttggaacatggaacaaacctgttctttctttgtgccctacagaaaccaactatcacaaaactccattagcgtgttcagagggtaacaaatccgaagaaagtgaagaggagggtactgaagacaagaatacctcacaagattgcttggaggtgaagaaaaggaagtattggtcaacatgcagagcttctgcagagaacatagatgatgatcagaccaatattggaaacagttcaaaagagaagagagtgaagaaaaatccagtaaagaaagcagagtcttcatcagaccattctagttttgtggctaatgtcacagcttcaagcctaaactatgatcgactgtatttaccactaagtttcgtgagttcaaacggtctagataaaatgaacggtaaggagatcgttcttcttaatgaagaaggactatcatggaagtttaatttgaagtacaaccaagcaggcaagcatacttatgtcagacctggttggtcaagattctgtgatgcaaatgggatgagccaaggtcaacaatttacattcaaactggtccaaaaacatggaccacctgtcatgtatttgagcctcagtgaacatagaccaaagtcagaatcttcatcgcaccgttcctattttgtaggatctgtcactgcttcaagcataaagaaagataaactgtatttatggaagagttttgtgagctctaatggtctggacaaaggatgcaagaagataattttaaagaataaatggggaagagaatggaaattagtcttgaaacactacaaatcaaactgctttactattatcaaacgaggctggaccagtttctgccaaggcaacggtttgaaagctggagattccttcaagttcaaactggttggaaccggggaaaagcctgttctttctttgtgccctgcagaatccagccatgaaaaaattccattagagtgtccagaaggtatagatgatgtcaattcactctcctcaaatcctagcagtggagatgacagtagtagatccgaagaaagcgaagaggagaatatggaagacaagaacatctcacaggattgcttggaaaccaagaaaaggaagtattgctcttcatcgtcatatagtcaaaaccgatttgtgacattaactcttacacggtccgcttttcaaacctataaactggtgaatggcatcaacaagccaaggaagataactctgctgggtcaagatggagttaaaaaggtggtggatctctatcaggaaagtagtagcagaataatgagatttggaaaaggctggagagagttctttgatgctcaaggcgtgaagatagacgactcctttgtgttggaactcatttgggagaaagaagcaagtccggtgcttaagttctgcaccaaagtaccaaagtaa

SEQ ID NO: 82241 - protein, 984 aa, Arabidopsis thaliana
  peptide (1)..(984): Ceres Seq. ID no. 12664654
MADQSLLHSPINPHFFQPILTESRTHLNIPVAFFSKHVEGRNNQNKTVTLRSDASDKTWLVKMDGLKLTDGWEDFAFAHDLRTGDIVVFRLEGEMVFHVTALGPSCCEIQYHTSSHNINDDDRNDQINIASRNSSRVKKNPRKKVESSLDHSRFVAKVSAWCLSNDRLYIPLSFARLNGLNKINSKKIYLQNEEGRSWKLVLRHDKSGMQTFVQSGWRRFCSENGIRQGQYTFKLVRKSAPPVIRLCRAKAKPKQRSVAEYSSDHSCFEGSVTPSSLRNDLLYLPRSFVNSNRLDKRCSEIVLKNEQGVKWPLVLKRFKSVTYLPKGWTSFCQVNRIKAGDSFKFKLVGTWKKPVLSLCPTQSNNHKTPLECSEGNKSEESEEDCLEVKKKKYWSRCRASVENMDDDQTNIGNSSRKKRVSKNPREKVESSSDHSSFVGSVNPSSLYKDQLYLPRNFVSSNFLDKRCSEIVLKNERGEKRTLVLKHFKKDLTFLKKGWTSFCQVNRIKAGDSFKFKLVGTWNKPVLSLCPTETNYHKTPLACSEGNKSEESEEEGTEDKNTSQDCLEVKKRKYWSTCRASAENIDDDQTNIGNSSKEKRVKKNPVKKAESSSDHSSFVANVTASSLNYDRLYLPLSFVSSNGLDKMNGKEIVLLNEEGLSWKFNLKYNQAGKHTYVRPGWSRFCDANGMSQGQQFTFKLVQKHGPPVMYLSLSEHRPKSESSSHRSYFVGSVTASSIKKDKLYLWKSFVSSNGLDKGCKKIILKNKWGREWKLVLKHYKSNCFTIIKRGWTSFCQGNGLKAGDSFKFKLVGTGEKPVLSLCPAESSHEKIPLECPEGIDDVNSLSSNPSSGDDSSRSEESEEENMEDKNISQDCLETKKRKYCSSSSYSQNRFVTLTLTRSAFQTYKLVNGINKPRKITLLGQDGVKKVVDLYQESSSRIMRFGKGWREFFDAQGVKIDDSFVLELIWEKEASPVLKFCTKVPK

SEQ ID NO: 82242 - protein, 922 aa, Arabidopsis thaliana
  peptide (1)..(922): Ceres Seq. ID no. 12664655
MDGLKLTDGWEDFAFAHDLRTGDIVVFRLEGEMVFHVTALGPSCCEIQYHTSSHNINDDDRNDQINIASRNSSRVKKNPRKKVESSLDHSRFVAKVSAWCLSNDRLYIPLSFARLNGLNKINSKKIYLQNEEGRSWKLVLRHDKSGMQTFVQSGWRRFCSENGIRQGQYTFKLVRKSAPPVIRLCRAKAKPKQRSVAEYSSDHSCFEGSVTPSSLRNDLLYLPRSFVNSNRLDKRCSEIVLKNEQGVKWPLVLKRFKSVTYLPKGWTSFCQVNRIKAGDSFKFKLVGTWKKPVLSLCPTQSNNHKTPLECSEGNKSEESEEDCLEVKKKKYWSRCRASVENMDDDQTNIGNSSRKKRVSKNPREKVESSSDHSSFVGSVNPSSLYKDQLYLPRNFVSSNFLDKRCSEIVLKNERGEKRTLVLKHFKKDLTFLKKGWTSFCQVNRIKAGDSFKFKLVGTWNKPVLSLCPTETNYHKTPLACSEGNKSEESEEEGTEDKNTSQDCLEVKKRKYWSTCRASAENIDDDQTNIGNSSKEKRVKKNPVKKAESSSDHSSFVANVTASSLNYDRLYLPLSFVSSNGLDKMNGKEIVLLNEEGLSWKFNLKYNQAGKHTYVRPGWSRFCDANGMSQGQQFTFKLVQKHGPPVMYLSLSEHRPKSESSSHRSYFVGSVTASSIKKDKLYLWKSFVSSNGLDKGCKKIILKNKWGREWKLVLKHYKSNCFTIIKRGWTSFCQGNGLKAGDSFKFKLVGTGEKPVLSLCPAESSHEKIPLECPEGIDDVNSLSSNPSSGDDSSRSEESEEENMEDKNISQDCLETKKRKYCSSSSYSQNRFVTLTLTRSAFQTYKLVNGINKPRKITLLGQDGVKKVVDLYQESSSRIMRFGKGWREFFDAQGVKIDDSFVLELIWEKEASPVLKFCTKVPK

SEQ ID NO: 82243 - protein, 890 aa, Arabidopsis thaliana
  peptide (1)..(890): Ceres Seq. ID no. 12664656
MVFHVTALGPSCCEIQYHTSSHNINDDDRNDQINIASRNSSRVKKNPRKKVESSLDHSRFVAKVSAWCLSNDRLYIPLSFARLNGLNKINSKKIYLQNEEGRSWKLVLRHDKSGMQTFVQSGWRRFCSENGIRQGQYTFKLVRKSAPPVIRLCRAKAKPKQRSVAEYSSDHSCFEGSVTPSSLRNDLLYLPRSFVNSNRLDKRCSEIVLKNEQGVKWPLVLKRFKSVTYLPKGWTSFCQVNRIKAGDSFKFKLVGTWKKPVLSLCPTQSNNHKTPLECSEGNKSEESEEDCLEVKKKKYWSRCRASVENMDDDQTNIGNSSRKKRVSKNPREKVESSSDHSSFVGSVNPSSLYKDQLYLPRNFVSSNFLDKRCSEIVLKNERGEKRTLVLKHFKKDLTFLKKGWTSFCQVNRIKAGDSFKFKLVGTWNKPVLSLCPTETNYHKTPLACSEGNKSEESEEEGTEDKNTSQDCLEVKKRKYWSTCRASAENIDDDQTNIGNSSKEKRVKKNPVKKAESSSDHSSFVANVTASSLNYDRLYLPLSFVSSNGLDKMNGKEIVLLNEEGLSWKFNLKYNQAGKHTYVRPGWSRFCDANGMSQGQQFTFKLVQKHGPPVMYLSLSEHRPKSESSSHRSYFVGSVTASSIKKDKLYLWKSFVSSNGLDKGCKKIILKNKWGREWKLVLKHYKSNCFTIIKRGWTSFCQGNGLKAGDSFKFKLVGTGEKPVLSLCPAESSHEKIPLECPEGIDDVNSLSSNPSSGDDSSRSEESEEENMEDKNISQDCLETKKRKYCSSSSYSQNRFVTLTLTRSAFQTYKLVNGINKPRKITLLGQDGVKKVVDLYQESSSRIMRFGKGWREFFDAQGVKIDDSFVLELIWEKEASPVLKFCTKVPK

SEQ ID NO: 82244 - DNA, 843 bp, Arabidopsis thaliana
  misc_feature (1)..(843): Ceres Seq. ID no. 12664669
  misc_feature (1)..(843): Ortholog of  Ceres SEQ ID NO 13647762 as cited in SEQ ID NO 20426
atgtttataacggaaaaacaagtgtggatggatgagatcgtcgcaagaagagcttcttcttcttgggacttccctttcaacgacattaatattcatcagcatcatcatcgtcactgcaacacaagtcatgagtttgaaatcttgaagagtcctcttggagatgtagcggttcacgaagaagagagtaataataataaccctaatttcagtaacagcgagagtggtaagaaggagacaacagatagtggtcagtcttggtcctcgtcgtcttcaaaaccatcggtcttggggagaggacattggagaccagctgaagatgttaaactcaaagagcttgtctccatttacggcccacaaaactggaacctcatagctgaaaagcttcaaggaagatctgggaagagctgtagactacgatggtttaaccaattggacccgaggataaaccgaagagctttcacagaagaagaagaggagaggctgatgcaagcacataggctttatggtaacaaatgggcaatgattgcgaggcttttccctggtagaactgataattcagtgaagaaccattggcatgttgtcatggctcgtaagtatagagaacactcttctgcttaccgtaggagaaagcttatgagtaataatccacttaaacctcacctcaccaataatcatcatcctaaccctaaccctaattaccactcttttatctccactaatcattacttcgctcagcctttccccgagtttaatttgactcatcacctggttaataatgcccctatcacgagtgaccataaccagcttgtgttgcctttccattgctttcaaggtagcctatag

SEQ ID NO: 82245 - protein, 280 aa, Arabidopsis thaliana
  peptide (1)..(280): Ceres Seq. ID no. 12664670
MFITEKQVWMDEIVARRASSSWDFPFNDINIHQHHHRHCNTSHEFEILKSPLGDVAVHEEESNNNNPNFSNSESGKKETTDSGQSWSSSSSKPSVLGRGHWRPAEDVKLKELVSIYGPQNWNLIAEKLQGRSGKSCRLRWFNQLDPRINRRAFTEEEEERLMQAHRLYGNKWAMIARLFPGRTDNSVKNHWHVVMARKYREHSSAYRRRKLMSNNPLKPHLTNNHHPNPNPNYHSFISTNHYFAQPFPEFNLTHHLVNNAPITSDHNQLVLPFHCFQGSL

SEQ ID NO: 82246 - protein, 271 aa, Arabidopsis thaliana
  peptide (1)..(271): Ceres Seq. ID no. 12664671
MDEIVARRASSSWDFPFNDINIHQHHHRHCNTSHEFEILKSPLGDVAVHEEESNNNNPNFSNSESGKKETTDSGQSWSSSSSKPSVLGRGHWRPAEDVKLKELVSIYGPQNWNLIAEKLQGRSGKSCRLRWFNQLDPRINRRAFTEEEEERLMQAHRLYGNKWAMIARLFPGRTDNSVKNHWHVVMARKYREHSSAYRRRKLMSNNPLKPHLTNNHHPNPNPNYHSFISTNHYFAQPFPEFNLTHHLVNNAPITSDHNQLVLPFHCFQGSL

SEQ ID NO: 82247 - DNA, 1864 bp, Arabidopsis thaliana
  misc_feature (1)..(1864): Ceres Seq. ID no. 12664690
  misc_feature (1)..(1864): Ortholog of  Ceres SEQ ID NO 13532807 as cited in SEQ ID NO 53012
  misc_feature (1)..(1864): Ortholog of  Ceres SEQ ID NO 13663060 as cited in SEQ ID NO 60964
  misc_feature (1)..(1864): Ortholog of  Ceres SEQ ID NO 13598532 as cited in SEQ ID NO 65204
  misc_feature (1)..(1864): Ortholog of  Ceres SEQ ID NO 13656849 as cited in SEQ ID NO 65764
  misc_feature (1)..(1864): Ortholog of  Ceres SEQ ID NO 13500573 as cited in SEQ ID NO 67431
  misc_feature (1)..(1864): Ortholog of  Ceres SEQ ID NO 13656501 as cited in SEQ ID NO 69206
atgcaatcttgtgacggttcttgtgttcaaagagtagatacttgttcttcaaggtggaggttaacagaggacaattgacggggtttttaatcgttgttgtattgctcgaataaacggaatcatggaaaggtttgttcttgttctgttcttgttgttgtttgtatatatattggacatggtgagaaagtgatgatggtgtttgtggtttttgttatgtgtaggtataagattttggaagagcttggtgatggtacttgtggtagtgtatataaagcagtaaatttggaaacatatgaagttgttgctgttaagaagatgaagagaaagttttattattgggaagagtgtgtgaatctgcgagaagttaaggctcttcgtaagctaaatcatcctcatatcataaagttgaaggagattgtgagagaacataatgagctttttttcatctttgagtgcatggatcacaatctgtaccatataatgaaagaaagggaacgacctttttctgaaggagaaataagaagttttatgtctcagatgctgcaagggctcgcacacatgcataaaaacggttatttccatcgagacctgaaacctgagaatttgctggtgaccaacaatatcctgaaaattgctgactttgggttggctagagaagttgcatctatgcctccttacactgaatatgtgtccacacgttggtatcgagctccagaagttttgctacagtcttcattatacactcctgcagttgacatgtgggcagttggagcgatactagctgagctttacgctttaactccgttatttcctggtgaaagtgagatagatcaattatacaaaatctgctgtgttcttggcaagccggactggaccacgttccctgaagcgaaaagcatatctcgaattatgagtattagtcacacagagtttccgcagacacgaattgctgatttacttcccaatgctgctcctgaagctattgatttgatcaatcgactttgctcatgggatccattgaaacgaccaactgctgatgaggcactaaatcatccatttttcagtatggctacgcaggcttcatatcctatccatgaccttgagctgaggcttgataatatggcggcgttgcctaatcttgagctaaatctctgggactttaacagagaacctgaagaatgttttcttggcttgacactagctgtgaaaccaagtgctcccaaactagaaatgctccgcaatgtatctcaggacatgagcgagaattttctcttttgccccggggtcaacaatgatcgagaaccatcagttttctggtctctgctctctcctgatgaaaacggcctccacgcgccagttgaatcatctcctttatctttgtctttcagtccaatgcagcaacacacagttggacctccacagtcgagtggcttcacaatgacatcatcaatgcaaccgaatatgttggaccgcccgtggatggccgtgtctgcgccgtttcaacaaagtcattacctctgatctaataaacccataccctagtaaaaaaagtaaataacacagaggtttgtcagaaagatttgagtttaaagaacaagatagcaaaacaaaacagaggaaaggtgttagaattttcattttttttgtcaccaatttgttcttaatttgtaaaaatttggtttggctgatgcattttcctctcagagcttgagctctatcaatatcgaacaaataatttccttattcttgtctctgtataatatatgataaaaaaagacattgaaatcttgatgtggcattaccataaagaattacgtttcattaatgttggttctgtcgtcttttaatataaaagtctttaact

SEQ ID NO: 82248 - protein, 443 aa, Arabidopsis thaliana
  peptide (1)..(443): Ceres Seq. ID no. 12664691
MMVFVVFVMCRYKILEELGDGTCGSVYKAVNLETYEVVAVKKMKRKFYYWEECVNLREVKALRKLNHPHIIKLKEIVREHNELFFIFECMDHNLYHIMKERERPFSEGEIRSFMSQMLQGLAHMHKNGYFHRDLKPENLLVTNNILKIADFGLAREVASMPPYTEYVSTRWYRAPEVLLQSSLYTPAVDMWAVGAILAELYALTPLFPGESEIDQLYKICCVLGKPDWTTFPEAKSISRIMSISHTEFPQTRIADLLPNAAPEAIDLINRLCSWDPLKRPTADEALNHPFFSMATQASYPIHDLELRLDNMAALPNLELNLWDFNREPEECFLGLTLAVKPSAPKLEMLRNVSQDMSENFLFCPGVNNDREPSVFWSLLSPDENGLHAPVESSPLSLSFSPMQQHTVGPPQSSGFTMTSSMQPNMLDRPWMAVSAPFQQSHYL

SEQ ID NO: 82249 - protein, 442 aa, Arabidopsis thaliana
  peptide (1)..(442): Ceres Seq. ID no. 12664692
MVFVVFVMCRYKILEELGDGTCGSVYKAVNLETYEVVAVKKMKRKFYYWEECVNLREVKALRKLNHPHIIKLKEIVREHNELFFIFECMDHNLYHIMKERERPFSEGEIRSFMSQMLQGLAHMHKNGYFHRDLKPENLLVTNNILKIADFGLAREVASMPPYTEYVSTRWYRAPEVLLQSSLYTPAVDMWAVGAILAELYALTPLFPGESEIDQLYKICCVLGKPDWTTFPEAKSISRIMSISHTEFPQTRIADLLPNAAPEAIDLINRLCSWDPLKRPTADEALNHPFFSMATQASYPIHDLELRLDNMAALPNLELNLWDFNREPEECFLGLTLAVKPSAPKLEMLRNVSQDMSENFLFCPGVNNDREPSVFWSLLSPDENGLHAPVESSPLSLSFSPMQQHTVGPPQSSGFTMTSSMQPNMLDRPWMAVSAPFQQSHYL

SEQ ID NO: 82250 - protein, 435 aa, Arabidopsis thaliana
  peptide (1)..(435): Ceres Seq. ID no. 12664693
MCRYKILEELGDGTCGSVYKAVNLETYEVVAVKKMKRKFYYWEECVNLREVKALRKLNHPHIIKLKEIVREHNELFFIFECMDHNLYHIMKERERPFSEGEIRSFMSQMLQGLAHMHKNGYFHRDLKPENLLVTNNILKIADFGLAREVASMPPYTEYVSTRWYRAPEVLLQSSLYTPAVDMWAVGAILAELYALTPLFPGESEIDQLYKICCVLGKPDWTTFPEAKSISRIMSISHTEFPQTRIADLLPNAAPEAIDLINRLCSWDPLKRPTADEALNHPFFSMATQASYPIHDLELRLDNMAALPNLELNLWDFNREPEECFLGLTLAVKPSAPKLEMLRNVSQDMSENFLFCPGVNNDREPSVFWSLLSPDENGLHAPVESSPLSLSFSPMQQHTVGPPQSSGFTMTSSMQPNMLDRPWMAVSAPFQQSHYL

SEQ ID NO: 82251 - DNA, 879 bp, Arabidopsis thaliana
  misc_feature (1)..(879): Ceres Seq. ID no. 12664698
  misc_feature (1)..(879): Ortholog of  Ceres SEQ ID NO 13594298 as cited in SEQ ID NO 57803
  misc_feature (1)..(879): Ortholog of  Ceres SEQ ID NO 13503476 as cited in SEQ ID NO 61978
  misc_feature (1)..(879): Ortholog of  Ceres SEQ ID NO 12578438 as cited in SEQ ID NO 62201
  misc_feature (1)..(879): Ortholog of  Ceres SEQ ID NO 12617675 as cited in SEQ ID NO 64656
atggaatatctttcaatcttcggttttgtttcagttttgtatttgatcattagggttgatgctagggcttatgaagttaatggaatcgaccaaagcaaagtaggtttcgatgataactacgtcgttacgtggggacaaaataatgtcttgaaacttaaccaagggaaagaagttcagctttcattggatcattcttcaggttctggttttgaatctaagaatcattacgaatcaggattcttccaaataagaatcaaagtgcctccaaaagatacctcaggcgttgtcaccgctttctatttgacttcgaagggaaacacacatgatgaagttgattttgaattcttgggaaacaaagaagggaaactagcagtgcaaacaaatgtgtttactaatggtaaaggcaatagagaacagaagttagctctctggttcgatccttctaaagatttccacacttacgcaattctgtggaacccgtatcaaattgtgctttatgtggacaacattccagtacgggtgttcaagaacaccacaagccaaggcatgaactacccatcaaaacctatgcaagttgtggttagcttgtggaacggtgaaaactgggcgacagacggtggtaaaagcaagattaattggtctttggctccctttaaggctaattttcaaggctttaacaactctggttgtttcaccaatgctgaaaagaatgcttgtggttcgtcagcgtactggtggaatactgggagttatagtaagctaagtgactccgaacagaaagcctacacaaatgtgagacaaaagtacatgaattatgattattgttctgataaggttagattccatgttcctccaagtgaatgtaaatggaacaactga

SEQ ID NO: 82252 - protein, 292 aa, Arabidopsis thaliana
  peptide (1)..(292): Ceres Seq. ID no. 12664699
MEYLSIFGFVSVLYLIIRVDARAYEVNGIDQSKVGFDDNYVVTWGQNNVLKLNQGKEVQLSLDHSSGSGFESKNHYESGFFQIRIKVPPKDTSGVVTAFYLTSKGNTHDEVDFEFLGNKEGKLAVQTNVFTNGKGNREQKLALWFDPSKDFHTYAILWNPYQIVLYVDNIPVRVFKNTTSQGMNYPSKPMQVVVSLWNGENWATDGGKSKINWSLAPFKANFQGFNNSGCFTNAEKNACGSSAYWWNTGSYSKLSDSEQKAYTNVRQKYMNYDYCSDKVRFHVPPSECKWNN

SEQ ID NO: 82253 - DNA, 879 bp, Arabidopsis thaliana
  misc_feature (1)..(879): Ceres Seq. ID no. 12664700
  misc_feature (1)..(879): Ortholog of  Ceres SEQ ID NO 13594298 as cited in SEQ ID NO 57803
  misc_feature (1)..(879): Ortholog of  Ceres SEQ ID NO 13503476 as cited in SEQ ID NO 61978
  misc_feature (1)..(879): Ortholog of  Ceres SEQ ID NO 12578438 as cited in SEQ ID NO 62201
  misc_feature (1)..(879): Ortholog of  Ceres SEQ ID NO 12617675 as cited in SEQ ID NO 64656
atgaataggataagatattgttttgaattagtttcagtattgttcttgatgtttactgctaatgcaagagctcgtggacgtggagctatagatttcgatgtgaactatgtcgttacatggggacaagatcatatcttgaaactcaaccaaggaaaagaagttcagctctccatggattattcttcaggttctggctttgagtctaaaagccactacggatcaggattcttccaaatgagaatcaaattgcctccaagagattccgccggtgttgtcacagctttctacttgacttctaagggagacacccacgatgaggttgactttgagttcttggggaatagacaaggaaaaccgatagcaattcaaacaaatgtatttagcaatggacaaggaggtagagaacaaaagtttgttccttggttcgatcccactacaagtttccacacttatgggattctttggaatccgtatcagattgtgttttacgtggacaaagttccaataagagtattcaagaatatcaaaaaaagtggtgtgaactatccatcaaagcccatgcaacttgtggctagtttgtggaacggtgagaactgggcaacaagcggtggtaaagaaaagataaattgggcctatgctccatttaaggctcaataccaaggcttctccgaccatggttgtcacgtaaatggtcagagcaataatgcgaacgtttgtggttcgacaaggtactggtggaacacaaggacatatagtcagttaagtgcaaatgagcagaaggtaatggagaatgtgagagcaaagtacatgacctatgattattgttctgatcggcctagatatcctgttcctcctagtgaatgtcgatggaatcaatga

SEQ ID NO: 82254 - protein, 292 aa, Arabidopsis thaliana
  peptide (1)..(292): Ceres Seq. ID no. 12664701
MNRIRYCFELVSVLFLMFTANARARGRGAIDFDVNYVVTWGQDHILKLNQGKEVQLSMDYSSGSGFESKSHYGSGFFQMRIKLPPRDSAGVVTAFYLTSKGDTHDEVDFEFLGNRQGKPIAIQTNVFSNGQGGREQKFVPWFDPTTSFHTYGILWNPYQIVFYVDKVPIRVFKNIKKSGVNYPSKPMQLVASLWNGENWATSGGKEKINWAYAPFKAQYQGFSDHGCHVNGQSNNANVCGSTRYWWNTRTYSQLSANEQKVMENVRAKYMTYDYCSDRPRYPVPPSECRWNQ

SEQ ID NO: 82255 - protein, 276 aa, Arabidopsis thaliana
  peptide (1)..(276): Ceres Seq. ID no. 12664702
MFTANARARGRGAIDFDVNYVVTWGQDHILKLNQGKEVQLSMDYSSGSGFESKSHYGSGFFQMRIKLPPRDSAGVVTAFYLTSKGDTHDEVDFEFLGNRQGKPIAIQTNVFSNGQGGREQKFVPWFDPTTSFHTYGILWNPYQIVFYVDKVPIRVFKNIKKSGVNYPSKPMQLVASLWNGENWATSGGKEKINWAYAPFKAQYQGFSDHGCHVNGQSNNANVCGSTRYWWNTRTYSQLSANEQKVMENVRAKYMTYDYCSDRPRYPVPPSECRWNQ

SEQ ID NO: 82256 - protein, 235 aa, Arabidopsis thaliana
  peptide (1)..(235): Ceres Seq. ID no. 12664703
MDYSSGSGFESKSHYGSGFFQMRIKLPPRDSAGVVTAFYLTSKGDTHDEVDFEFLGNRQGKPIAIQTNVFSNGQGGREQKFVPWFDPTTSFHTYGILWNPYQIVFYVDKVPIRVFKNIKKSGVNYPSKPMQLVASLWNGENWATSGGKEKINWAYAPFKAQYQGFSDHGCHVNGQSNNANVCGSTRYWWNTRTYSQLSANEQKVMENVRAKYMTYDYCSDRPRYPVPPSECRWNQ

SEQ ID NO: 82257 - DNA, 1554 bp, Arabidopsis thaliana
  misc_feature (1)..(1554): Ceres Seq. ID no. 12664727
  misc_feature (1)..(1554): Ortholog of  Ceres SEQ ID NO 13574398 as cited in SEQ ID NO 0
atggttccatcgttggaacgaggaataagcatcacgagttcattcaatcttgatagaatgtttgattcctcaccgggaaaagaacaacaacaacctcatctcgcggaaacaaccatgccggagagtcaaactcaagacagcctcggtggaagtcccgtggagactagccgcccgatgacttctcgtctgatttcccgtagacaggacaagcaacaatccgagacggagatgatgaaagatagattcacgaaattacttcttggagaagatatgtctggtggtggtaaaggtgtatcttctgctttggcactatcaaatgccatcacgaatctagccgcgtcaatattcggggaacagacaaagttgcagccgatggcaccggatagacgagcgaggtggaagaaagagatcgattggttgttgtccgtgactgatcacatcgtcgagtttgttccatctcaacagattagtaaggaaggagtctgcaccgagattatggtgacaagacaaagaggtgatctcctcatgaacatccctgcccttcgcaaactcgacgccatgctcattgatacattggacaattttagaggacacaatgagttttggtatgtatcgagagattcagaagaagggaaacaagcacggaatgagaggacaaaggacaagtggtggcttcctccggttaaagtccctcctaatggcttgtccgaatcagcccgaagaatgcttcattttcaaaaagattcagtctcacaagtccaaaaagccgccatggctattaacgcgcaagttctgtcagaaatggctatccctgatagctatatcgagtctcttccaaagaatggaagagtaagccttggggattcgttatacaagagcataacagaagagtggtttgatccagagcagttcttgtcaacacttgacttatctacagagcacaaagtgttggatgtgaagaataggattgaggcctcaatcgttatatggaaaagaaaacttcatctaaaagacaacaaatcttcttggggatcagctgtgagcttggagaaacgagagttgttcgaagagagagccgagacgatcttggtcttgcttaaacaaaagttccctggtcttccccaatcttcccttgacatttccaaaattcagtataacaaggatgtgggacatgcggttttggagagctactcaaggatattagagagcttagggtacacggaaatgtcgagaatcgacgatgtactttatgcggattctttagcccggaagcaatgcacaggtgaagaaacatcagatggtgggaaaatagcaacggaaacggactcagcgtctgctggatcttcgaactactcaggagaggaaatagagaagcttgaatcacaaaactcatcaaagacgacattgcttgattttattggttggagtgacaatagttcaaaagggcagtcagagaaacctccaaaatctccgagaatgacgccaaagaaactctcatatttggagaagcttgagaacttaaatggttttaggagccctaaagataggcattga

SEQ ID NO: 82258 - protein, 517 aa, Arabidopsis thaliana
  peptide (1)..(517): Ceres Seq. ID no. 12664728
MVPSLERGISITSSFNLDRMFDSSPGKEQQQPHLAETTMPESQTQDSLGGSPVETSRPMTSRLISRRQDKQQSETEMMKDRFTKLLLGEDMSGGGKGVSSALALSNAITNLAASIFGEQTKLQPMAPDRRARWKKEIDWLLSVTDHIVEFVPSQQISKEGVCTEIMVTRQRGDLLMNIPALRKLDAMLIDTLDNFRGHNEFWYVSRDSEEGKQARNERTKDKWWLPPVKVPPNGLSESARRMLHFQKDSVSQVQKAAMAINAQVLSEMAIPDSYIESLPKNGRVSLGDSLYKSITEEWFDPEQFLSTLDLSTEHKVLDVKNRIEASIVIWKRKLHLKDNKSSWGSAVSLEKRELFEERAETILVLLKQKFPGLPQSSLDISKIQYNKDVGHAVLESYSRILESLGYTEMSRIDDVLYADSLARKQCTGEETSDGGKIATETDSASAGSSNYSGEEIEKLESQNSSKTTLLDFIGWSDNSSKGQSEKPPKSPRMTPKKLSYLEKLENLNGFRSPKDRH

SEQ ID NO: 82259 - protein, 498 aa, Arabidopsis thaliana
  peptide (1)..(498): Ceres Seq. ID no. 12664729
MFDSSPGKEQQQPHLAETTMPESQTQDSLGGSPVETSRPMTSRLISRRQDKQQSETEMMKDRFTKLLLGEDMSGGGKGVSSALALSNAITNLAASIFGEQTKLQPMAPDRRARWKKEIDWLLSVTDHIVEFVPSQQISKEGVCTEIMVTRQRGDLLMNIPALRKLDAMLIDTLDNFRGHNEFWYVSRDSEEGKQARNERTKDKWWLPPVKVPPNGLSESARRMLHFQKDSVSQVQKAAMAINAQVLSEMAIPDSYIESLPKNGRVSLGDSLYKSITEEWFDPEQFLSTLDLSTEHKVLDVKNRIEASIVIWKRKLHLKDNKSSWGSAVSLEKRELFEERAETILVLLKQKFPGLPQSSLDISKIQYNKDVGHAVLESYSRILESLGYTEMSRIDDVLYADSLARKQCTGEETSDGGKIATETDSASAGSSNYSGEEIEKLESQNSSKTTLLDFIGWSDNSSKGQSEKPPKSPRMTPKKLSYLEKLENLNGFRSPKDRH

SEQ ID NO: 82260 - protein, 479 aa, Arabidopsis thaliana
  peptide (1)..(479): Ceres Seq. ID no. 12664730
MPESQTQDSLGGSPVETSRPMTSRLISRRQDKQQSETEMMKDRFTKLLLGEDMSGGGKGVSSALALSNAITNLAASIFGEQTKLQPMAPDRRARWKKEIDWLLSVTDHIVEFVPSQQISKEGVCTEIMVTRQRGDLLMNIPALRKLDAMLIDTLDNFRGHNEFWYVSRDSEEGKQARNERTKDKWWLPPVKVPPNGLSESARRMLHFQKDSVSQVQKAAMAINAQVLSEMAIPDSYIESLPKNGRVSLGDSLYKSITEEWFDPEQFLSTLDLSTEHKVLDVKNRIEASIVIWKRKLHLKDNKSSWGSAVSLEKRELFEERAETILVLLKQKFPGLPQSSLDISKIQYNKDVGHAVLESYSRILESLGYTEMSRIDDVLYADSLARKQCTGEETSDGGKIATETDSASAGSSNYSGEEIEKLESQNSSKTTLLDFIGWSDNSSKGQSEKPPKSPRMTPKKLSYLEKLENLNGFRSPKDRH

SEQ ID NO: 82261 - DNA, 1277 bp, Arabidopsis thaliana
  misc_feature (1)..(1277): Ceres Seq. ID no. 12664739
  misc_feature (1)..(1277): Ortholog of  Ceres SEQ ID NO 15170956 as cited in SEQ ID NO 55034
atggagtttgttacagaaacgttaggcaagagaatccatgatccgtacgtggaggaaactaggtgcttaatgattcccggaccaatcattgtcggttccgggccgtcgggactggccacagcggcatgtttaaagtcgagagacatccctagtttgattctagaacgttccacttgcatagcgtcactatggcagcacaaaacatatgatcgtcttcgacttcatctccctaaagatttctgtgagcttccattgatgccttttccttcaagctaccctacttaccctacaaagcaacagttcgtccaataccttgagtcttacgccgaacattttgacctaaagcccgtttttaaccagaccgtggaggaagccaagttcgataggcggtgtgggttatggagggtgaggacaaccggagggaagaaggatgagacaatggagtatgtatcacggtggcttgttgtggcgaccggggagaatgccgaggaggtgatgccggagattgatggaatcccggattttggtggacctatcctccacacaagctcctataagagcggtgaaatatttagtgagaagaagattttggttgtaggatgtggaaactccgggatggaagtttgtttagacctttgcaacttcaatgctcttccttctcttgtggttcgtgactcggtacacgtattacctcaagaaatgctaggtatatcgactttcgggatatccacgagcctgctcaagtggtttccagtgcacgtggtggaccggttcttgttacgtatgtctcggttggttcttggtgacacggatcggttagggttagttcgaccaaaacttggccctcttgaacgcaagatcaaatgcggaaagactcctgttttggacgttggcactcttgccaaaatccgaagtggacacatcaaggtgtatccggagttgaaacgggtaatgcattattcggcagagtttgttgatgggagagtagataacttcgacgccattatactcgccacgggttacaaaagcaacgtacccatgtggctaaagggagtgaacatgttttctgagaaagatggatttccgcataaaccatttcctaacggttggaaaggcgaaagcggattgtatgcagtcggtttcacaaagcttggattgcttggtgcagccattgatgccaagaagatcgctgaggatattgaggttcaacgacatttcttaccattggctcgtcctcaacattgttaattaacctgagattcgggtttcgatttggc

SEQ ID NO: 82262 - protein, 415 aa, Arabidopsis thaliana
  peptide (1)..(415): Ceres Seq. ID no. 12664740
MEFVTETLGKRIHDPYVEETRCLMIPGPIIVGSGPSGLATAACLKSRDIPSLILERSTCIASLWQHKTYDRLRLHLPKDFCELPLMPFPSSYPTYPTKQQFVQYLESYAEHFDLKPVFNQTVEEAKFDRRCGLWRVRTTGGKKDETMEYVSRWLVVATGENAEEVMPEIDGIPDFGGPILHTSSYKSGEIFSEKKILVVGCGNSGMEVCLDLCNFNALPSLVVRDSVHVLPQEMLGISTFGISTSLLKWFPVHVVDRFLLRMSRLVLGDTDRLGLVRPKLGPLERKIKCGKTPVLDVGTLAKIRSGHIKVYPELKRVMHYSAEFVDGRVDNFDAIILATGYKSNVPMWLKGVNMFSEKDGFPHKPFPNGWKGESGLYAVGFTKLGLLGAAIDAKKIAEDIEVQRHFLPLARPQHC

SEQ ID NO: 82263 - protein, 392 aa, Arabidopsis thaliana
  peptide (1)..(392): Ceres Seq. ID no. 12664741
MIPGPIIVGSGPSGLATAACLKSRDIPSLILERSTCIASLWQHKTYDRLRLHLPKDFCELPLMPFPSSYPTYPTKQQFVQYLESYAEHFDLKPVFNQTVEEAKFDRRCGLWRVRTTGGKKDETMEYVSRWLVVATGENAEEVMPEIDGIPDFGGPILHTSSYKSGEIFSEKKILVVGCGNSGMEVCLDLCNFNALPSLVVRDSVHVLPQEMLGISTFGISTSLLKWFPVHVVDRFLLRMSRLVLGDTDRLGLVRPKLGPLERKIKCGKTPVLDVGTLAKIRSGHIKVYPELKRVMHYSAEFVDGRVDNFDAIILATGYKSNVPMWLKGVNMFSEKDGFPHKPFPNGWKGESGLYAVGFTKLGLLGAAIDAKKIAEDIEVQRHFLPLARPQHC

SEQ ID NO: 82264 - protein, 330 aa, Arabidopsis thaliana
  peptide (1)..(330): Ceres Seq. ID no. 12664742
MPFPSSYPTYPTKQQFVQYLESYAEHFDLKPVFNQTVEEAKFDRRCGLWRVRTTGGKKDETMEYVSRWLVVATGENAEEVMPEIDGIPDFGGPILHTSSYKSGEIFSEKKILVVGCGNSGMEVCLDLCNFNALPSLVVRDSVHVLPQEMLGISTFGISTSLLKWFPVHVVDRFLLRMSRLVLGDTDRLGLVRPKLGPLERKIKCGKTPVLDVGTLAKIRSGHIKVYPELKRVMHYSAEFVDGRVDNFDAIILATGYKSNVPMWLKGVNMFSEKDGFPHKPFPNGWKGESGLYAVGFTKLGLLGAAIDAKKIAEDIEVQRHFLPLARPQHC

SEQ ID NO: 82265 - DNA, 1504 bp, Arabidopsis thaliana
  misc_feature (1)..(1504): Ceres Seq. ID no. 12664747
  misc_feature (1)..(1504): Ortholog of  Ceres SEQ ID NO 13594209 as cited in SEQ ID NO 59089
  misc_feature (1)..(1504): Ortholog of  Ceres SEQ ID NO 14307995 as cited in SEQ ID NO 63970
  misc_feature (1)..(1504): Ortholog of  Ceres SEQ ID NO 13502874 as cited in SEQ ID NO 66298
atggaaataatattagtcactttgtgcttaacaacgctccttgcacttcttctccttaaatccatcctcaaaagaaccaccacgaacaatcttaacctaccaccatctccatggcgacttcccgtgatcggaaacctccaccagctcagcctcaatactcaccgttctctccgttccctaagtctccgatatggaccactcatgctccttcatttcggccgcacaccagtccttatagtctcctcagccgacgttgctcatgacatcttgaagacgtacgatgttatttgtgccaaccgcccaaaaacaaaagtgattgataaaattttgagaggtggcagagatgtggcttttgccccttacggagaatattggaaacaaatgaagagtatttgcattcagaatctactcagcaacaaaatggtccggtcttacaagaagataagagaagacgagataaaactaatgatagaaaaagtggaaaatgcgagttcttgttctcctccctcaccagtaaatctaagccaactctttatgactttgacaaacgatataatatgtagagctgccttgggaagaaaatatagcagcaaggaagatggaattgatgttgagaacatagttagggcattttccgcactcgtgggtgaatttcctatcggcgaatacattcctagtttgtcgtggatcgataaaatccgcggtcaggatcataaaatggaggaagtagataaaagatttgatgagtttttggaaagagtcgtaaaagaacatgaagatgccaataaagacaccagatcggacttggttgatacgttactaacgatccaaagtgataagagtgccttaaaacttataatatgggatatgtttttagcgggaacggcaacaagtctctcgtttcttgaatgggcaatgacagagcttatgagaaatcctaaggtcatgaagaaactccaagaagagattcgttcgagttcacgacaaggtttatttgtaacggagaaagaagctgagaagatggattatttgcaagcagttattaaggaggctttacggttgcgtcctcctgctccactaatggttccacgagtatttagtgaagatgtcacgttaaagggatacaatattcctgcaggaacacaggttataatcaatgcttgggcaatccaacgagatactacaacatgggggatagatgcagaagagtttaggccagaaaggcatttagactctattttggattttcagggacaagatttcaaatttattccattcggatcgggaaaaaggatatgtcctgggataggattcacatcggcattgatcggggtgacattggccaatatcgtgaaacggttcaactggagaatggatgtggaaccacaaagggttcaacatgacctaaccgaagcaaccggtctcgtggttttccgcaaattccctcttattgctattccatcttctgcttgattcctcgtgtcaacacttgtctctctcttgg

SEQ ID NO: 82266 - protein, 490 aa, Arabidopsis thaliana
  peptide (1)..(490): Ceres Seq. ID no. 12664748
MEIILVTLCLTTLLALLLLKSILKRTTTNNLNLPPSPWRLPVIGNLHQLSLNTHRSLRSLSLRYGPLMLLHFGRTPVLIVSSADVAHDILKTYDVICANRPKTKVIDKILRGGRDVAFAPYGEYWKQMKSICIQNLLSNKMVRSYKKIREDEIKLMIEKVENASSCSPPSPVNLSQLFMTLTNDIICRAALGRKYSSKEDGIDVENIVRAFSALVGEFPIGEYIPSLSWIDKIRGQDHKMEEVDKRFDEFLERVVKEHEDANKDTRSDLVDTLLTIQSDKSALKLIIWDMFLAGTATSLSFLEWAMTELMRNPKVMKKLQEEIRSSSRQGLFVTEKEAEKMDYLQAVIKEALRLRPPAPLMVPRVFSEDVTLKGYNIPAGTQVIINAWAIQRDTTTWGIDAEEFRPERHLDSILDFQGQDFKFIPFGSGKRICPGIGFTSALIGVTLANIVKRFNWRMDVEPQRVQHDLTEATGLVVFRKFPLIAIPSSA

SEQ ID NO: 82267 - protein, 423 aa, Arabidopsis thaliana
  peptide (1)..(423): Ceres Seq. ID no. 12664749
MLLHFGRTPVLIVSSADVAHDILKTYDVICANRPKTKVIDKILRGGRDVAFAPYGEYWKQMKSICIQNLLSNKMVRSYKKIREDEIKLMIEKVENASSCSPPSPVNLSQLFMTLTNDIICRAALGRKYSSKEDGIDVENIVRAFSALVGEFPIGEYIPSLSWIDKIRGQDHKMEEVDKRFDEFLERVVKEHEDANKDTRSDLVDTLLTIQSDKSALKLIIWDMFLAGTATSLSFLEWAMTELMRNPKVMKKLQEEIRSSSRQGLFVTEKEAEKMDYLQAVIKEALRLRPPAPLMVPRVFSEDVTLKGYNIPAGTQVIINAWAIQRDTTTWGIDAEEFRPERHLDSILDFQGQDFKFIPFGSGKRICPGIGFTSALIGVTLANIVKRFNWRMDVEPQRVQHDLTEATGLVVFRKFPLIAIPSSA

SEQ ID NO: 82268 - protein, 363 aa, Arabidopsis thaliana
  peptide (1)..(363): Ceres Seq. ID no. 12664750
MKSICIQNLLSNKMVRSYKKIREDEIKLMIEKVENASSCSPPSPVNLSQLFMTLTNDIICRAALGRKYSSKEDGIDVENIVRAFSALVGEFPIGEYIPSLSWIDKIRGQDHKMEEVDKRFDEFLERVVKEHEDANKDTRSDLVDTLLTIQSDKSALKLIIWDMFLAGTATSLSFLEWAMTELMRNPKVMKKLQEEIRSSSRQGLFVTEKEAEKMDYLQAVIKEALRLRPPAPLMVPRVFSEDVTLKGYNIPAGTQVIINAWAIQRDTTTWGIDAEEFRPERHLDSILDFQGQDFKFIPFGSGKRICPGIGFTSALIGVTLANIVKRFNWRMDVEPQRVQHDLTEATGLVVFRKFPLIAIPSSA

SEQ ID NO: 82269 - DNA, 817 bp, Arabidopsis thaliana
  misc_feature (1)..(817): Ceres Seq. ID no. 12664775
  misc_feature (1)..(817): Ortholog of  Ceres SEQ ID NO 13661001 as cited in SEQ ID NO 67531
atggtggaagaagtttggagaaagggtccatggaccgccgaagaagaccgtcttttgatcgaatacgtccgtgttcacggtgaaggtcgttggaactctgtctctaaactcgcaggattgaaaaggaatggcaaaagctgcagactaagatgggtgaattaccttagaccagacctcaagagaggacagatcactccacatgaagaaagtataatacttgagctacacgctaagtggggaaataggtggtcaacaattgcacgtagtttaccaggaagaacagacaatgagatcaagaactattggagaacccatttcaagaaaaaggcaaagcctacgactaacaatgcggagaagataaagagtcgtctcctaaaaaggcaacacttcaaggaacagagagaaatagagttgcaacaagaacagcagttgtttcagttcgaccaactcggtatgaaaaagatcatctctttactcgaagaaaacaatagcagtagcagtagcgatggcggtggtgatgtgttctattatcctgatcaaataacacattcatcaaaaccctttggctataactctaattcattagaggagcagttacaaggtagattttctcctgtaaacatacctgatgctaatactatgaacgaagacaatgccatatgggacgggttttggaacatggatgttgtaaatggacatggtgggaacttgggtgttgtggctgctactgctgcttgtggcccaaggaagccctatttccataacttggtgattccattttgttaagtatggtctacttttggacttcggttttctg

SEQ ID NO: 82270 - protein, 261 aa, Arabidopsis thaliana
  peptide (1)..(261): Ceres Seq. ID no. 12664776
MVEEVWRKGPWTAEEDRLLIEYVRVHGEGRWNSVSKLAGLKRNGKSCRLRWVNYLRPDLKRGQITPHEESIILELHAKWGNRWSTIARSLPGRTDNEIKNYWRTHFKKKAKPTTNNAEKIKSRLLKRQHFKEQREIELQQEQQLFQFDQLGMKKIISLLEENNSSSSSDGGGDVFYYPDQITHSSKPFGYNSNSLEEQLQGRFSPVNIPDANTMNEDNAIWDGFWNMDVVNGHGGNLGVVAATAACGPRKPYFHNLVIPFC

SEQ ID NO: 82271 - DNA, 893 bp, Arabidopsis thaliana
  misc_feature (1)..(893): Ceres Seq. ID no. 12664781
  misc_feature (1)..(893): Ortholog of  Ceres SEQ ID NO 15168492 as cited in SEQ ID NO 58104
aatctttcctacaaaacaaaaccaagaatcatacaaaacaagcatcctccaatatgatgaaacaatcaccattctcacttttaacatcaatctttctcatagctgctctttttactgcaactaccgcactcgatcctgcacccgaagacccgatttttgaattgtacatgcacgatatacttgggggaagcagtcccacagcaagacccattacgggtttgcttggaaacatctacaacggtcaagtaccgtttgctaagcagatcggttttgttccaccgcaaaacggtgtagccatacccaacgcaaatggggcaatgccaacggttaacggtatcaacggtattccattaggtactggtttgtctggaacagcgttttctggtcagaatctaaatgggattcagactcagttgggtcctgatggtctgagtcttgggtttggaacaatcacggtgattgacgacataatcacatctggtcctgacttggggtcacaaccacttggtaaggctcaaggtgtttatgttgccagctcagcagatggaagcacgcagatgatggctttcacagctatgcttgaaggtggagagtacaatgataatctaaatttctatggaatctataggataggaagcgccatgtcacatctgtcagtgactggaggaaccggaaggtttaagaacgcttgcggatttgcagaggttaggccgttgattcctgcgggccaacactttgttgatggagctgagatgctgttgaggatcattgtccatctgaaatactgagaattatgtttaaaacttgtgaatgaaatgtgtgtgaaatgtgtgatgccatttgtaattaagaatgtttccttcttgtgaattattccaacaactattctgaga

SEQ ID NO: 82272 - protein, 261 aa, Arabidopsis thaliana
  peptide (1)..(261): Ceres Seq. ID no. 12664782
SFLQNKTKNHTKQASSNMMKQSPFSLLTSIFLIAALFTATTALDPAPEDPIFELYMHDILGGSSPTARPITGLLGNIYNGQVPFAKQIGFVPPQNGVAIPNANGAMPTVNGINGIPLGTGLSGTAFSGQNLNGIQTQLGPDGLSLGFGTITVIDDIITSGPDLGSQPLGKAQGVYVASSADGSTQMMAFTAMLEGGEYNDNLNFYGIYRIGSAMSHLSVTGGTGRFKNACGFAEVRPLIPAGQHFVDGAEMLLRIIVHLKY

SEQ ID NO: 82273 - protein, 244 aa, Arabidopsis thaliana
  peptide (1)..(244): Ceres Seq. ID no. 12664783
MMKQSPFSLLTSIFLIAALFTATTALDPAPEDPIFELYMHDILGGSSPTARPITGLLGNIYNGQVPFAKQIGFVPPQNGVAIPNANGAMPTVNGINGIPLGTGLSGTAFSGQNLNGIQTQLGPDGLSLGFGTITVIDDIITSGPDLGSQPLGKAQGVYVASSADGSTQMMAFTAMLEGGEYNDNLNFYGIYRIGSAMSHLSVTGGTGRFKNACGFAEVRPLIPAGQHFVDGAEMLLRIIVHLKY

SEQ ID NO: 82274 - protein, 243 aa, Arabidopsis thaliana
  peptide (1)..(243): Ceres Seq. ID no. 12664784
MKQSPFSLLTSIFLIAALFTATTALDPAPEDPIFELYMHDILGGSSPTARPITGLLGNIYNGQVPFAKQIGFVPPQNGVAIPNANGAMPTVNGINGIPLGTGLSGTAFSGQNLNGIQTQLGPDGLSLGFGTITVIDDIITSGPDLGSQPLGKAQGVYVASSADGSTQMMAFTAMLEGGEYNDNLNFYGIYRIGSAMSHLSVTGGTGRFKNACGFAEVRPLIPAGQHFVDGAEMLLRIIVHLKY

SEQ ID NO: 82275 - DNA, 3075 bp, Arabidopsis thaliana
  misc_feature (1)..(3075): Ceres Seq. ID no. 12664793
  misc_feature (1)..(3075): Ortholog of  Ceres SEQ ID NO 12586556 as cited in SEQ ID NO 64667
  misc_feature (1)..(3075): Ortholog of  Ceres SEQ ID NO 13660894 as cited in SEQ ID NO 67475
atggtgttcctcactctttgtgggaccaggagagctagttttgctgctatatctgtttatatctctgaggatgaatcatttcaagaaaagagaattgattccgtggagaatcgtggaattcgacctaatcatcaaactttgaaatggcttcttgaaggatgtttgaagacaaatgggtctttagatgaaggaagaaagctacattcccagattttgaagttgggtttggatagcaatggttgcctctctgaaaagctttttgatttttatctttttaaaggagatttatatggtgctttcaaggtgtttgacgaaatgcctgagagaacgatttttacttggaataagatgataaaggagttagcttctaggaatttgattggagaagtgtttggtctttttgtgagaatggttagtgagaatgttactccgaatgaaggaactttcagtggtgttttggaagcatgtcgtggtggtagtgttgcttttgatgtagttgagcagattcatgcaaggattttatatcagggcttgagggatagtacggttgtgtgtaatcctttgattgacttgtactctaggaatgggtttgtggatttagctagaagggtttttgatgggttacgtctgaaggatcatagttcttgggttgcaatgatatccgggctttcgaaaaatgaatgtgaagcagaagccattagattgttctgcgatatgtatgttttaggtatcatgccaacgccttatgcgttttcaagtgttttaagtgcgtgtaagaagatagaatctcttgagattggtgagcagcttcatgggctcgtattgaagttagggttttcctccgacacttatgtttgcaatgcacttgtgtctttgtactttcatttgggaaatttgatatcagcagaacacatcttcagtaacatgtcacagagagatgcagttacttataacactcttatcaacgggctttctcagtgtggttatggtgagaaagctatggaattgttcaaaagaatgcaccttgatggacttgaaccagacagtaatactcttgcgagccttgtggttgcatgttcagctgatggaactctgtttaggggacaacagctacatgcatacacaactaaacttggttttgcttcaaacaacaagattgaaggtgcgctccttaatctgtatgcaaaatgcgctgatattgaaaccgcccttgattattttcttgagactgaggttgaaaatgtagttctctggaatgtgatgctagtagcttatgggttattagacgatttaagaaattcttttaggattttcagacagatgcagatagaggaaattgttccaaatcaatatacctacccgagtattttgaaaacttgcatacgacttggggatctggagcttggagaacaaatccatagtcaaataataaaaactaactttcagctcaatgcctatgtttgtagtgtgctcatcgatatgtatgcaaaattaggaaagttggatactgcctgggatatacttataaggtttgctggaaaagatgttgtgtcttggacaacaatgattgcaggttacacgcaatacaatttcgacgacaaagctttaacaactttcaggcagatgttggatcgagggattcggtctgatgaagttggattgacaaatgcagttagtgcatgtgctggtcttcaagccttaaaggaaggacagcaaattcatgctcaagcttgtgtatctggtttctcatctgacctgccatttcaaaatgcactggttacactttattctagatgcggaaaaatagaggaatcgtatttagcgtttgaacaaactgaagctggagataatatagcatggaatgctctggtatccggatttcagcagagtggaaacaatgaagaagcacttcgtgtcttcgttcgaatgaacagagaaggaattgacaataataatttcacgtttgggtctgctgtgaaagctgcttctgagacagctaacatgaaacaagggaagcaggttcatgctgtgatcaccaaaaccggatacgattcagaaaccgaagtttgcaatgctttaatctctatgtatgccaagtgtgggagcatttctgatgcagagaagcagttccttgaagtctccacgaaaaatgaagtttcgtggaatgcgataattaatgcttattctaaacatgggtttggttctgaagcactagattcttttgaccagatgatacattctaatgtaaggcctaatcatgtgacgcttgtgggagttctatcagcatgtagccacataggactagtggacaaggggattgcatactttgaatccatgaattcagaatatggattatctcctaaaccggaacactatgtgtgtgtagtggatatgctaactcgagctggtcttttgagccgtgcgaaagagttcattcaggaaatgcctattaagccagatgccttggtctggagaacacttttgagtgcttgtgtagtgcacaagaacatggaaataggagaatttgcagcgcatcatctcctagagttagaacctgaagactcagcaacatatgttcttctgtcaaatctgtatgcggtgtccaagaaatgggatgctagggatcttacaagacaaaagatgaaagaaaagggtgtgaagaaagaaccgggacaaagttggattgaagttaaaaactcaattcactctttctatgttggtgaccagaatcacccgttagcagatgagatacatgaatacttccaagatcttaccaaacgagcatctgaaatcgggtatgtgcaagactgtttcagcctattgaatgaactgcagcacgagcaaaaagatccaataattttcatccacagcgagaaattagcaatttcatttggactccttagcttgcctgcaacagtgcctataaatgtaatgaagaacctacgtgtttgcaacgattgccatgcttggataaagtttgtatctaaggtatcaaatcgagaaatcatagtgagggatgcatataggtttcatcattttgaaggaggtgcttgctcttgtaaagattactggtaa

SEQ ID NO: 82276 - protein, 1024 aa, Arabidopsis thaliana
  peptide (1)..(1024): Ceres Seq. ID no. 12664794
MVFLTLCGTRRASFAAISVYISEDESFQEKRIDSVENRGIRPNHQTLKWLLEGCLKTNGSLDEGRKLHSQILKLGLDSNGCLSEKLFDFYLFKGDLYGAFKVFDEMPERTIFTWNKMIKELASRNLIGEVFGLFVRMVSENVTPNEGTFSGVLEACRGGSVAFDVVEQIHARILYQGLRDSTVVCNPLIDLYSRNGFVDLARRVFDGLRLKDHSSWVAMISGLSKNECEAEAIRLFCDMYVLGIMPTPYAFSSVLSACKKIESLEIGEQLHGLVLKLGFSSDTYVCNALVSLYFHLGNLISAEHIFSNMSQRDAVTYNTLINGLSQCGYGEKAMELFKRMHLDGLEPDSNTLASLVVACSADGTLFRGQQLHAYTTKLGFASNNKIEGALLNLYAKCADIETALDYFLETEVENVVLWNVMLVAYGLLDDLRNSFRIFRQMQIEEIVPNQYTYPSILKTCIRLGDLELGEQIHSQIIKTNFQLNAYVCSVLIDMYAKLGKLDTAWDILIRFAGKDVVSWTTMIAGYTQYNFDDKALTTFRQMLDRGIRSDEVGLTNAVSACAGLQALKEGQQIHAQACVSGFSSDLPFQNALVTLYSRCGKIEESYLAFEQTEAGDNIAWNALVSGFQQSGNNEEALRVFVRMNREGIDNNNFTFGSAVKAASETANMKQGKQVHAVITKTGYDSETEVCNALISMYAKCGSISDAEKQFLEVSTKNEVSWNAIINAYSKHGFGSEALDSFDQMIHSNVRPNHVTLVGVLSACSHIGLVDKGIAYFESMNSEYGLSPKPEHYVCVVDMLTRAGLLSRAKEFIQEMPIKPDALVWRTLLSACVVHKNMEIGEFAAHHLLELEPEDSATYVLLSNLYAVSKKWDARDLTRQKMKEKGVKKEPGQSWIEVKNSIHSFYVGDQNHPLADEIHEYFQDLTKRASEIGYVQDCFSLLNELQHEQKDPIIFIHSEKLAISFGLLSLPATVPINVMKNLRVCNDCHAWIKFVSKVSNREIIVRDAYRFHHFEGGACSCKDYW

SEQ ID NO: 82277 - protein, 919 aa, Arabidopsis thaliana
  peptide (1)..(919): Ceres Seq. ID no. 12664795
MPERTIFTWNKMIKELASRNLIGEVFGLFVRMVSENVTPNEGTFSGVLEACRGGSVAFDVVEQIHARILYQGLRDSTVVCNPLIDLYSRNGFVDLARRVFDGLRLKDHSSWVAMISGLSKNECEAEAIRLFCDMYVLGIMPTPYAFSSVLSACKKIESLEIGEQLHGLVLKLGFSSDTYVCNALVSLYFHLGNLISAEHIFSNMSQRDAVTYNTLINGLSQCGYGEKAMELFKRMHLDGLEPDSNTLASLVVACSADGTLFRGQQLHAYTTKLGFASNNKIEGALLNLYAKCADIETALDYFLETEVENVVLWNVMLVAYGLLDDLRNSFRIFRQMQIEEIVPNQYTYPSILKTCIRLGDLELGEQIHSQIIKTNFQLNAYVCSVLIDMYAKLGKLDTAWDILIRFAGKDVVSWTTMIAGYTQYNFDDKALTTFRQMLDRGIRSDEVGLTNAVSACAGLQALKEGQQIHAQACVSGFSSDLPFQNALVTLYSRCGKIEESYLAFEQTEAGDNIAWNALVSGFQQSGNNEEALRVFVRMNREGIDNNNFTFGSAVKAASETANMKQGKQVHAVITKTGYDSETEVCNALISMYAKCGSISDAEKQFLEVSTKNEVSWNAIINAYSKHGFGSEALDSFDQMIHSNVRPNHVTLVGVLSACSHIGLVDKGIAYFESMNSEYGLSPKPEHYVCVVDMLTRAGLLSRAKEFIQEMPIKPDALVWRTLLSACVVHKNMEIGEFAAHHLLELEPEDSATYVLLSNLYAVSKKWDARDLTRQKMKEKGVKKEPGQSWIEVKNSIHSFYVGDQNHPLADEIHEYFQDLTKRASEIGYVQDCFSLLNELQHEQKDPIIFIHSEKLAISFGLLSLPATVPINVMKNLRVCNDCHAWIKFVSKVSNREIIVRDAYRFHHFEGGACSCKDYW

SEQ ID NO: 82278 - protein, 908 aa, Arabidopsis thaliana
  peptide (1)..(908): Ceres Seq. ID no. 12664796
MIKELASRNLIGEVFGLFVRMVSENVTPNEGTFSGVLEACRGGSVAFDVVEQIHARILYQGLRDSTVVCNPLIDLYSRNGFVDLARRVFDGLRLKDHSSWVAMISGLSKNECEAEAIRLFCDMYVLGIMPTPYAFSSVLSACKKIESLEIGEQLHGLVLKLGFSSDTYVCNALVSLYFHLGNLISAEHIFSNMSQRDAVTYNTLINGLSQCGYGEKAMELFKRMHLDGLEPDSNTLASLVVACSADGTLFRGQQLHAYTTKLGFASNNKIEGALLNLYAKCADIETALDYFLETEVENVVLWNVMLVAYGLLDDLRNSFRIFRQMQIEEIVPNQYTYPSILKTCIRLGDLELGEQIHSQIIKTNFQLNAYVCSVLIDMYAKLGKLDTAWDILIRFAGKDVVSWTTMIAGYTQYNFDDKALTTFRQMLDRGIRSDEVGLTNAVSACAGLQALKEGQQIHAQACVSGFSSDLPFQNALVTLYSRCGKIEESYLAFEQTEAGDNIAWNALVSGFQQSGNNEEALRVFVRMNREGIDNNNFTFGSAVKAASETANMKQGKQVHAVITKTGYDSETEVCNALISMYAKCGSISDAEKQFLEVSTKNEVSWNAIINAYSKHGFGSEALDSFDQMIHSNVRPNHVTLVGVLSACSHIGLVDKGIAYFESMNSEYGLSPKPEHYVCVVDMLTRAGLLSRAKEFIQEMPIKPDALVWRTLLSACVVHKNMEIGEFAAHHLLELEPEDSATYVLLSNLYAVSKKWDARDLTRQKMKEKGVKKEPGQSWIEVKNSIHSFYVGDQNHPLADEIHEYFQDLTKRASEIGYVQDCFSLLNELQHEQKDPIIFIHSEKLAISFGLLSLPATVPINVMKNLRVCNDCHAWIKFVSKVSNREIIVRDAYRFHHFEGGACSCKDYW

SEQ ID NO: 82279 - DNA, 1523 bp, Arabidopsis thaliana
  misc_feature (1)..(1523): Ceres Seq. ID no. 12664813
  misc_feature (1)..(1523): Ortholog of  Ceres SEQ ID NO 15176440 as cited in SEQ ID NO 53697
  misc_feature (1)..(1523): Ortholog of  Ceres SEQ ID NO 14314717 as cited in SEQ ID NO 54224
  misc_feature (1)..(1523): Ortholog of  Ceres SEQ ID NO 14313429 as cited in SEQ ID NO 55662
atcacctacaaagcagagagagagagagagagagataaatgtccaagcaaaggttcatataattttatgttattaaatttgctttttttttgttaaagtgttacatacatcgatcgacttgttagttcaaagaatcagtttaactccactgagccatcatgggtcgatctcaagaacagggacagggacagggtccggttcacagcattcggctatctaccgtaggtgcgacccggccgacagagacgggtacgacccacgaaccaaccggtttagacctagccatgaagctccactacctcaaggcggcatacatttactcagccgagacagcacgtgacttaaccgtgagacacctgaaggaggccatgttcatgttgttcgaccagatcgcttggaccacaggcaggttctcaaggagagactcgggccgtccgtacatcaagtgcaacgactgcggcacacgtttcgtggaaggtcaatgcaatctcactgtggaggagtggctcagtaaaccggaccggtcagttgatgagtttctggtttatcatcatcctattggaccggaattgacgttctctcctttgatctacgttcagatgacccggtttaaatgcggaggattagggttgggcctaagctgggccaatataataggagacgcattctctctgttctatgccttcaacttatgggctaaggccattaccggagaaaagatttatgccccaacaacaccctctataggagagagaaggttccaaagcccaaacccgacggttaaagatccggtttcaattaaacgggtcgaacccgttggagatctctgggtcactccaaacgacaagaaattggcgaattactgtttcaatctctcagtcgccgatcagatatcaccacattttccggcgaagggagatgactcgattccggtgttcgagattctcgccggaatcatatggaaatgcatagctaaagttagggtagagccaaagcctgtaacggttacgatcattaaaaaagatccgaacgatctgaaacttaatgcgattcgaaacagtcaggtgatcagctcagtgagcgtggattttccggtggcggaagcgacggtggaggaattagtgaaagctatgggggaagcgaaggatgagagatgtggaattgaggagatcggagagagttgcgatgggaatttggattttgttgtttatggagcgaaattgacgtttctggatctgactggtgaggatttgtatgaggcgaaagtgatggggaagtcgccggagtcggtttattgtaatgtggaggggataggggaggagggattggtggttgtttacgcggcggcgaaatcggaggagagggttgtgacggttacgttgccggaggaagagatggagagggtaaaattggaatttaagaagtttggtttgatcgcgccatgagaaatcaaacggcaaataataagtgtaaacgtgaagtgatgaagtgttatgttatcgttttaaaacaagtaaagtttc

SEQ ID NO: 82280 - protein, 428 aa, Arabidopsis thaliana
  peptide (1)..(428): Ceres Seq. ID no. 12664814
MGRSQEQGQGQGPVHSIRLSTVGATRPTETGTTHEPTGLDLAMKLHYLKAAYIYSAETARDLTVRHLKEAMFMLFDQIAWTTGRFSRRDSGRPYIKCNDCGTRFVEGQCNLTVEEWLSKPDRSVDEFLVYHHPIGPELTFSPLIYVQMTRFKCGGLGLGLSWANIIGDAFSLFYAFNLWAKAITGEKIYAPTTPSIGERRFQSPNPTVKDPVSIKRVEPVGDLWVTPNDKKLANYCFNLSVADQISPHFPAKGDDSIPVFEILAGIIWKCIAKVRVEPKPVTVTIIKKDPNDLKLNAIRNSQVISSVSVDFPVAEATVEELVKAMGEAKDERCGIEEIGESCDGNLDFVVYGAKLTFLDLTGEDLYEAKVMGKSPESVYCNVEGIGEEGLVVVYAAAKSEERVVTVTLPEEEMERVKLEFKKFGLIAP

SEQ ID NO: 82281 - protein, 386 aa, Arabidopsis thaliana
  peptide (1)..(386): Ceres Seq. ID no. 12664815
MKLHYLKAAYIYSAETARDLTVRHLKEAMFMLFDQIAWTTGRFSRRDSGRPYIKCNDCGTRFVEGQCNLTVEEWLSKPDRSVDEFLVYHHPIGPELTFSPLIYVQMTRFKCGGLGLGLSWANIIGDAFSLFYAFNLWAKAITGEKIYAPTTPSIGERRFQSPNPTVKDPVSIKRVEPVGDLWVTPNDKKLANYCFNLSVADQISPHFPAKGDDSIPVFEILAGIIWKCIAKVRVEPKPVTVTIIKKDPNDLKLNAIRNSQVISSVSVDFPVAEATVEELVKAMGEAKDERCGIEEIGESCDGNLDFVVYGAKLTFLDLTGEDLYEAKVMGKSPESVYCNVEGIGEEGLVVVYAAAKSEERVVTVTLPEEEMERVKLEFKKFGLIAP

SEQ ID NO: 82282 - protein, 358 aa, Arabidopsis thaliana
  peptide (1)..(358): Ceres Seq. ID no. 12664816
MFMLFDQIAWTTGRFSRRDSGRPYIKCNDCGTRFVEGQCNLTVEEWLSKPDRSVDEFLVYHHPIGPELTFSPLIYVQMTRFKCGGLGLGLSWANIIGDAFSLFYAFNLWAKAITGEKIYAPTTPSIGERRFQSPNPTVKDPVSIKRVEPVGDLWVTPNDKKLANYCFNLSVADQISPHFPAKGDDSIPVFEILAGIIWKCIAKVRVEPKPVTVTIIKKDPNDLKLNAIRNSQVISSVSVDFPVAEATVEELVKAMGEAKDERCGIEEIGESCDGNLDFVVYGAKLTFLDLTGEDLYEAKVMGKSPESVYCNVEGIGEEGLVVVYAAAKSEERVVTVTLPEEEMERVKLEFKKFGLIAP

SEQ ID NO: 82283 - DNA, 1413 bp, Arabidopsis thaliana
  misc_feature (1)..(1413): Ceres Seq. ID no. 12664824
  misc_feature (1)..(1413): Ortholog of  Ceres SEQ ID NO 13597732 as cited in SEQ ID NO 64810
  misc_feature (1)..(1413): Ortholog of  Ceres SEQ ID NO 14301912 as cited in SEQ ID NO 67786
atggaaccagtctattcttggggaaacacgcatcttgacttcgtcgatccggagatctacgacctaatcgagaaggagaaacatcgtcaatgtcgaggaatcgaactcatagcagccgagaatttcacttccgtggccgtcatggaagctctcggaagttgcttaaccaacaaatactcggaaggtatgcctggtaatcgttactacggaggtaccgagttcatcgatgagatagagagtctctgccgctcacgctctctcgaagccttccattgcaatccagagaaatggggcgttaacgttcagccttactctggttcccctgcgaatttcgcagcctacaccgccttgctccagcctcatgatcgtatcatggggcttgatttgccatcaggtggtcatataacgcatggttactatagctctggtgggaagaacatctccgcgacctcgatctactttgaaaaccttccctacaaggtggattccaagactggttacattgattacgacaaacttgaggagaaagctatggattttaggcctaagttaattatctgtggaggcacttcttaccctagggaatgggattacgcgagattcagggctgtcgccgacaaggttggagcttttttgctctgtgatatggctcataacagtgccctcgttgctgctcaggaagccgcagacccgttcgagtactgtgacgttgtgacaacgtcaactcacaagagcttgagaggtccaagggctggtatgatcttttatagaaagggaccaaaaccagccaagaagggccaacccgagggtgaagtctacgatttcgacgcaaaaatcaactctgcggtattccctgcgcttcaaagtggtcctcacaataacaagattggtgctctagctgttgcgttgaagcaggttatggctcctagcttcaaagtttatgcaaaacaggtgaaagctaatgctgcttgccttgcaagctacctaataaataagggatatactcttgtaaccgatggaactgataaccaccttattctttgggatcttcgccctcttggattgaccggtaacaaggttgagaaggtttgtgaattgtgctacattactttgaacaggaatgcggtattcggagacactagttttcttgctcccggaggtgtaagaatcggtacaccggcgatgacatcgagaggattggtggagaaggactttgagaagataggagagttcctgcaccgtgccgtgacaatcacgttggacatccaggagcagtacggtaaggtgatgaaggacttcaacaagggtttggtgaacaacaaggagatcgatgagataaaggctgacgttgaggagttcacgtacgattttgatatgcctggatttttcatctctgagtcaaggaacgattag

SEQ ID NO: 82284 - protein, 470 aa, Arabidopsis thaliana
  peptide (1)..(470): Ceres Seq. ID no. 12664825
MEPVYSWGNTHLDFVDPEIYDLIEKEKHRQCRGIELIAAENFTSVAVMEALGSCLTNKYSEGMPGNRYYGGTEFIDEIESLCRSRSLEAFHCNPEKWGVNVQPYSGSPANFAAYTALLQPHDRIMGLDLPSGGHITHGYYSSGGKNISATSIYFENLPYKVDSKTGYIDYDKLEEKAMDFRPKLIICGGTSYPREWDYARFRAVADKVGAFLLCDMAHNSALVAAQEAADPFEYCDVVTTSTHKSLRGPRAGMIFYRKGPKPAKKGQPEGEVYDFDAKINSAVFPALQSGPHNNKIGALAVALKQVMAPSFKVYAKQVKANAACLASYLINKGYTLVTDGTDNHLILWDLRPLGLTGNKVEKVCELCYITLNRNAVFGDTSFLAPGGVRIGTPAMTSRGLVEKDFEKIGEFLHRAVTITLDIQEQYGKVMKDFNKGLVNNKEIDEIKADVEEFTYDFDMPGFFISESRND

SEQ ID NO: 82285 - protein, 423 aa, Arabidopsis thaliana
  peptide (1)..(423): Ceres Seq. ID no. 12664826
MEALGSCLTNKYSEGMPGNRYYGGTEFIDEIESLCRSRSLEAFHCNPEKWGVNVQPYSGSPANFAAYTALLQPHDRIMGLDLPSGGHITHGYYSSGGKNISATSIYFENLPYKVDSKTGYIDYDKLEEKAMDFRPKLIICGGTSYPREWDYARFRAVADKVGAFLLCDMAHNSALVAAQEAADPFEYCDVVTTSTHKSLRGPRAGMIFYRKGPKPAKKGQPEGEVYDFDAKINSAVFPALQSGPHNNKIGALAVALKQVMAPSFKVYAKQVKANAACLASYLINKGYTLVTDGTDNHLILWDLRPLGLTGNKVEKVCELCYITLNRNAVFGDTSFLAPGGVRIGTPAMTSRGLVEKDFEKIGEFLHRAVTITLDIQEQYGKVMKDFNKGLVNNKEIDEIKADVEEFTYDFDMPGFFISESRND

SEQ ID NO: 82286 - protein, 408 aa, Arabidopsis thaliana
  peptide (1)..(408): Ceres Seq. ID no. 12664827
MPGNRYYGGTEFIDEIESLCRSRSLEAFHCNPEKWGVNVQPYSGSPANFAAYTALLQPHDRIMGLDLPSGGHITHGYYSSGGKNISATSIYFENLPYKVDSKTGYIDYDKLEEKAMDFRPKLIICGGTSYPREWDYARFRAVADKVGAFLLCDMAHNSALVAAQEAADPFEYCDVVTTSTHKSLRGPRAGMIFYRKGPKPAKKGQPEGEVYDFDAKINSAVFPALQSGPHNNKIGALAVALKQVMAPSFKVYAKQVKANAACLASYLINKGYTLVTDGTDNHLILWDLRPLGLTGNKVEKVCELCYITLNRNAVFGDTSFLAPGGVRIGTPAMTSRGLVEKDFEKIGEFLHRAVTITLDIQEQYGKVMKDFNKGLVNNKEIDEIKADVEEFTYDFDMPGFFISESRND

SEQ ID NO: 82287 - DNA, 1839 bp, Arabidopsis thaliana
  misc_feature (1)..(1839): Ceres Seq. ID no. 12664848
  misc_feature (1)..(1839): Ortholog of  Ceres SEQ ID NO 12586556 as cited in SEQ ID NO 64667
  misc_feature (1)..(1839): Ortholog of  Ceres SEQ ID NO 13660894 as cited in SEQ ID NO 67475
atgcttatccctcactatcttcatcagctccagctctgcgccaggaatcgaaccctaaccactgctaaagccctccatgcccacatcgtcaagctcgggatcgttcaatgttgccctttggccaacacacttgtcaatgtctatgggaaatgcggtgctgcttctcatgctctccaggtgttcgacgaaatgcctcatagagatcacatcgcctgggcctcggttctcacagctcttaatcaagccaatctctctggtaagacactatcagtattttcttcagtgggttcgagctctgggttgcgtcctgatgattttgtgttctcggctcttgttaaggcttgtgctaacttaggatctattgatcacgggaggcaagttcattgccattttatagtctctgagtatgctaatgatgaagttgttaagtcttcactggttgatatgtatgctaaatgtggattgcttaatagtgctaaagcagttttcgattctataagagtgaaaaacaccatttcatggactgcaatggtatctggatatgctaaaagcggaagaaaggaagaagctttggagctttttaggatattaccagtcaagaatttgtattcttggactgcgttgatctctggttttgtacagagtgggaaagggcttgaagctttttctgttttcactgaaatgaggagagaaagagttgacattttggatcctttagttctttcgagcatcgttggcgcttgtgctaatttggcagcttctatagcggggaggcaggttcatgggttggttatagctctaggatttgattcttgtgtgtttattagtaacgcccttatcgatatgtacgctaaatgcagcgatgttatagctgcaaaggatattttcagtaggatgcgtcacagagatgtagtttcatggacatcgcttatagttggaatggctcagcacgggcaggctgagaaggcattagcgttgtatgatgacatggtttctcacggtgtaaagcccaatgaggtcacatttgttgggttgatatatgcgtgtagccatgtcggttttgttgagaaaggccgtgagcttttccaatcaatgactaaggactatggaattcgcccatctttgcagcattatacatgcttattggatcttctcggtcgctctggactccttgatgaggctgagaacttaattcatacaatgccgtttcctccagatgaaccaacatgggctgctttacttagcgcttgcaagcgccagggacgaggtcagatgggtataagaatcgctgatcatctcgtaagcagctttaaactgaaagatccatcgacttatatacttttatcaaacatctatgcaagtgcttctttgtggggaaaagtatcagaagcaagaaggaaactaggagaaatggaagttagaaaggatccagggcacagtagcgtcgaggtacggaaagaaaccgaagtgttttacgcaggagaaacatctcatcctctaaaagaagacatttttcgattgcttaagaagctagaggaagaaatgaggataagaaatggttatgttcctgatactagttggatcctacacgacatggatgagcaagagaaagaaaagcttttgttttggcatagcgaacgatccgctgttgcatacggattgcttaaagctgttccgggaactcctatacggattgtgaaaaatctaagggtttgtggagattgtcatgttgttctgaaacatataagtgagattacagaaagagagattatagttagagatgcgactagatatcatcattttaagggaggaaaatgttcctgcaatgacttctggtaa

SEQ ID NO: 82288 - protein, 612 aa, Arabidopsis thaliana
  peptide (1)..(612): Ceres Seq. ID no. 12664849
MLIPHYLHQLQLCARNRTLTTAKALHAHIVKLGIVQCCPLANTLVNVYGKCGAASHALQVFDEMPHRDHIAWASVLTALNQANLSGKTLSVFSSVGSSSGLRPDDFVFSALVKACANLGSIDHGRQVHCHFIVSEYANDEVVKSSLVDMYAKCGLLNSAKAVFDSIRVKNTISWTAMVSGYAKSGRKEEALELFRILPVKNLYSWTALISGFVQSGKGLEAFSVFTEMRRERVDILDPLVLSSIVGACANLAASIAGRQVHGLVIALGFDSCVFISNALIDMYAKCSDVIAAKDIFSRMRHRDVVSWTSLIVGMAQHGQAEKALALYDDMVSHGVKPNEVTFVGLIYACSHVGFVEKGRELFQSMTKDYGIRPSLQHYTCLLDLLGRSGLLDEAENLIHTMPFPPDEPTWAALLSACKRQGRGQMGIRIADHLVSSFKLKDPSTYILLSNIYASASLWGKVSEARRKLGEMEVRKDPGHSSVEVRKETEVFYAGETSHPLKEDIFRLLKKLEEEMRIRNGYVPDTSWILHDMDEQEKEKLLFWHSERSAVAYGLLKAVPGTPIRIVKNLRVCGDCHVVLKHISEITEREIIVRDATRYHHFKGGKCSCNDFW

SEQ ID NO: 82289 - protein, 549 aa, Arabidopsis thaliana
  peptide (1)..(549): Ceres Seq. ID no. 12664850
MPHRDHIAWASVLTALNQANLSGKTLSVFSSVGSSSGLRPDDFVFSALVKACANLGSIDHGRQVHCHFIVSEYANDEVVKSSLVDMYAKCGLLNSAKAVFDSIRVKNTISWTAMVSGYAKSGRKEEALELFRILPVKNLYSWTALISGFVQSGKGLEAFSVFTEMRRERVDILDPLVLSSIVGACANLAASIAGRQVHGLVIALGFDSCVFISNALIDMYAKCSDVIAAKDIFSRMRHRDVVSWTSLIVGMAQHGQAEKALALYDDMVSHGVKPNEVTFVGLIYACSHVGFVEKGRELFQSMTKDYGIRPSLQHYTCLLDLLGRSGLLDEAENLIHTMPFPPDEPTWAALLSACKRQGRGQMGIRIADHLVSSFKLKDPSTYILLSNIYASASLWGKVSEARRKLGEMEVRKDPGHSSVEVRKETEVFYAGETSHPLKEDIFRLLKKLEEEMRIRNGYVPDTSWILHDMDEQEKEKLLFWHSERSAVAYGLLKAVPGTPIRIVKNLRVCGDCHVVLKHISEITEREIIVRDATRYHHFKGGKCSCNDFW

SEQ ID NO: 82290 - protein, 464 aa, Arabidopsis thaliana
  peptide (1)..(464): Ceres Seq. ID no. 12664851
MYAKCGLLNSAKAVFDSIRVKNTISWTAMVSGYAKSGRKEEALELFRILPVKNLYSWTALISGFVQSGKGLEAFSVFTEMRRERVDILDPLVLSSIVGACANLAASIAGRQVHGLVIALGFDSCVFISNALIDMYAKCSDVIAAKDIFSRMRHRDVVSWTSLIVGMAQHGQAEKALALYDDMVSHGVKPNEVTFVGLIYACSHVGFVEKGRELFQSMTKDYGIRPSLQHYTCLLDLLGRSGLLDEAENLIHTMPFPPDEPTWAALLSACKRQGRGQMGIRIADHLVSSFKLKDPSTYILLSNIYASASLWGKVSEARRKLGEMEVRKDPGHSSVEVRKETEVFYAGETSHPLKEDIFRLLKKLEEEMRIRNGYVPDTSWILHDMDEQEKEKLLFWHSERSAVAYGLLKAVPGTPIRIVKNLRVCGDCHVVLKHISEITEREIIVRDATRYHHFKGGKCSCNDFW

SEQ ID NO: 82291 - DNA, 1546 bp, Arabidopsis thaliana
  misc_feature (1)..(1546): Ceres Seq. ID no. 12664860
  misc_feature (1)..(1546): Ortholog of  Ceres SEQ ID NO 13594345 as cited in SEQ ID NO 58043
  misc_feature (1)..(1546): Ortholog of  Ceres SEQ ID NO 14302832 as cited in SEQ ID NO 64926
  misc_feature (1)..(1546): Ortholog of  Ceres SEQ ID NO 13662880 as cited in SEQ ID NO 65422
  misc_feature (1)..(1546): Ortholog of  Ceres SEQ ID NO 13596089 as cited in SEQ ID NO 68373
aaaacttataacatcttcaaaacattctaaaatggccacttccgtcaatggttcccatcgtcgtccacattacttgcttgtaacattcccagcgcaaggtcacatcaacccggcgcttcaactagccaaccgcctcatccaccacggtgcaaccgtcacatactccaccgcagtctctgctcaccgacgtatgggcgagccaccttccacaaaaggtctatccttcgcttggttcaccgatggattcgacgacggtctcaagtcattcgaagaccagaaaatctacatgtccgaactcaaacgatgtggttcaaacgccctgagagacatcatcaaagccaatcttgacgccaccaccgaaacagagcctatcaccggggtaatctactctgttctcgtcccgtgggtttctacggtagcgcgtgagtttcacctcccaactacacttctctggattgaaccagctactgtactagacatctactactactacttcaacacctcttacaaacatctcttcgacgttgaaccgattaaattaccgaaactgccactgatcaccaccggtgacctcccgtcgtttcttcaaccttcgaaggcattaccgtcagctcttgtgactctaagagaacatatcgaagctctcgaaacggaatcaaaccctaagattcttgttaacacattctctgctttggaacacgatgctttaacctctgttgagaaactcaagatgatcccaatcggaccgttggtttcttcctccgagggtaaaaccgatcttttcaaatcttccgacgaggattacacgaaatggttagactcgaagctcgagagatcagtgatttacatttccttaggcacacacgccgatgatttaccagagaaacacatggaagcgcttactcacggcgtgttagctacaaacagaccgtttttatggatcgtgagggagaaaaatccagaagagaagaagaagaatcggtttcttgaattgatcagaggaagtgatcgaggattggtggtgggatggtgttctcagacagctgttttggcgcattgtgctgtgggatgttttgtgactcattgtggttggaattcgacgttggagagtttagagagtggtgttccggtggttgcgtttccgcagtttgctgatcagtgtacaacggcgaagcttgtggaggatacgtggaggattggagtgaaggtgaaggttggggaggaaggagatgtggatggggaggagattagaaggtgtttggagaaggtgatgagtggtggagaagaggcggaggagatgagagagaatgcagagaagtggaaggcgatggctgttgatgcggcagcggaaggtggaccgtcggatttgaatcttaaaggttttgtggacgaggatgagtagtgggttttaagtttttgaagttaaagaatgtgcatcttaccttgttcaaataaagagaacaaacagagaagaaggtctcgtttattcactcttgtactcctcctgattggtcatctagaagaaaagaaggtctcgttaattaac

SEQ ID NO: 82292 - protein, 466 aa, Arabidopsis thaliana
  peptide (1)..(466): Ceres Seq. ID no. 12664861
KLITSSKHSKMATSVNGSHRRPHYLLVTFPAQGHINPALQLANRLIHHGATVTYSTAVSAHRRMGEPPSTKGLSFAWFTDGFDDGLKSFEDQKIYMSELKRCGSNALRDIIKANLDATTETEPITGVIYSVLVPWVSTVAREFHLPTTLLWIEPATVLDIYYYYFNTSYKHLFDVEPIKLPKLPLITTGDLPSFLQPSKALPSALVTLREHIEALETESNPKILVNTFSALEHDALTSVEKLKMIPIGPLVSSSEGKTDLFKSSDEDYTKWLDSKLERSVIYISLGTHADDLPEKHMEALTHGVLATNRPFLWIVREKNPEEKKKNRFLELIRGSDRGLVVGWCSQTAVLAHCAVGCFVTHCGWNSTLESLESGVPVVAFPQFADQCTTAKLVEDTWRIGVKVKVGEEGDVDGEEIRRCLEKVMSGGEEAEEMRENAEKWKAMAVDAAAEGGPSDLNLKGFVDEDE

SEQ ID NO: 82293 - protein, 456 aa, Arabidopsis thaliana
  peptide (1)..(456): Ceres Seq. ID no. 12664862
MATSVNGSHRRPHYLLVTFPAQGHINPALQLANRLIHHGATVTYSTAVSAHRRMGEPPSTKGLSFAWFTDGFDDGLKSFEDQKIYMSELKRCGSNALRDIIKANLDATTETEPITGVIYSVLVPWVSTVAREFHLPTTLLWIEPATVLDIYYYYFNTSYKHLFDVEPIKLPKLPLITTGDLPSFLQPSKALPSALVTLREHIEALETESNPKILVNTFSALEHDALTSVEKLKMIPIGPLVSSSEGKTDLFKSSDEDYTKWLDSKLERSVIYISLGTHADDLPEKHMEALTHGVLATNRPFLWIVREKNPEEKKKNRFLELIRGSDRGLVVGWCSQTAVLAHCAVGCFVTHCGWNSTLESLESGVPVVAFPQFADQCTTAKLVEDTWRIGVKVKVGEEGDVDGEEIRRCLEKVMSGGEEAEEMRENAEKWKAMAVDAAAEGGPSDLNLKGFVDEDE

SEQ ID NO: 82294 - protein, 403 aa, Arabidopsis thaliana
  peptide (1)..(403): Ceres Seq. ID no. 12664863
MGEPPSTKGLSFAWFTDGFDDGLKSFEDQKIYMSELKRCGSNALRDIIKANLDATTETEPITGVIYSVLVPWVSTVAREFHLPTTLLWIEPATVLDIYYYYFNTSYKHLFDVEPIKLPKLPLITTGDLPSFLQPSKALPSALVTLREHIEALETESNPKILVNTFSALEHDALTSVEKLKMIPIGPLVSSSEGKTDLFKSSDEDYTKWLDSKLERSVIYISLGTHADDLPEKHMEALTHGVLATNRPFLWIVREKNPEEKKKNRFLELIRGSDRGLVVGWCSQTAVLAHCAVGCFVTHCGWNSTLESLESGVPVVAFPQFADQCTTAKLVEDTWRIGVKVKVGEEGDVDGEEIRRCLEKVMSGGEEAEEMRENAEKWKAMAVDAAAEGGPSDLNLKGFVDEDE

SEQ ID NO: 82295 - DNA, 1287 bp, Arabidopsis thaliana
  misc_feature (1)..(1287): Ceres Seq. ID no. 12664888
  misc_feature (1)..(1287): Ortholog of  Ceres SEQ ID NO 12586556 as cited in SEQ ID NO 64667
atgttcttgaaagctcgagctttatcagtaactacacagaatcctcctgatctcttctcgcttctacatcattctccaaacgctaaacatctacgccatctccacgctcaccttcttcgtacatttctctattccaacgttgtgctcagctccaagctcgtcctcgcttattccaagctgaaccatctctttcctacttcgctttctgtcttctggcacatgccttatcgcaacattttctcttggaatataatcatcggtgagttctctagatcgggttttgcttccaagtcaattgatttgtttcttcgtatgtggcgagagtcttgtgttagaccggatgattttacgcttcctcttattctacgagcttgctctgcgtctagggaagcgaaatctggagatttgattcatgttctgtgtttgaaacttgggtttagctcaagtttgtttgttagttcggctttagtgataatgtatgtagatatggggaaacttttacatgcacctatgtttggtgggtatgttcagcaaggagaagctatgttgggtttagccatgttcagagaaatggggtattctggatttgcgctggattcagtggtgatgcacgggaagagcgtccatggatggtgtatcaggagatgctcctgcttgggcttgaatctcggcaatgctataacagatatgtatgtaaagtgctcgatactggactatgcgcacactgtatttgtaaatatgtcgagacgagatgtgatctcttggagctcgcttattttggggtatggtttggatggagacgtggtaatgtcttttaaactctttgatgagatgcttaaggaaggaattgaacccaatgctgtcacttttcttggtgtcttatcagcctgtgcccatggcggtcttgtggaaaaatcttggctgtatttcagactaatgcaggaatataatatagttcctgaactgaaacactatgctagtgtggcggattgtatgtctcgagcaggtcttctggaggaagcagagaagtttctggaagatatgcccgtgaaacctgatgaggctgttatgggtgcggtgttgagtgggtgcaaggtgtatggaaatgtagaagttggggaaagagtggcgagggagctgattcaacttaagccgagaaaagctagctactatgtaacgttggccggtctatattcagctgcaggtcggtttgatgaagctgagagtctgaggcagtggatgaaggagaaacagatttctaaggttcccgggtgtagctcaatatga

SEQ ID NO: 82296 - protein, 428 aa, Arabidopsis thaliana
  peptide (1)..(428): Ceres Seq. ID no. 12664889
MFLKARALSVTTQNPPDLFSLLHHSPNAKHLRHLHAHLLRTFLYSNVVLSSKLVLAYSKLNHLFPTSLSVFWHMPYRNIFSWNIIIGEFSRSGFASKSIDLFLRMWRESCVRPDDFTLPLILRACSASREAKSGDLIHVLCLKLGFSSSLFVSSALVIMYVDMGKLLHAPMFGGYVQQGEAMLGLAMFREMGYSGFALDSVVMHGKSVHGWCIRRCSCLGLNLGNAITDMYVKCSILDYAHTVFVNMSRRDVISWSSLILGYGLDGDVVMSFKLFDEMLKEGIEPNAVTFLGVLSACAHGGLVEKSWLYFRLMQEYNIVPELKHYASVADCMSRAGLLEEAEKFLEDMPVKPDEAVMGAVLSGCKVYGNVEVGERVARELIQLKPRKASYYVTLAGLYSAAGRFDEAESLRQWMKEKQISKVPGCSSI

SEQ ID NO: 82297 - protein, 355 aa, Arabidopsis thaliana
  peptide (1)..(355): Ceres Seq. ID no. 12664890
MPYRNIFSWNIIIGEFSRSGFASKSIDLFLRMWRESCVRPDDFTLPLILRACSASREAKSGDLIHVLCLKLGFSSSLFVSSALVIMYVDMGKLLHAPMFGGYVQQGEAMLGLAMFREMGYSGFALDSVVMHGKSVHGWCIRRCSCLGLNLGNAITDMYVKCSILDYAHTVFVNMSRRDVISWSSLILGYGLDGDVVMSFKLFDEMLKEGIEPNAVTFLGVLSACAHGGLVEKSWLYFRLMQEYNIVPELKHYASVADCMSRAGLLEEAEKFLEDMPVKPDEAVMGAVLSGCKVYGNVEVGERVARELIQLKPRKASYYVTLAGLYSAAGRFDEAESLRQWMKEKQISKVPGCSSI

SEQ ID NO: 82298 - protein, 324 aa, Arabidopsis thaliana
  peptide (1)..(324): Ceres Seq. ID no. 12664891
MWRESCVRPDDFTLPLILRACSASREAKSGDLIHVLCLKLGFSSSLFVSSALVIMYVDMGKLLHAPMFGGYVQQGEAMLGLAMFREMGYSGFALDSVVMHGKSVHGWCIRRCSCLGLNLGNAITDMYVKCSILDYAHTVFVNMSRRDVISWSSLILGYGLDGDVVMSFKLFDEMLKEGIEPNAVTFLGVLSACAHGGLVEKSWLYFRLMQEYNIVPELKHYASVADCMSRAGLLEEAEKFLEDMPVKPDEAVMGAVLSGCKVYGNVEVGERVARELIQLKPRKASYYVTLAGLYSAAGRFDEAESLRQWMKEKQISKVPGCSSI

SEQ ID NO: 82299 - DNA, 1236 bp, Arabidopsis thaliana
  misc_feature (1)..(1236): Ceres Seq. ID no. 12664906
  misc_feature (1)..(1236): Ortholog of  Ceres SEQ ID NO 13598582 as cited in SEQ ID NO 65294
  misc_feature (1)..(1236): Ortholog of  Ceres SEQ ID NO 15176114 as cited in SEQ ID NO 67627
atggattcggatcaaggaaagctttttgtcggtggtatttcatgggaaactgatgaagataagctgagagaacatttcaccaactatggagaggtttctcaggctattgtgatgagagacaagctcacaggtcgacctaggggttttgggttcgttatcttctcggatccttctgttctcgatagggttcttcaagagaaacacagcattgataccagagaggttgatgtgaagagagccatgtcaagagaggagcagcaagtctctggaagaactgggaatcttaatacatctagaagttctggaggtgatgcttacaataaaaccaagaagatctttgttggaggcttgccacctactttgactgatgaagagtttcgccagtactttgaagtttatggccctgtgactgatgttgcaatcatgtatgaccaggctaccaaccgtcctcgtgggtttggatttgtttccttcgactctgaagatgcggtagacagtgttttgcacaagactttccatgatttgagcggtaaacaagttgaagtaaagcgtgctcttcctaaagatgccaatcctggaggtggtggacgatcaatgggtggtggtggctctggtggttaccagggttatggtggcaatgaaagcagttatgatggacgtatggattccaataggtttttgcagcatcaaagtgttggaaatggtttaccatcttatggttcttctggttatggcgctggctatggaaatggtagtaatggtgccgggtatggtgcctatggaggttacactggttctgctggaggttatggcgctggtgctactgctggatatggagcaacgaacattccaggtgctggctatggaagtagtactggagttgctccgagaaactcatgggacactccagcttctagtggttatgggaacccaggctatgggagtggtgctgctcatagtggatatggagttcctggtgcagctcctcctacgcagtcaccatctggctatagtaaccaaggctacggttatggagggtacagtggaagtgattctggttatggaaatcaagctgcatatggtgtggttggagggcgtcctagtggtggcggttcaaacaaccctggtagtggtggctacatgggaggtggttatggtgatggatcttggcgatctgacccgtcacaaggttatggtggtgggtacaatgatggtcagggtcgacaaggccagtag

SEQ ID NO: 82300 - protein, 411 aa, Arabidopsis thaliana
  peptide (1)..(411): Ceres Seq. ID no. 12664907
MDSDQGKLFVGGISWETDEDKLREHFTNYGEVSQAIVMRDKLTGRPRGFGFVIFSDPSVLDRVLQEKHSIDTREVDVKRAMSREEQQVSGRTGNLNTSRSSGGDAYNKTKKIFVGGLPPTLTDEEFRQYFEVYGPVTDVAIMYDQATNRPRGFGFVSFDSEDAVDSVLHKTFHDLSGKQVEVKRALPKDANPGGGGRSMGGGGSGGYQGYGGNESSYDGRMDSNRFLQHQSVGNGLPSYGSSGYGAGYGNGSNGAGYGAYGGYTGSAGGYGAGATAGYGATNIPGAGYGSSTGVAPRNSWDTPASSGYGNPGYGSGAAHSGYGVPGAAPPTQSPSGYSNQGYGYGGYSGSDSGYGNQAAYGVVGGRPSGGGSNNPGSGGYMGGGYGDGSWRSDPSQGYGGGYNDGQGRQGQ

SEQ ID NO: 82301 - protein, 374 aa, Arabidopsis thaliana
  peptide (1)..(374): Ceres Seq. ID no. 12664908
MRDKLTGRPRGFGFVIFSDPSVLDRVLQEKHSIDTREVDVKRAMSREEQQVSGRTGNLNTSRSSGGDAYNKTKKIFVGGLPPTLTDEEFRQYFEVYGPVTDVAIMYDQATNRPRGFGFVSFDSEDAVDSVLHKTFHDLSGKQVEVKRALPKDANPGGGGRSMGGGGSGGYQGYGGNESSYDGRMDSNRFLQHQSVGNGLPSYGSSGYGAGYGNGSNGAGYGAYGGYTGSAGGYGAGATAGYGATNIPGAGYGSSTGVAPRNSWDTPASSGYGNPGYGSGAAHSGYGVPGAAPPTQSPSGYSNQGYGYGGYSGSDSGYGNQAAYGVVGGRPSGGGSNNPGSGGYMGGGYGDGSWRSDPSQGYGGGYNDGQGRQGQ

SEQ ID NO: 82302 - protein, 331 aa, Arabidopsis thaliana
  peptide (1)..(331): Ceres Seq. ID no. 12664909
MSREEQQVSGRTGNLNTSRSSGGDAYNKTKKIFVGGLPPTLTDEEFRQYFEVYGPVTDVAIMYDQATNRPRGFGFVSFDSEDAVDSVLHKTFHDLSGKQVEVKRALPKDANPGGGGRSMGGGGSGGYQGYGGNESSYDGRMDSNRFLQHQSVGNGLPSYGSSGYGAGYGNGSNGAGYGAYGGYTGSAGGYGAGATAGYGATNIPGAGYGSSTGVAPRNSWDTPASSGYGNPGYGSGAAHSGYGVPGAAPPTQSPSGYSNQGYGYGGYSGSDSGYGNQAAYGVVGGRPSGGGSNNPGSGGYMGGGYGDGSWRSDPSQGYGGGYNDGQGRQGQ

SEQ ID NO: 82303 - DNA, 1464 bp, Arabidopsis thaliana
  misc_feature (1)..(1464): Ceres Seq. ID no. 12664926
  misc_feature (1)..(1464): Ortholog of  Ceres SEQ ID NO 15171224 as cited in SEQ ID NO 52348
atggctcggaacaagctcgagttccctcttgatgctgaagcctacgagatcatctgcaagataggcgttggtgttagtgcttcggtctacaaggccatatgcattccgatgaactcaatggtagttgctatcaaagccatcgatcttgatcagtcgcgggctgactttgacagtcttcgccgtgaaaccaagacgatgtctctgctttctcatccgaatattctcaatgcttattgttcattcaccgttgatcgatgtctctgggtggttatgccattcatgtcttgtggctctcttcattcgatcgtctcttcgtcttttccaagtgggttaccagaaaactgcatttccgtcttcctcaaggaaactctgaatgcaatctcgtatcttcacgatcagggtcatttgcaccgtgacatcaaggcaggtaacattctggtagattctgatggatccgtgaagctcgctgatttcggagtatctgcatccatctatgaacccgtgacatcttcctctggaacaacatcttcttctttaaggttaactgatatagcgggaacaccgtattggatggctccggaagtggttcattcccacacagggtatggtttcaaagcagacatttggtctttcgggataacagcgttggagttagcacatggaagacctccgttatctcacttaccgccgttgaagagtctgctcatgaagatcaccaaaaggtttcatttttctgattacgagatcaatacgagcggaagcagcaaaaagggtaacaagaagttctcaaaagcttttagagaaatggttggtttgtgtctagagcaagatcctactaaaagaccatcggcagagaagttgttgaagcatccttttttcaagaactgtaaaggactcgactttgtggtcaagaacgtgttgcatagcttgtcaaacgcagagcagatgtttatggagagtcagattttgatcaagagtgttggagatgatgatgaagaagaagaagaagaagacgaagagatagtgaagaatagaagaatcagtgggtggaatttccgtgaagacgatctccaacttagtccagtgttcccagctactgaatcagactcttctgagtccagtccacgtgaagaagatcaatcaaaagacaaaaaggaagacgataacgtcacaataacggggtatgaactcggtttaggtttgtcgaacgaggaagctaagaaccaagaaggtgaggttgttgggtttgataaagatttggtgttagagaaactgaaagtgttgaagaaaagtttagagcatcaaagagcaagagtgtcgattataatcgaagcattgagtggggacaaggaagagaagagcagagaagaagagcttctagagatggtggagaagttaaagattgaattggaaactgagaagctaaagaccttgcgtgctgataaagatagtgttttgggttaa

SEQ ID NO: 82304 - protein, 487 aa, Arabidopsis thaliana
  peptide (1)..(487): Ceres Seq. ID no. 12664927
MARNKLEFPLDAEAYEIICKIGVGVSASVYKAICIPMNSMVVAIKAIDLDQSRADFDSLRRETKTMSLLSHPNILNAYCSFTVDRCLWVVMPFMSCGSLHSIVSSSFPSGLPENCISVFLKETLNAISYLHDQGHLHRDIKAGNILVDSDGSVKLADFGVSASIYEPVTSSSGTTSSSLRLTDIAGTPYWMAPEVVHSHTGYGFKADIWSFGITALELAHGRPPLSHLPPLKSLLMKITKRFHFSDYEINTSGSSKKGNKKFSKAFREMVGLCLEQDPTKRPSAEKLLKHPFFKNCKGLDFVVKNVLHSLSNAEQMFMESQILIKSVGDDDEEEEEEDEEIVKNRRISGWNFREDDLQLSPVFPATESDSSESSPREEDQSKDKKEDDNVTITGYELGLGLSNEEAKNQEGEVVGFDKDLVLEKLKVLKKSLEHQRARVSIIIEALSGDKEEKSREEELLEMVEKLKIELETEKLKTLRADKDSVLG

SEQ ID NO: 82305 - protein, 451 aa, Arabidopsis thaliana
  peptide (1)..(451): Ceres Seq. ID no. 12664928
MNSMVVAIKAIDLDQSRADFDSLRRETKTMSLLSHPNILNAYCSFTVDRCLWVVMPFMSCGSLHSIVSSSFPSGLPENCISVFLKETLNAISYLHDQGHLHRDIKAGNILVDSDGSVKLADFGVSASIYEPVTSSSGTTSSSLRLTDIAGTPYWMAPEVVHSHTGYGFKADIWSFGITALELAHGRPPLSHLPPLKSLLMKITKRFHFSDYEINTSGSSKKGNKKFSKAFREMVGLCLEQDPTKRPSAEKLLKHPFFKNCKGLDFVVKNVLHSLSNAEQMFMESQILIKSVGDDDEEEEEEDEEIVKNRRISGWNFREDDLQLSPVFPATESDSSESSPREEDQSKDKKEDDNVTITGYELGLGLSNEEAKNQEGEVVGFDKDLVLEKLKVLKKSLEHQRARVSIIIEALSGDKEEKSREEELLEMVEKLKIELETEKLKTLRADKDSVLG

SEQ ID NO: 82306 - protein, 448 aa, Arabidopsis thaliana
  peptide (1)..(448): Ceres Seq. ID no. 12664929
MVVAIKAIDLDQSRADFDSLRRETKTMSLLSHPNILNAYCSFTVDRCLWVVMPFMSCGSLHSIVSSSFPSGLPENCISVFLKETLNAISYLHDQGHLHRDIKAGNILVDSDGSVKLADFGVSASIYEPVTSSSGTTSSSLRLTDIAGTPYWMAPEVVHSHTGYGFKADIWSFGITALELAHGRPPLSHLPPLKSLLMKITKRFHFSDYEINTSGSSKKGNKKFSKAFREMVGLCLEQDPTKRPSAEKLLKHPFFKNCKGLDFVVKNVLHSLSNAEQMFMESQILIKSVGDDDEEEEEEDEEIVKNRRISGWNFREDDLQLSPVFPATESDSSESSPREEDQSKDKKEDDNVTITGYELGLGLSNEEAKNQEGEVVGFDKDLVLEKLKVLKKSLEHQRARVSIIIEALSGDKEEKSREEELLEMVEKLKIELETEKLKTLRADKDSVLG

SEQ ID NO: 82307 - DNA, 1281 bp, Arabidopsis thaliana
  misc_feature (1)..(1281): Ceres Seq. ID no. 12664940
  misc_feature (1)..(1281): Ortholog of  Ceres SEQ ID NO 13599900 as cited in SEQ ID NO 531
  misc_feature (1)..(1281): Ortholog of  Ceres SEQ ID NO 13596509 as cited in SEQ ID NO 62004
  misc_feature (1)..(1281): Ortholog of  Ceres SEQ ID NO 13659971 as cited in SEQ ID NO 67565
  misc_feature (1)..(1281): Ortholog of  Ceres SEQ ID NO 13500385 as cited in SEQ ID NO 67583
atggaatctccatatccaaaatcaccggaaaaaatcacagggacagttcttctcggaaaatacgaactcggtcgtcgactaggaagcggaagcttcgctaaagtccatgtagctcgttccatctccaccggcgaactcgtagctatcaaaatcatcgacaagcaaaaaaccatagattccggtatggagccgagaataatccgagagatcgaagcgatgcgccgcctccacaaccacccaaacgtcctcaaaatccacgaagtcatggccactaaatccaagatctacctcgtcgtcgaatacgccgccggaggagaactcttcaccaaactcatccgattcggccgccttaacgaatcggcggcgcgtcgttatttccaacaactcgcctccgcgctcagtttctgccaccgcgacggaatcgctcatcgcgacgtgaagccacagaatctcctccttgataagcaaggaaacctcaaggtctccgactttggtctatcggctttaccggagcatcgaagtaataacggattgcttcacacggcatgtggcacaccggcttatacagcaccggaagtaattgctcagagaggttacgacggtgctaaagctgatgcgtggtcgtgtggtgtgtttctctttgttcttcttgctggttacgttcctttcgatgatgccaacattgttgctatgtataggaagattcataaaagagattaccggtttccgagctggatctcgaaaccggctcgatctattatatataagttgcttgatccgaatccggagacgaggatgagtatagaagctgtgatgggaacggtttggtttcaaaaatctctagagatttcggagtttcagtctagtgtgtttgagttggatcggtttcttgagaaagaagcgaagtcgagcaatgcgattactgcgtttgatttgatctcgttgtcatcgggattggatctttcggggttgtttgagaggaggaagaggaaagagaagaggtttacggcgagagtgtcggcggaaagagtggtggagaaggcggggatgataggggaaaagttagggtttagagtggagaagaaggaagagactaaggtggtgggattgggaaaaggaagaactgcggtggtggttgaggtggtggagtttgcggaagggttggttgtggcggatgtgaaggttgtggtggaaggtgaagaggaggaggaggaggtggagtctcattggtcggagctaattgtagagcttgaggagattgtgctctcatggcacaattga

SEQ ID NO: 82308 - protein, 426 aa, Arabidopsis thaliana
  peptide (1)..(426): Ceres Seq. ID no. 12664941
MESPYPKSPEKITGTVLLGKYELGRRLGSGSFAKVHVARSISTGELVAIKIIDKQKTIDSGMEPRIIREIEAMRRLHNHPNVLKIHEVMATKSKIYLVVEYAAGGELFTKLIRFGRLNESAARRYFQQLASALSFCHRDGIAHRDVKPQNLLLDKQGNLKVSDFGLSALPEHRSNNGLLHTACGTPAYTAPEVIAQRGYDGAKADAWSCGVFLFVLLAGYVPFDDANIVAMYRKIHKRDYRFPSWISKPARSIIYKLLDPNPETRMSIEAVMGTVWFQKSLEISEFQSSVFELDRFLEKEAKSSNAITAFDLISLSSGLDLSGLFERRKRKEKRFTARVSAERVVEKAGMIGEKLGFRVEKKEETKVVGLGKGRTAVVVEVVEFAEGLVVADVKVVVEGEEEEEEVESHWSELIVELEEIVLSWHN

SEQ ID NO: 82309 - protein, 365 aa, Arabidopsis thaliana
  peptide (1)..(365): Ceres Seq. ID no. 12664942
MEPRIIREIEAMRRLHNHPNVLKIHEVMATKSKIYLVVEYAAGGELFTKLIRFGRLNESAARRYFQQLASALSFCHRDGIAHRDVKPQNLLLDKQGNLKVSDFGLSALPEHRSNNGLLHTACGTPAYTAPEVIAQRGYDGAKADAWSCGVFLFVLLAGYVPFDDANIVAMYRKIHKRDYRFPSWISKPARSIIYKLLDPNPETRMSIEAVMGTVWFQKSLEISEFQSSVFELDRFLEKEAKSSNAITAFDLISLSSGLDLSGLFERRKRKEKRFTARVSAERVVEKAGMIGEKLGFRVEKKEETKVVGLGKGRTAVVVEVVEFAEGLVVADVKVVVEGEEEEEEVESHWSELIVELEEIVLSWHN

SEQ ID NO: 82310 - protein, 354 aa, Arabidopsis thaliana
  peptide (1)..(354): Ceres Seq. ID no. 12664943
MRRLHNHPNVLKIHEVMATKSKIYLVVEYAAGGELFTKLIRFGRLNESAARRYFQQLASALSFCHRDGIAHRDVKPQNLLLDKQGNLKVSDFGLSALPEHRSNNGLLHTACGTPAYTAPEVIAQRGYDGAKADAWSCGVFLFVLLAGYVPFDDANIVAMYRKIHKRDYRFPSWISKPARSIIYKLLDPNPETRMSIEAVMGTVWFQKSLEISEFQSSVFELDRFLEKEAKSSNAITAFDLISLSSGLDLSGLFERRKRKEKRFTARVSAERVVEKAGMIGEKLGFRVEKKEETKVVGLGKGRTAVVVEVVEFAEGLVVADVKVVVEGEEEEEEVESHWSELIVELEEIVLSWHN

SEQ ID NO: 82311 - DNA, 795 bp, Arabidopsis thaliana
  misc_feature (1)..(795): Ceres Seq. ID no. 12664948
  misc_feature (1)..(795): Ortholog of  Ceres SEQ ID NO 13599568 as cited in SEQ ID NO 509
  misc_feature (1)..(795): Ortholog of  Ceres SEQ ID NO 15172903 as cited in SEQ ID NO 51839
  misc_feature (1)..(795): Ortholog of  Ceres SEQ ID NO 15177108 as cited in SEQ ID NO 52015
  misc_feature (1)..(795): Ortholog of  Ceres SEQ ID NO 13638595 as cited in SEQ ID NO 52050
  misc_feature (1)..(795): Ortholog of  Ceres SEQ ID NO 13594748 as cited in SEQ ID NO 52114
  misc_feature (1)..(795): Ortholog of  Ceres SEQ ID NO 15173596 as cited in SEQ ID NO 63267
  misc_feature (1)..(795): Ortholog of  Ceres SEQ ID NO 12583993 as cited in SEQ ID NO 68098
  misc_feature (1)..(795): Ortholog of  Ceres SEQ ID NO 13654535 as cited in SEQ ID NO 68227
  misc_feature (1)..(795): Ortholog of  Ceres SEQ ID NO 13589319 as cited in SEQ ID NO 0
atgacgataaaaagtctctcttttcttgcggctctatctctctttgctttgacacttccattagtaattgcttccgatccaagcccccttcaagacttttgtgttggtgtcaacacaccagcagatggcgtgtttgtgaatggaaagttttgcaaggatccaaggatagttttcgcggatgatttctttttctcgagcctcaacagacctggaaatacaaataacgcggttgggtccaacgtgacaaccgtcaatgttaacaaccttggaggactaaacactcttggtatctcacttgttcgtatagactatgcacccaacggtcagaacccacctcacacccacccacgtgccaccgagatcttggttgttcaacaaggaactctacttgtagggtttatctcatcaaaccaagacggaaaccgtcttttcgccaaaacactcaacgtgggtgacgtatttgtgtttccagaaggactcatccatttccagttcaacctaggaggaactccagcagttgcaatcgctgctttgagcagccaaaacgcaggtgttatcacaattgctaacacaatatttgggtctaaaccagatgtagacccgaatgttcttgcaagagcattccaaatggatgttaatgcggtcaggaatttacaagccaggttctaataatgtaataagaaatatagtctttggaattactttattaatacaagcatggttcagccgtactgtgacatgtatatgatgttggttgttgttttatcttaataatattttggtcattgattaatt

SEQ ID NO: 82312 - protein, 222 aa, Arabidopsis thaliana
  peptide (1)..(222): Ceres Seq. ID no. 12664949
MTIKSLSFLAALSLFALTLPLVIASDPSPLQDFCVGVNTPADGVFVNGKFCKDPRIVFADDFFFSSLNRPGNTNNAVGSNVTTVNVNNLGGLNTLGISLVRIDYAPNGQNPPHTHPRATEILVVQQGTLLVGFISSNQDGNRLFAKTLNVGDVFVFPEGLIHFQFNLGGTPAVAIAALSSQNAGVITIANTIFGSKPDVDPNVLARAFQMDVNAVRNLQARF

SEQ ID NO: 82313 - DNA, 753 bp, Arabidopsis thaliana
  misc_feature (1)..(753): Ceres Seq. ID no. 12664954
  misc_feature (1)..(753): Ortholog of  Ceres SEQ ID NO 14309445 as cited in SEQ ID NO 0
atggctcgtcttaggaacacactctgtcttgttgctgctttacttctgatcaaccagaagacagctacttccgatttcctttctcctcttttcgctcctgtgtatgggaaatgcaaagcaccttcaaacacaacttttatgtatgaatgtgagtgtgaagacggttggaagcagtttgatcaacacctcaagtttctcccttgcatcacccccaactgtaatatctctcccttgatcactgcttctccagcacaacccaaaccgcctcccaaagacaacattacttcatttttcgaccgtaaatctctaatctcattctttttatgcttttccggccctaggcatatagtccccgtgggtcgaagatcagagcatgttaatattagcctcttccccaggatgagactagaacttgagaccttgagacacatttcctttacaaggtctcctacttgtcaatggatggactgtggaggagggctttgcaacagttcaatgccgtttcaatacagctgcaattgccgtgaaggttacagcaatctcatgaacataaccacatttccttgcttgaagcaatgtgcacttggaatggactgtttgaatcttgggattcctttgtcaaactcatcatcgtcttctccacctgctctgcctgatagcagcaagaatcaaggattaaatctaagaggatcatcgttgtggtggataacattatgtgtctctttagcgccatggaggatactcttcatttga

SEQ ID NO: 82314 - protein, 250 aa, Arabidopsis thaliana
  peptide (1)..(250): Ceres Seq. ID no. 12664955
MARLRNTLCLVAALLLINQKTATSDFLSPLFAPVYGKCKAPSNTTFMYECECEDGWKQFDQHLKFLPCITPNCNISPLITASPAQPKPPPKDNITSFFDRKSLISFFLCFSGPRHIVPVGRRSEHVNISLFPRMRLELETLRHISFTRSPTCQWMDCGGGLCNSSMPFQYSCNCREGYSNLMNITTFPCLKQCALGMDCLNLGIPLSNSSSSSPPALPDSSKNQGLNLRGSSLWWITLCVSLAPWRILFI

SEQ ID NO: 82315 - protein, 204 aa, Arabidopsis thaliana
  peptide (1)..(204): Ceres Seq. ID no. 12664956
MYECECEDGWKQFDQHLKFLPCITPNCNISPLITASPAQPKPPPKDNITSFFDRKSLISFFLCFSGPRHIVPVGRRSEHVNISLFPRMRLELETLRHISFTRSPTCQWMDCGGGLCNSSMPFQYSCNCREGYSNLMNITTFPCLKQCALGMDCLNLGIPLSNSSSSSPPALPDSSKNQGLNLRGSSLWWITLCVSLAPWRILFI

SEQ ID NO: 82316 - DNA, 2169 bp, Arabidopsis thaliana
  misc_feature (1)..(2169): Ceres Seq. ID no. 12664968
  misc_feature (1)..(2169): Ortholog of  Ceres SEQ ID NO 12586556 as cited in SEQ ID NO 64667
  misc_feature (1)..(2169): Ortholog of  Ceres SEQ ID NO 13660894 as cited in SEQ ID NO 67475
atgacacttccgccgccaatagcgtcaacggccgcgaatacaattctagagaaactctcattctgcaaatcactcaaccacatcaagcaactccatgctcacatcctccgtacagtgatcaaccacaaactcaactcctttctctttaacctctccgtctcttcttcctctatcaatctcagctacgctctcaatgtcttttcatctattccctctccgcctgaatccatcgtcttcaatccatttctccgggatctatctcgttccagtgaacctagagcgacgattctgttctatcagaggattagacatgttggtggtcgtcttgatcaattcagcttccttccgattcttaaagcagtttccaaagtctcggccttgttcgagggtatggagcttcacggcgttgcgttcaagattgcgactttgtgcgacccttttgttgagactggttttatggatatgtacgcgtcttgtggtagaattaactacgcgcgcaatgtgttcgacgaaatgtcgcatagagatgttgttacgtggaatactatgattgagaggtattgccgattcggtcttgtagatgaagcctttaagctttttgaggagatgaaggattctaatgtgatgccagatgaaatgattctctgtaacattgtctctgcatgtggtcgtactgggaatatgagatataacagagctatttacgagtttttgatagaaaatgatgttaggatggatactcatttgttgactgctcttgttactatgtatgctggagctggttgtatggatatggcaagggagttttttaggaagatgtcagtgagaaacttgtttgtttcgactgccatggtttctgggtattcaaaatgtgggagactcgatgatgctcaggttatatttgaccaaacggaaaagaaagatttggtgtgttggaccacaatgatttcggcttatgttgaaagtgattatcctcaagaagctttaagagtttttgaggaaatgtgttgctctgggatcaaacctgatgtggttagcatgttcagtgttatatctgcttgtgctaaccttggtattctggataaagcgaaatgggttcacagttgcatacatgttaacgggttggaatcagagttgtcaataaataatgccctcattaacatgtatgcgaaatgtggaggtttggatgcaacaagagacgtgtttgagaagatgccaaggaggaatgtagtgtcgtggagctctatgatcaatgcgttatctatgcatggagaagccagtgatgcacttagcttatttgcccgaatgaaacaggaaaatgtcgagcccaatgaagtcacttttgtaggagttctctatggttgtagccactcaggactagttgaagaaggtaaaaagatctttgcatcaatgactgatgaatacaatattactccaaaacttgagcattatggatgcatggtggatctctttggccgagctaatctcttacgagaagctcttgaggttatagaatcaatgccagtagcgtctaatgtagtcatatggggatcactgatgtcagcttgtagaatccatggtgagcttgagttaggcaaatttgcagccaaacgtatcctcgagctggagcctgatcatgacggggctcttgtgttaatgtccaatatatacgctagagaacagagatgggaggacgtaaggaacataagacgtgtaatggaggaaaagaatgtgttcaaggagaaaggtcttagccggattgaccaaaacgggaaatcacacgagtttctcatcggtgacaagagacataagcaatcaaatgagatttatgcgaagctagacgaggttgtaagtaaactgaagctagccggttacgttccagactgtggtagcgttttggtggatgtagaggaggaagaaaagaaggatttggttctatggcatagcgaaaagctcgcgctctgcttcggtctgatgaatgaggaaaaagaagaagagaaagactcgtgcggtgttattagaatagtgaagaatctaagggtgtgtgaggattgtcaccttttcttcaagctcgtctctaaagtgtatgaacgagagatcatagtgagagatcgaactaggtttcactgttataaaaacggtctgtgttcttgcagagattactggtga

SEQ ID NO: 82317 - protein, 722 aa, Arabidopsis thaliana
  peptide (1)..(722): Ceres Seq. ID no. 12664969
MTLPPPIASTAANTILEKLSFCKSLNHIKQLHAHILRTVINHKLNSFLFNLSVSSSSINLSYALNVFSSIPSPPESIVFNPFLRDLSRSSEPRATILFYQRIRHVGGRLDQFSFLPILKAVSKVSALFEGMELHGVAFKIATLCDPFVETGFMDMYASCGRINYARNVFDEMSHRDVVTWNTMIERYCRFGLVDEAFKLFEEMKDSNVMPDEMILCNIVSACGRTGNMRYNRAIYEFLIENDVRMDTHLLTALVTMYAGAGCMDMAREFFRKMSVRNLFVSTAMVSGYSKCGRLDDAQVIFDQTEKKDLVCWTTMISAYVESDYPQEALRVFEEMCCSGIKPDVVSMFSVISACANLGILDKAKWVHSCIHVNGLESELSINNALINMYAKCGGLDATRDVFEKMPRRNVVSWSSMINALSMHGEASDALSLFARMKQENVEPNEVTFVGVLYGCSHSGLVEEGKKIFASMTDEYNITPKLEHYGCMVDLFGRANLLREALEVIESMPVASNVVIWGSLMSACRIHGELELGKFAAKRILELEPDHDGALVLMSNIYAREQRWEDVRNIRRVMEEKNVFKEKGLSRIDQNGKSHEFLIGDKRHKQSNEIYAKLDEVVSKLKLAGYVPDCGSVLVDVEEEEKKDLVLWHSEKLALCFGLMNEEKEEEKDSCGVIRIVKNLRVCEDCHLFFKLVSKVYEREIIVRDRTRFHCYKNGLCSCRDYW

SEQ ID NO: 82318 - protein, 592 aa, Arabidopsis thaliana
  peptide (1)..(592): Ceres Seq. ID no. 12664970
MELHGVAFKIATLCDPFVETGFMDMYASCGRINYARNVFDEMSHRDVVTWNTMIERYCRFGLVDEAFKLFEEMKDSNVMPDEMILCNIVSACGRTGNMRYNRAIYEFLIENDVRMDTHLLTALVTMYAGAGCMDMAREFFRKMSVRNLFVSTAMVSGYSKCGRLDDAQVIFDQTEKKDLVCWTTMISAYVESDYPQEALRVFEEMCCSGIKPDVVSMFSVISACANLGILDKAKWVHSCIHVNGLESELSINNALINMYAKCGGLDATRDVFEKMPRRNVVSWSSMINALSMHGEASDALSLFARMKQENVEPNEVTFVGVLYGCSHSGLVEEGKKIFASMTDEYNITPKLEHYGCMVDLFGRANLLREALEVIESMPVASNVVIWGSLMSACRIHGELELGKFAAKRILELEPDHDGALVLMSNIYAREQRWEDVRNIRRVMEEKNVFKEKGLSRIDQNGKSHEFLIGDKRHKQSNEIYAKLDEVVSKLKLAGYVPDCGSVLVDVEEEEKKDLVLWHSEKLALCFGLMNEEKEEEKDSCGVIRIVKNLRVCEDCHLFFKLVSKVYEREIIVRDRTRFHCYKNGLCSCRDYW

SEQ ID NO: 82319 - protein, 570 aa, Arabidopsis thaliana
  peptide (1)..(570): Ceres Seq. ID no. 12664971
MDMYASCGRINYARNVFDEMSHRDVVTWNTMIERYCRFGLVDEAFKLFEEMKDSNVMPDEMILCNIVSACGRTGNMRYNRAIYEFLIENDVRMDTHLLTALVTMYAGAGCMDMAREFFRKMSVRNLFVSTAMVSGYSKCGRLDDAQVIFDQTEKKDLVCWTTMISAYVESDYPQEALRVFEEMCCSGIKPDVVSMFSVISACANLGILDKAKWVHSCIHVNGLESELSINNALINMYAKCGGLDATRDVFEKMPRRNVVSWSSMINALSMHGEASDALSLFARMKQENVEPNEVTFVGVLYGCSHSGLVEEGKKIFASMTDEYNITPKLEHYGCMVDLFGRANLLREALEVIESMPVASNVVIWGSLMSACRIHGELELGKFAAKRILELEPDHDGALVLMSNIYAREQRWEDVRNIRRVMEEKNVFKEKGLSRIDQNGKSHEFLIGDKRHKQSNEIYAKLDEVVSKLKLAGYVPDCGSVLVDVEEEEKKDLVLWHSEKLALCFGLMNEEKEEEKDSCGVIRIVKNLRVCEDCHLFFKLVSKVYEREIIVRDRTRFHCYKNGLCSCRDYW

SEQ ID NO: 82320 - DNA, 459 bp, Arabidopsis thaliana
  misc_feature (1)..(459): Ceres Seq. ID no. 12664972
  misc_feature (1)..(459): Ortholog of  Ceres SEQ ID NO 13594700 as cited in SEQ ID NO 51982
  misc_feature (1)..(459): Ortholog of  Ceres SEQ ID NO 14309538 as cited in SEQ ID NO 52606
atgaaaatccacccattacccagaaacgaaaataacaacaatctgatccatcacgctcgtgatccgacccgagaacccggaaagaagctccgtcgtctcccacatatcttcagccgtgttctagagctgcccttgaagtcagacgctgacgtggctgttgaagagagtcatgactgcttcaggttcgtcgcggaaacagacgggggaggaggaggaggtgtgagggcttacatggttgagattcatcctggtgtgaccaagattcttgtgagaaccaatggttcatcgtctcttggtttgtcgcttgatgagcttgagcttgacgtgtggcgtttcaggctaccggaatcaactaggcctgagctcgttaccgtggattgcgacggcgatggagaattgattgtcactgtgcctaagattgaagacaatggtagagatttgatagtgcttgtacagtaa

SEQ ID NO: 82321 - protein, 152 aa, Arabidopsis thaliana
  peptide (1)..(152): Ceres Seq. ID no. 12664973
MKIHPLPRNENNNNLIHHARDPTREPGKKLRRLPHIFSRVLELPLKSDADVAVEESHDCFRFVAETDGGGGGGVRAYMVEIHPGVTKILVRTNGSSSLGLSLDELELDVWRFRLPESTRPELVTVDCDGDGELIVTVPKIEDNGRDLIVLVQ

SEQ ID NO: 82322 - DNA, 1353 bp, Arabidopsis thaliana
  misc_feature (1)..(1353): Ceres Seq. ID no. 12664974
  misc_feature (1)..(1353): Ortholog of  Ceres SEQ ID NO 14307863 as cited in SEQ ID NO 20504
atgagagagtgcatttcgatccacattggtcaggctggtattcaagtcggaaatgcttgctgggagctttactgtcttgaacatggcattcagcctgatggccagatgcctggtgacaagactgttggtggaggtgatgatgctttcaacaccttcttcagtgaaaccggtgcaggtaagcacgtcccacgtgctgtctttgttgatcttgagccaactgtgatcgacgaggtcaggactggtacttaccgtcagcttttccaccctgaacaactcatcagtggtaaagaagacgctgctaacaatttcgcccgtggtcattacaccattgggaaagagattgttgatctctgcttggaccggatcagaaagctcgctgataactgtactggtcttcaaggattccttgttttcaacgctgttggtggtgggactggatctggtcttggatctcttctccttgagagactttctgttgactatgggaaaaagtccaagttgggtttcactgtttacccatctccacaggtgtctacctctgtggttgagccttacaacagtgtcctctccactcactctctcttggaacacactgatgtctccatcctcctcgacaatgaagctatctatgacatctgtagacgctcccttaacattgagagacctacctacaccaacctcaaccgtctcgtctctcaggttatttcttccttgactgcttctctgaggttcgatggtgccttgaatgttgatgttactgagttccaaaccaacttggttccatacccaaggatccacttcatgctttcgtcctatgcaccagtcatctccgcggagaaggccttccatgagcaactctcagttgctgagatcacgaacagtgcctttgaacctgcttccatgatggcaaagtgtgacccgcgacatggaaagtacatggcttgctgtttgatgtaccgtggtgatgtagtccccaaggatgtgaacgcagcggttggcaccatcaagaccaagcgaactattcagtttgttgactggtgtcctactggattcaagtgtggtatcaactaccagccaccaactgttgttcctggaggtgatcttgctaaagtccagagagctgtttgtatgatctcaaactcaaccagtgttgctgaggtattctcccgtattgatcacaagtttgatcttatgtacgccaaacgtgctttcgttcactggtatgttggtgagggtatggaagaaggagaattctcagaggctcgtgaggatcttgcagcattggagaaggattatgaagaggtcggtgctgaaggtggtgacgatgaggatgatgaaggagaggaatactaa

SEQ ID NO: 82323 - protein, 450 aa, Arabidopsis thaliana; identical to SEQ ID NO: 46322
  peptide (1)..(450): Ceres Seq. ID no. 12664975

SEQ ID NO: 82324 - protein, 415 aa, Arabidopsis thaliana; identical to SEQ ID NO: 46323
  peptide (1)..(415): Ceres Seq. ID no. 12664976

SEQ ID NO: 82325 - DNA, 1475 bp, Arabidopsis thaliana
  misc_feature (1)..(1475): Ceres Seq. ID no. 12664989
  misc_feature (1)..(1475): Ortholog of  Ceres SEQ ID NO 15177648 as cited in SEQ ID NO 58917
agaaagtgaaaaagagagcgagcgatgaacagtatcttctccattgacgatttctccgatcctttctgggaaactcctccgattcctctcaatcccgactcttctaagcctgttacggcggatgaagttagccagagtcaaccggaatggactttcgagatgtttctcgaagagatttcttcgtcggcggtgagctctgagccacttggtaacaacaacaacgcgatcgtcggtgtttcttcggcgcaatctcttccttctgtttccggacagaatgatttcgaggatgatagtcgatttcgtgatcgcgattcgggaaatttggattgtgctgctcccatgacgacgaagacggtgattgttgattccgatgattatcgtcgtgttcttaagaacaagcttgagactgagtgcgctactgttgtttctcttcgggttgggtctgtgaagcctgaagattcgactagttctccagaaactcaacttcaaccagttcaatccagtcctcttactcaaggttctttgatgaccccaggagaacttggtgttacttcttccttaccagctgaggtgaaaaaaactggtgtatcaatgaagcaggttactagtggatcgtcgagagaatattctgatgacgaggaccttgatgaagagaatgaaaccaccggttccttgaagccagaggacgttaaaaaatctagaaggatgctgtcaaatcgtgagtcagctaggcgatctagaaggagaaagcaggagcaaacaagtgacctcgaaacacaggttaatgatctaaaaggtgagcattcatcacttcttaaacaactgagcaacatgaatcacaagtatgacgaggctgctgttggcaatagaatactaaaggctgacattgagacattaagagctaaggtgaaaatggcggaagaaaccgtgaagagagtaacaggaatgaatccgatgcttctcggaagatcaagtggacataacaacaacaacagaatgccaataactggtaacaacaggatggattcttctagcattattccagcttatcaaccacactcaaacctaaaccatatgtcaaaccaaaacatcgggatcccaaccattctacctccaagactcggaaacaatttcgctgctcctccatcccaaaccagctctcccttgcagagaattagaaatgggcaaaatcaccatgttactccaagcgccaacccgtatggctggaataccgaacctcagaacgattcagcatggccgaaaaaatgcgtggactgatcaaacaagaagcgggtttcgcactatattaatgtctatgcatctgtaatttgtaagtgttattaagttacgaatcatgagaaaacatcttgtgaaaatacagtctcatggcttatatatatatataagctctgtcttataacattacaagattcttatttgagaatcgtctttctatttatagctaataacagagt

SEQ ID NO: 82326 - protein, 417 aa, Arabidopsis thaliana
  peptide (1)..(417): Ceres Seq. ID no. 12664990
MNSIFSIDDFSDPFWETPPIPLNPDSSKPVTADEVSQSQPEWTFEMFLEEISSSAVSSEPLGNNNNAIVGVSSAQSLPSVSGQNDFEDDSRFRDRDSGNLDCAAPMTTKTVIVDSDDYRRVLKNKLETECATVVSLRVGSVKPEDSTSSPETQLQPVQSSPLTQGSLMTPGELGVTSSLPAEVKKTGVSMKQVTSGSSREYSDDEDLDEENETTGSLKPEDVKKSRRMLSNRESARRSRRRKQEQTSDLETQVNDLKGEHSSLLKQLSNMNHKYDEAAVGNRILKADIETLRAKVKMAEETVKRVTGMNPMLLGRSSGHNNNNRMPITGNNRMDSSSIIPAYQPHSNLNHMSNQNIGIPTILPPRLGNNFAAPPSQTSSPLQRIRNGQNHHVTPSANPYGWNTEPQNDSAWPKKCVD

SEQ ID NO: 82327 - protein, 372 aa, Arabidopsis thaliana
  peptide (1)..(372): Ceres Seq. ID no. 12664991
MFLEEISSSAVSSEPLGNNNNAIVGVSSAQSLPSVSGQNDFEDDSRFRDRDSGNLDCAAPMTTKTVIVDSDDYRRVLKNKLETECATVVSLRVGSVKPEDSTSSPETQLQPVQSSPLTQGSLMTPGELGVTSSLPAEVKKTGVSMKQVTSGSSREYSDDEDLDEENETTGSLKPEDVKKSRRMLSNRESARRSRRRKQEQTSDLETQVNDLKGEHSSLLKQLSNMNHKYDEAAVGNRILKADIETLRAKVKMAEETVKRVTGMNPMLLGRSSGHNNNNRMPITGNNRMDSSSIIPAYQPHSNLNHMSNQNIGIPTILPPRLGNNFAAPPSQTSSPLQRIRNGQNHHVTPSANPYGWNTEPQNDSAWPKKCVD

SEQ ID NO: 82328 - protein, 312 aa, Arabidopsis thaliana
  peptide (1)..(312): Ceres Seq. ID no. 12664992
MTTKTVIVDSDDYRRVLKNKLETECATVVSLRVGSVKPEDSTSSPETQLQPVQSSPLTQGSLMTPGELGVTSSLPAEVKKTGVSMKQVTSGSSREYSDDEDLDEENETTGSLKPEDVKKSRRMLSNRESARRSRRRKQEQTSDLETQVNDLKGEHSSLLKQLSNMNHKYDEAAVGNRILKADIETLRAKVKMAEETVKRVTGMNPMLLGRSSGHNNNNRMPITGNNRMDSSSIIPAYQPHSNLNHMSNQNIGIPTILPPRLGNNFAAPPSQTSSPLQRIRNGQNHHVTPSANPYGWNTEPQNDSAWPKKCVD

SEQ ID NO: 82329 - DNA, 747 bp, Arabidopsis thaliana
  misc_feature (1)..(747): Ceres Seq. ID no. 12665001
  misc_feature (1)..(747): Ortholog of  Ceres SEQ ID NO 14304124 as cited in SEQ ID NO 56378
  misc_feature (1)..(747): Ortholog of  Ceres SEQ ID NO 12585331 as cited in SEQ ID NO 62912
  misc_feature (1)..(747): Ortholog of  Ceres SEQ ID NO 13654964 as cited in SEQ ID NO 63176
atgtatcagtggaacttaccgtaccggaaagatgacgtggaaacaggcgttagctcaagaaggcctttactatacccagcgatgcatgaaaatcccgagctccggtggggatttatacgcaaggtctactctataatcgcctttcagcttctagccaccgtcgctgtcgctgccacggtggtcaccgtccgtccaatcgctctgttcttcgccaccaccggacttggattagctctttacatagtcatcatcatcacacctctcatagtgttgtgtccgttgtactattaccatcagaaacatccggtgaattacttgctcttggggattttcactttggctctggcttttgttgttggattaacatgtgccttcaccaatgggaaagtgattctcgagtcagtgatcttgacatcggtagtggtgctttcgctcacattatatactttttgggctgctaggaaaggatatgactttaatttccttggacccttcttgtttggcgctctcaccgtgcttattttcttcgccttaatacaaattttgttcccattagggagggtatcagtgatgatctatggttgtttggtatcgataatattctgcggatacatagtttacgatacagacaatctgatcaagagacacacgtatgatgagtatatttgggcagcggtttcactctacctagacatcatcaacctcttcttgtatcttcttactgtgttgagagccttacagagatga

SEQ ID NO: 82330 - protein, 248 aa, Arabidopsis thaliana
  peptide (1)..(248): Ceres Seq. ID no. 12665002
MYQWNLPYRKDDVETGVSSRRPLLYPAMHENPELRWGFIRKVYSIIAFQLLATVAVAATVVTVRPIALFFATTGLGLALYIVIIITPLIVLCPLYYYHQKHPVNYLLLGIFTLALAFVVGLTCAFTNGKVILESVILTSVVVLSLTLYTFWAARKGYDFNFLGPFLFGALTVLIFFALIQILFPLGRVSVMIYGCLVSIIFCGYIVYDTDNLIKRHTYDEYIWAAVSLYLDIINLFLYLLTVLRALQR

SEQ ID NO: 82331 - protein, 221 aa, Arabidopsis thaliana
  peptide (1)..(221): Ceres Seq. ID no. 12665003
MHENPELRWGFIRKVYSIIAFQLLATVAVAATVVTVRPIALFFATTGLGLALYIVIIITPLIVLCPLYYYHQKHPVNYLLLGIFTLALAFVVGLTCAFTNGKVILESVILTSVVVLSLTLYTFWAARKGYDFNFLGPFLFGALTVLIFFALIQILFPLGRVSVMIYGCLVSIIFCGYIVYDTDNLIKRHTYDEYIWAAVSLYLDIINLFLYLLTVLRALQR

SEQ ID NO: 82332 - DNA, 2037 bp, Arabidopsis thaliana
  misc_feature (1)..(2037): Ceres Seq. ID no. 12665004
  misc_feature (1)..(2037): Ortholog of  Ceres SEQ ID NO 13586013 as cited in SEQ ID NO 1182
tcaatctcattaatccaaattaaatagttaaactagaagatgagcagcaaaagggcatcacaatatcaccaagtagaaatccctccaccacaacctttcttgaaatcactaaagaacactctcaatgagatccttttcgccgacgatccgttccgtagaatcaggaacgaatcgaaaacgtcgaaaaagatcgagttagggttgagacacgtgttccctatcttggaatgggctcgtggttacagtttggagtatttgaaatcagatgttatctcagggataacaattgcaagtcttgctattcctcaagggattagctatgctcagctcgctaatctccctccaatccttggtctttactcgagcttggtgccgccgttggtatacgcgatcatgggaagttcaagagatttagcggtgggaacagtggcggtggcctcgctgttgacggctgcgatgttggggaaagaggtaaacgcagtggtgaatccaaagctttaccttcacttagctttcaccgccactttcttcgccggactcatgcaaacctgccttggcctcttacggttagggttcgtggtggagatattgtcgcacgcggcgattgtagggttcatgggaggagccgcaacagtggtgtgtctgcagcaactgaaaggattacttggcctccatcatttcactcattccaccgatatcgtcactgttctccgctccattttttctcaatctcatatgtggagatgggaaagtggagtgctagggtgttgcttcctaatcttccttcttacaactaaatacattagcaagaagagaccaaagctgttctggatatctgcaatgtctccacttgtttctgtcatttttggaaccattttcctttacttcctccatgaccaattccatggtatccaatttatcggagaactaaagaaagggataaatccaccgtcaatcacacatttggttttcacgccaccttatgtcatgttggctctcaaagttggcattatcactggagtcatagctctcgctgaaggtatagcagtggggagaagctttgcaatgtacaagaattacaatatagatgggaacaaagagatgatagcctttgggatgatgaacattcttggttccttctcctcttgctatctcactaccgggccattttcacgttcggcggtgaactacaacgcgggttgcaaaacggcgttatcaaacgtggtgatggcggttgcagtggcggtgacgttactgttcttaacgccgttattcttctacacgccattagtagttctgtcgtcgatcataatcgctgccatgctaggcctagtcgactacgaagcagccattcatctttggaaactcgacaagttcgatttcttcgtttgtctctctgcttacttgggcgttgtttttggtaccatcgaaattggtctcatcctctccgtgggaatatcagtgatgaggttagtgttgttcgtgggaagaccaaagatttatgtaatgggaaacattcaaaactcagaaatatataggaacattgagcattaccctcaagccatcactcgctcttctcttctcattctccacatcgatggtcctatttacttcgccaactctacctacttgcgagacagaattggaaggtggatcgatgaagaggaagataaattgagaactagcggagatatcagtctacaatatattgtactcgacatgagtgctgtggggaacatcgacacgagcggtataagcatgcttgaggaactcaacaaaatcctgggacgtagagagcttaagctagtgatagcgaacccgggagcagaggtgatgaagaagctaagcaagtccaccttcattgagagcattggtaaagaacggatttatctcacggtggcagaagccgtcgcagcttgcgatttcatgctccacacggctaaacccgactcgccggtaccggaatttaacaacgtttaagatttcatattgaaaatttcacatttctaaaaagttttattgtcattaagaaataag

SEQ ID NO: 82333 - protein, 646 aa, Arabidopsis thaliana
  peptide (1)..(646): Ceres Seq. ID no. 12665005
MSSKRASQYHQVEIPPPQPFLKSLKNTLNEILFADDPFRRIRNESKTSKKIELGLRHVFPILEWARGYSLEYLKSDVISGITIASLAIPQGISYAQLANLPPILGLYSSLVPPLVYAIMGSSRDLAVGTVAVASLLTAAMLGKEVNAVVNPKLYLHLAFTATFFAGLMQTCLGLLRLGFVVEILSHAAIVGFMGGAATVVCLQQLKGLLGLHHFTHSTDIVTVLRSIFSQSHMWRWESGVLGCCFLIFLLTTKYISKKRPKLFWISAMSPLVSVIFGTIFLYFLHDQFHGIQFIGELKKGINPPSITHLVFTPPYVMLALKVGIITGVIALAEGIAVGRSFAMYKNYNIDGNKEMIAFGMMNILGSFSSCYLTTGPFSRSAVNYNAGCKTALSNVVMAVAVAVTLLFLTPLFFYTPLVVLSSIIIAAMLGLVDYEAAIHLWKLDKFDFFVCLSAYLGVVFGTIEIGLILSVGISVMRLVLFVGRPKIYVMGNIQNSEIYRNIEHYPQAITRSSLLILHIDGPIYFANSTYLRDRIGRWIDEEEDKLRTSGDISLQYIVLDMSAVGNIDTSGISMLEELNKILGRRELKLVIANPGAEVMKKLSKSTFIESIGKERIYLTVAEAVAACDFMLHTAKPDSPVPEFNNV

SEQ ID NO: 82334 - protein, 528 aa, Arabidopsis thaliana
  peptide (1)..(528): Ceres Seq. ID no. 12665006
MGSSRDLAVGTVAVASLLTAAMLGKEVNAVVNPKLYLHLAFTATFFAGLMQTCLGLLRLGFVVEILSHAAIVGFMGGAATVVCLQQLKGLLGLHHFTHSTDIVTVLRSIFSQSHMWRWESGVLGCCFLIFLLTTKYISKKRPKLFWISAMSPLVSVIFGTIFLYFLHDQFHGIQFIGELKKGINPPSITHLVFTPPYVMLALKVGIITGVIALAEGIAVGRSFAMYKNYNIDGNKEMIAFGMMNILGSFSSCYLTTGPFSRSAVNYNAGCKTALSNVVMAVAVAVTLLFLTPLFFYTPLVVLSSIIIAAMLGLVDYEAAIHLWKLDKFDFFVCLSAYLGVVFGTIEIGLILSVGISVMRLVLFVGRPKIYVMGNIQNSEIYRNIEHYPQAITRSSLLILHIDGPIYFANSTYLRDRIGRWIDEEEDKLRTSGDISLQYIVLDMSAVGNIDTSGISMLEELNKILGRRELKLVIANPGAEVMKKLSKSTFIESIGKERIYLTVAEAVAACDFMLHTAKPDSPVPEFNNV

SEQ ID NO: 82335 - protein, 507 aa, Arabidopsis thaliana
  peptide (1)..(507): Ceres Seq. ID no. 12665007
MLGKEVNAVVNPKLYLHLAFTATFFAGLMQTCLGLLRLGFVVEILSHAAIVGFMGGAATVVCLQQLKGLLGLHHFTHSTDIVTVLRSIFSQSHMWRWESGVLGCCFLIFLLTTKYISKKRPKLFWISAMSPLVSVIFGTIFLYFLHDQFHGIQFIGELKKGINPPSITHLVFTPPYVMLALKVGIITGVIALAEGIAVGRSFAMYKNYNIDGNKEMIAFGMMNILGSFSSCYLTTGPFSRSAVNYNAGCKTALSNVVMAVAVAVTLLFLTPLFFYTPLVVLSSIIIAAMLGLVDYEAAIHLWKLDKFDFFVCLSAYLGVVFGTIEIGLILSVGISVMRLVLFVGRPKIYVMGNIQNSEIYRNIEHYPQAITRSSLLILHIDGPIYFANSTYLRDRIGRWIDEEEDKLRTSGDISLQYIVLDMSAVGNIDTSGISMLEELNKILGRRELKLVIANPGAEVMKKLSKSTFIESIGKERIYLTVAEAVAACDFMLHTAKPDSPVPEFNNV

SEQ ID NO: 82336 - DNA, 3336 bp, Arabidopsis thaliana
  misc_feature (1)..(3336): Ceres Seq. ID no. 12665008
  misc_feature (1)..(3336): Ortholog of  Ceres SEQ ID NO 13663328 as cited in SEQ ID NO 66678
atggagattgcagcaaagagtaactcgaaacgtatgtattcatggtggtgggatagtcacaatacccccaagaattctaaatggcttcaggacaatctcgcagatatggatagtaatgtgaagcagatgattaaggttcttgaagaagatgcagattcttttgccaggcgagcagagatgtattaccgtaaacgtcctgagcttatgaaattagttgaagagttctatcgtgcatatcgtgcattagctgagaggtataatcatgctacgggcgtaatccacaaggctcatgagactatagcagaagcgtttccaaaccaagttcctttgatatttggtgatgagtcacatggtggtgctttgacaaatgatgttgatccacaaacaccggacatgcctcctcctttccgagctcggggtaacccggatgagttccaacaagatgctttggggttctctttatctcatgtccatgatgtaaagaggaatatagattttagtgaagagcctctgtttgtgagtaatggaaaagcaagaaagggactgaattttaatgatcatggagatggaaaaggaagaaatggtcttaaggatcatattctttccgaatctgaacgagctagcaaagctgaggctgaagttgtggctttaaaagattccttgtctaagatgcaggctgaaaaacaagctagcttagcattgtttgagaagaatttggagagactatcaaatctagaatctgaagtctctcgtgcacaggcagactcaaggggaattaatgacagagccgcaagtgcagaagctgagatccaaacgctcagagaaaccctctacaaactagagtctgaaaaggaatccagctttcttcagtatcataaatgcctgcaaaagatagctgatttggaagatggactctctgtagcccataaagaagctggggagcgagccagcaaagctgaaactgaaactctcgctttgaagcggagccttgccaaggccgaaactgacaaggaaactgctcttattcaatacaggcaatgcttgaatacgatatctaacctagaagagagactaaggaaggctgaggaagatgcaaggcttatcaatgagcgggctgaaaaggctggggtagaagttgaaaacttgaagcaaacagtctcgaaattgatcaaggataaggaagcttctgaacttcagttccaacagtgcctgaatataattgcgagtctaaaagtcaaactacaccatgctcaagaagaaacacagagtcttagccatgaaatagaggatggagttgctaagttaaagttttctgaggagaaatgtcttttgcttgagagatcaaatcagaatctccactctgagctggatagtctcttggagaaactggggaatcaaagtcagaagctcacagagaaacaaaccgagctagtcaaattgtggagctgtgtgcaagcagagcatttgcatttccaggaagctgagaccgcgtttcaaaccctacagcaattgcactctcagtctcaagaggagctaaataatttggctgtggaacttcaaaccgtgtctcagatcatgaaagacatggagatgcgaaacaatgagttgcatgaggaacttgagcaagccaaggttgagaacaaaggtctcaatgacctcaatttcactatggaaaagcttgttcagaaaaaccttatgctggaaaaatctatatcttatttgaattctgagttggaatcattcagaaggaagctgaagacgtttgaggaagcttgtcagtcactctcagaagagaaatcatgtcttatttctgaaaaccagcacaatgttattgagaacactgttcttattgaatggcttcggcaacttcggttagaagcagttggtatagcaacagagaagactgaccttgagggtaaggcaaagacgattggtgataagttaacagatgcagaaactgaaaatttgcagctaaagagaaacctgctttctatcagatcggagaaacatcacttagaagatgaaattactaatgtgaaggatcagttacatgagaaggagaaggaatttgaagaaatcaaaatggagaaagaaaagctgatacaagaggttttcaaagagaggaaacaggttgaattgtgggagtctcaagctgcgacattcttctgcgataagcaaatctcggttgtacatgaaacattgattgaagcaacgacacgtgagcttgctgaagcatgcaagaaccttgaaagtaaaagcgcatcgagagatgcggatattgaaaagcttaagcgaagccaaactatagtcttgttgaatgaaagcattaaatctttggaggattatgttttcacacaccgtgaatctgcgggtgaagtttcaaagggagctgatttgatggatgaatttctcaagttggaaggtatgtgtttgagaatcaaagctatcgcagaagcaataatggaaaaggaaaagtttttgatgcttgagaacactaatacctactctatgcttgaggcgtcattgaaacaaatcaaagaattgaagacaggaggaggaagaagcatgaggaagcaagatggaggaagtggcagaatgcggaagcagagtcacgaaaccgagatggtaatgaaagatattgtgcttgatcaaacgtctgatggatcatcgtatgagattgtaagtaagaaagggaattcggagttggatcatctcggttttgttgagctaaagccagtgaagactcacaagacagaaactaaagccttgtctgaagagtcactgattgtcgagaaagtagagattttcgacggattcatggatccaaaccgtgaagtaaacaagagaagagttctagaaagacttgattcggatttacagaagctggagaatcttcagatcactgtagaagatttgaaaagcaaagtcgaaacagtggagaaggaaaagacgaaagtaggagaaaacgagtataaaacgatcaaaggacagcttgaagaaggagaggaagcaatagagaaactgtttactgtcaatcgaaagctgaccacaaaagccgaatcagagaaggatattgatagaagaaggagaatattcgaacatgcgaggagaggaacagagaagattgggaggttacagtcggagatacagaggattcagtttctgttgatgaagcttgaaggagagagagagcatcgacttaggtcgaagatttcagataccaaagttcttcttcgagactatatctatgggagaactagaagcgtatcgatgaagaaaaggacgaagaagcggtctgtgttttgtggttgcgttcagcagccagagtctccttga

SEQ ID NO: 82337 - protein, 1111 aa, Arabidopsis thaliana
  peptide (1)..(1111): Ceres Seq. ID no. 12665009
MEIAAKSNSKRMYSWWWDSHNTPKNSKWLQDNLADMDSNVKQMIKVLEEDADSFARRAEMYYRKRPELMKLVEEFYRAYRALAERYNHATGVIHKAHETIAEAFPNQVPLIFGDESHGGALTNDVDPQTPDMPPPFRARGNPDEFQQDALGFSLSHVHDVKRNIDFSEEPLFVSNGKARKGLNFNDHGDGKGRNGLKDHILSESERASKAEAEVVALKDSLSKMQAEKQASLALFEKNLERLSNLESEVSRAQADSRGINDRAASAEAEIQTLRETLYKLESEKESSFLQYHKCLQKIADLEDGLSVAHKEAGERASKAETETLALKRSLAKAETDKETALIQYRQCLNTISNLEERLRKAEEDARLINERAEKAGVEVENLKQTVSKLIKDKEASELQFQQCLNIIASLKVKLHHAQEETQSLSHEIEDGVAKLKFSEEKCLLLERSNQNLHSELDSLLEKLGNQSQKLTEKQTELVKLWSCVQAEHLHFQEAETAFQTLQQLHSQSQEELNNLAVELQTVSQIMKDMEMRNNELHEELEQAKVENKGLNDLNFTMEKLVQKNLMLEKSISYLNSELESFRRKLKTFEEACQSLSEEKSCLISENQHNVIENTVLIEWLRQLRLEAVGIATEKTDLEGKAKTIGDKLTDAETENLQLKRNLLSIRSEKHHLEDEITNVKDQLHEKEKEFEEIKMEKEKLIQEVFKERKQVELWESQAATFFCDKQISVVHETLIEATTRELAEACKNLESKSASRDADIEKLKRSQTIVLLNESIKSLEDYVFTHRESAGEVSKGADLMDEFLKLEGMCLRIKAIAEAIMEKEKFLMLENTNTYSMLEASLKQIKELKTGGGRSMRKQDGGSGRMRKQSHETEMVMKDIVLDQTSDGSSYEIVSKKGNSELDHLGFVELKPVKTHKTETKALSEESLIVEKVEIFDGFMDPNREVNKRRVLERLDSDLQKLENLQITVEDLKSKVETVEKEKTKVGENEYKTIKGQLEEGEEAIEKLFTVNRKLTTKAESEKDIDRRRRIFEHARRGTEKIGRLQSEIQRIQFLLMKLEGEREHRLRSKISDTKVLLRDYIYGRTRSVSMKKRTKKRSVFCGCVQQPESP

SEQ ID NO: 82338 - protein, 1100 aa, Arabidopsis thaliana
  peptide (1)..(1100): Ceres Seq. ID no. 12665010
MYSWWWDSHNTPKNSKWLQDNLADMDSNVKQMIKVLEEDADSFARRAEMYYRKRPELMKLVEEFYRAYRALAERYNHATGVIHKAHETIAEAFPNQVPLIFGDESHGGALTNDVDPQTPDMPPPFRARGNPDEFQQDALGFSLSHVHDVKRNIDFSEEPLFVSNGKARKGLNFNDHGDGKGRNGLKDHILSESERASKAEAEVVALKDSLSKMQAEKQASLALFEKNLERLSNLESEVSRAQADSRGINDRAASAEAEIQTLRETLYKLESEKESSFLQYHKCLQKIADLEDGLSVAHKEAGERASKAETETLALKRSLAKAETDKETALIQYRQCLNTISNLEERLRKAEEDARLINERAEKAGVEVENLKQTVSKLIKDKEASELQFQQCLNIIASLKVKLHHAQEETQSLSHEIEDGVAKLKFSEEKCLLLERSNQNLHSELDSLLEKLGNQSQKLTEKQTELVKLWSCVQAEHLHFQEAETAFQTLQQLHSQSQEELNNLAVELQTVSQIMKDMEMRNNELHEELEQAKVENKGLNDLNFTMEKLVQKNLMLEKSISYLNSELESFRRKLKTFEEACQSLSEEKSCLISENQHNVIENTVLIEWLRQLRLEAVGIATEKTDLEGKAKTIGDKLTDAETENLQLKRNLLSIRSEKHHLEDEITNVKDQLHEKEKEFEEIKMEKEKLIQEVFKERKQVELWESQAATFFCDKQISVVHETLIEATTRELAEACKNLESKSASRDADIEKLKRSQTIVLLNESIKSLEDYVFTHRESAGEVSKGADLMDEFLKLEGMCLRIKAIAEAIMEKEKFLMLENTNTYSMLEASLKQIKELKTGGGRSMRKQDGGSGRMRKQSHETEMVMKDIVLDQTSDGSSYEIVSKKGNSELDHLGFVELKPVKTHKTETKALSEESLIVEKVEIFDGFMDPNREVNKRRVLERLDSDLQKLENLQITVEDLKSKVETVEKEKTKVGENEYKTIKGQLEEGEEAIEKLFTVNRKLTTKAESEKDIDRRRRIFEHARRGTEKIGRLQSEIQRIQFLLMKLEGEREHRLRSKISDTKVLLRDYIYGRTRSVSMKKRTKKRSVFCGCVQQPESP

SEQ ID NO: 82339 - protein, 1076 aa, Arabidopsis thaliana
  peptide (1)..(1076): Ceres Seq. ID no. 12665011
MDSNVKQMIKVLEEDADSFARRAEMYYRKRPELMKLVEEFYRAYRALAERYNHATGVIHKAHETIAEAFPNQVPLIFGDESHGGALTNDVDPQTPDMPPPFRARGNPDEFQQDALGFSLSHVHDVKRNIDFSEEPLFVSNGKARKGLNFNDHGDGKGRNGLKDHILSESERASKAEAEVVALKDSLSKMQAEKQASLALFEKNLERLSNLESEVSRAQADSRGINDRAASAEAEIQTLRETLYKLESEKESSFLQYHKCLQKIADLEDGLSVAHKEAGERASKAETETLALKRSLAKAETDKETALIQYRQCLNTISNLEERLRKAEEDARLINERAEKAGVEVENLKQTVSKLIKDKEASELQFQQCLNIIASLKVKLHHAQEETQSLSHEIEDGVAKLKFSEEKCLLLERSNQNLHSELDSLLEKLGNQSQKLTEKQTELVKLWSCVQAEHLHFQEAETAFQTLQQLHSQSQEELNNLAVELQTVSQIMKDMEMRNNELHEELEQAKVENKGLNDLNFTMEKLVQKNLMLEKSISYLNSELESFRRKLKTFEEACQSLSEEKSCLISENQHNVIENTVLIEWLRQLRLEAVGIATEKTDLEGKAKTIGDKLTDAETENLQLKRNLLSIRSEKHHLEDEITNVKDQLHEKEKEFEEIKMEKEKLIQEVFKERKQVELWESQAATFFCDKQISVVHETLIEATTRELAEACKNLESKSASRDADIEKLKRSQTIVLLNESIKSLEDYVFTHRESAGEVSKGADLMDEFLKLEGMCLRIKAIAEAIMEKEKFLMLENTNTYSMLEASLKQIKELKTGGGRSMRKQDGGSGRMRKQSHETEMVMKDIVLDQTSDGSSYEIVSKKGNSELDHLGFVELKPVKTHKTETKALSEESLIVEKVEIFDGFMDPNREVNKRRVLERLDSDLQKLENLQITVEDLKSKVETVEKEKTKVGENEYKTIKGQLEEGEEAIEKLFTVNRKLTTKAESEKDIDRRRRIFEHARRGTEKIGRLQSEIQRIQFLLMKLEGEREHRLRSKISDTKVLLRDYIYGRTRSVSMKKRTKKRSVFCGCVQQPESP

SEQ ID NO: 82340 - DNA, 1930 bp, Arabidopsis thaliana
  misc_feature (1)..(1930): Ceres Seq. ID no. 12665016
  misc_feature (1)..(1930): Ortholog of  Ceres SEQ ID NO 14313943 as cited in SEQ ID NO 54725
  misc_feature (1)..(1930): Ortholog of  Ceres SEQ ID NO 14309674 as cited in SEQ ID NO 55707
  misc_feature (1)..(1930): Ortholog of  Ceres SEQ ID NO 13658728 as cited in SEQ ID NO 66270
  misc_feature (1)..(1930): Ortholog of  Ceres SEQ ID NO 12465428 as cited in SEQ ID NO 68898
aaactaaacaaaaatgaataaaaacatgttggttcgctctgcccggccaaccctagcctccattcaccgccttttctccgccgccgccgccgcgactgtggacacggcgacggcacccgtggtgaagcctcgcagcggaggaggaaaaggaggagaatcggccaacaaaaaagaaacggtagttggaggaagagacactctaggagggagattactaagccttgtgtatacgaaacgcagcgccgttgttactatccgtaaatggaaagaagaaggccattccgttcgcaaatacgaacttaatcgtatcgttagagagcttcgtaagatcaaacgctataaacacgctcttgagatatgtgaatggatggttgtacaggaagatataaagctacaagcaggtgattatgctgtacatttggatttgatatctaaaatccgtggtttaaacagtgctgagaagtttttcgaagatatgccagatcaaatgagaggtcatgctgcgtgtacatctcttttacatagctatgtgcagaacaagttgtctgataaagctgaggcattgtttgagaaaatgggtgaatgtggtttcttgaagtcttgtttgccttacaatcatatgttatcgatgtatatatcgagaggacagtttgagaaagtccctgtgttgattaaggagttgaagattagaacatctcctgatattgttacttataatctctggcttactgcgtttgcttctggaaatgatgtcgagggtgcggagaaagtttatcttaaggcgaaggaagagaagttgaatccggattgggtgacttatagtgtgttaacgaatttgtatgctaagactgataatgtcgaaaaggcgagacttgctttgaaggagatggagaagttggtttctaagaagaaccgggttgcttatgcttctcttattagtctgcatgcgaatttgggtgacaaagatggagtgaacttaacctggaagaaggttaagtcttctttcaagaaaatgaatgatgcggagtatctcagtatgatatctgcggttgtgaagcttggagagtttgaacaagctaaaggtttgtatgacgaatgggaatctgtttcgggaacaggagatgctagaatcccgaatctaatccttgctgagtacatgaacagagatgaggttcttctaggagaaaagttttacgaacggattgtggagaaagggataaacccgagctattctacatgggaaattctcacatgggcttatttgaagcgtaaagacatggagaaagtattagattgttttgggaaagctattgattctgtgaagaaatggactgtgaatgtaagattggttaaaggagcgtgcaaggaacttgaggaacaagggaatgttaaaggagcagagaagctaatgactctgctccaaaaggctggttatgtgaacactcagctctacaattccttgttacggacatacgctaaagcaggggaaatggcactcatagttgaagagcgaatggcaaaggataatgtagagttagatgaagagactaaggagcttataagactaaccagtcaaatgcgtgtgactgaaatctcgtccaccatttcttagtatgaaagctacagagttagtttcagtctgcaacttccacaaaccgaagaatacagaaaccgttctctcaagtccgtaccaatcgagatactcgtcttgaagcagtaacattccacttactcggacatttagaccttgaggagagtgttcaaagctgctaaggaatgaagttgctacaaagatatgatttttcctgttttttaattttcagaatttaatatgattaaaatctcgttttatatttttggttctctatagttcttctgatgatgtcaaatgatctttgagaggttgactaactgaaaaacctacttcgac

SEQ ID NO: 82341 - protein, 532 aa, Arabidopsis thaliana
  peptide (1)..(532): Ceres Seq. ID no. 12665017
MNKNMLVRSARPTLASIHRLFSAAAAATVDTATAPVVKPRSGGGKGGESANKKETVVGGRDTLGGRLLSLVYTKRSAVVTIRKWKEEGHSVRKYELNRIVRELRKIKRYKHALEICEWMVVQEDIKLQAGDYAVHLDLISKIRGLNSAEKFFEDMPDQMRGHAACTSLLHSYVQNKLSDKAEALFEKMGECGFLKSCLPYNHMLSMYISRGQFEKVPVLIKELKIRTSPDIVTYNLWLTAFASGNDVEGAEKVYLKAKEEKLNPDWVTYSVLTNLYAKTDNVEKARLALKEMEKLVSKKNRVAYASLISLHANLGDKDGVNLTWKKVKSSFKKMNDAEYLSMISAVVKLGEFEQAKGLYDEWESVSGTGDARIPNLILAEYMNRDEVLLGEKFYERIVEKGINPSYSTWEILTWAYLKRKDMEKVLDCFGKAIDSVKKWTVNVRLVKGACKELEEQGNVKGAEKLMTLLQKAGYVNTQLYNSLLRTYAKAGEMALIVEERMAKDNVELDEETKELIRLTSQMRVTEISSTIS

SEQ ID NO: 82342 - protein, 528 aa, Arabidopsis thaliana
  peptide (1)..(528): Ceres Seq. ID no. 12665018
MLVRSARPTLASIHRLFSAAAAATVDTATAPVVKPRSGGGKGGESANKKETVVGGRDTLGGRLLSLVYTKRSAVVTIRKWKEEGHSVRKYELNRIVRELRKIKRYKHALEICEWMVVQEDIKLQAGDYAVHLDLISKIRGLNSAEKFFEDMPDQMRGHAACTSLLHSYVQNKLSDKAEALFEKMGECGFLKSCLPYNHMLSMYISRGQFEKVPVLIKELKIRTSPDIVTYNLWLTAFASGNDVEGAEKVYLKAKEEKLNPDWVTYSVLTNLYAKTDNVEKARLALKEMEKLVSKKNRVAYASLISLHANLGDKDGVNLTWKKVKSSFKKMNDAEYLSMISAVVKLGEFEQAKGLYDEWESVSGTGDARIPNLILAEYMNRDEVLLGEKFYERIVEKGINPSYSTWEILTWAYLKRKDMEKVLDCFGKAIDSVKKWTVNVRLVKGACKELEEQGNVKGAEKLMTLLQKAGYVNTQLYNSLLRTYAKAGEMALIVEERMAKDNVELDEETKELIRLTSQMRVTEISSTIS

SEQ ID NO: 82343 - protein, 414 aa, Arabidopsis thaliana
  peptide (1)..(414): Ceres Seq. ID no. 12665019
MVVQEDIKLQAGDYAVHLDLISKIRGLNSAEKFFEDMPDQMRGHAACTSLLHSYVQNKLSDKAEALFEKMGECGFLKSCLPYNHMLSMYISRGQFEKVPVLIKELKIRTSPDIVTYNLWLTAFASGNDVEGAEKVYLKAKEEKLNPDWVTYSVLTNLYAKTDNVEKARLALKEMEKLVSKKNRVAYASLISLHANLGDKDGVNLTWKKVKSSFKKMNDAEYLSMISAVVKLGEFEQAKGLYDEWESVSGTGDARIPNLILAEYMNRDEVLLGEKFYERIVEKGINPSYSTWEILTWAYLKRKDMEKVLDCFGKAIDSVKKWTVNVRLVKGACKELEEQGNVKGAEKLMTLLQKAGYVNTQLYNSLLRTYAKAGEMALIVEERMAKDNVELDEETKELIRLTSQMRVTEISSTIS

SEQ ID NO: 82344 - DNA, 942 bp, Arabidopsis thaliana
  misc_feature (1)..(942): Ceres Seq. ID no. 12665023
  misc_feature (1)..(942): Ortholog of  Ceres SEQ ID NO 13597475 as cited in SEQ ID NO 65105
  misc_feature (1)..(942): Ortholog of  Ceres SEQ ID NO 14301761 as cited in SEQ ID NO 66790
atggcaaaaatagaaccaaaaacgtcaatggatatgaattttcctgtcaagtacttcgtggttgatgcattcactgagtcagccttcaaggggaaccaagctgcagtgtgttttcttgaagaggatcatgagagagacgacgtgtggcttcagtctatggcctctgagtttgaccttccattgacgtgttttcttattcccatccccggctccgaaccaccacgtttccttctgaggtggttcacggctgtagccgagatggatatatgtggtcatgcaacactagcatcagctcatagtatcttctcaaacagtttggttggttcatctgacactgtcgaattttccaccaactcggggattctaaccgctaaaaggctgtctgattgtgactctaaaagatctttcttgatcgaaatgaatttccctgtgattacaacttgtgagtacagctccaaggatgtctccatcttctctaaagccttgaatggagctaccattgtcgatgttcgagaaactaaaactgatagactcatctttaaacccttgataggagctttcaaaacaacttcaacagaccaaatcatcgttgtgctttcatcttgggaatctgtcattgaatttcagccaagagtggatgatatcgtgaaatgccctggcaaagtgatgattgttaccgctgctgctcctcaaggatctccttttgacttctgcagtcgactctttgctcctaaactagggctcaatgaggactctgtatgtggaagtgcacattgttcattagcacattactggagcctcaagatgaacaagtgtgatttcgtcgcttttgcggcttcgcaaagaagtggaacactcaaggttcattatgataaggagaagcagagagtcttgcttaccgggaaagctgtgactgtcatgaaaggctctatcttagtttaa

SEQ ID NO: 82345 - protein, 313 aa, Arabidopsis thaliana
  peptide (1)..(313): Ceres Seq. ID no. 12665024
MAKIEPKTSMDMNFPVKYFVVDAFTESAFKGNQAAVCFLEEDHERDDVWLQSMASEFDLPLTCFLIPIPGSEPPRFLLRWFTAVAEMDICGHATLASAHSIFSNSLVGSSDTVEFSTNSGILTAKRLSDCDSKRSFLIEMNFPVITTCEYSSKDVSIFSKALNGATIVDVRETKTDRLIFKPLIGAFKTTSTDQIIVVLSSWESVIEFQPRVDDIVKCPGKVMIVTAAAPQGSPFDFCSRLFAPKLGLNEDSVCGSAHCSLAHYWSLKMNKCDFVAFAASQRSGTLKVHYDKEKQRVLLTGKAVTVMKGSILV

SEQ ID NO: 82346 - protein, 304 aa, Arabidopsis thaliana
  peptide (1)..(304): Ceres Seq. ID no. 12665025
MDMNFPVKYFVVDAFTESAFKGNQAAVCFLEEDHERDDVWLQSMASEFDLPLTCFLIPIPGSEPPRFLLRWFTAVAEMDICGHATLASAHSIFSNSLVGSSDTVEFSTNSGILTAKRLSDCDSKRSFLIEMNFPVITTCEYSSKDVSIFSKALNGATIVDVRETKTDRLIFKPLIGAFKTTSTDQIIVVLSSWESVIEFQPRVDDIVKCPGKVMIVTAAAPQGSPFDFCSRLFAPKLGLNEDSVCGSAHCSLAHYWSLKMNKCDFVAFAASQRSGTLKVHYDKEKQRVLLTGKAVTVMKGSILV

SEQ ID NO: 82347 - protein, 302 aa, Arabidopsis thaliana
  peptide (1)..(302): Ceres Seq. ID no. 12665026
MNFPVKYFVVDAFTESAFKGNQAAVCFLEEDHERDDVWLQSMASEFDLPLTCFLIPIPGSEPPRFLLRWFTAVAEMDICGHATLASAHSIFSNSLVGSSDTVEFSTNSGILTAKRLSDCDSKRSFLIEMNFPVITTCEYSSKDVSIFSKALNGATIVDVRETKTDRLIFKPLIGAFKTTSTDQIIVVLSSWESVIEFQPRVDDIVKCPGKVMIVTAAAPQGSPFDFCSRLFAPKLGLNEDSVCGSAHCSLAHYWSLKMNKCDFVAFAASQRSGTLKVHYDKEKQRVLLTGKAVTVMKGSILV

SEQ ID NO: 82348 - DNA, 1172 bp, Arabidopsis thaliana
  misc_feature (1)..(1172): Ceres Seq. ID no. 12665027
  misc_feature (1)..(1172): Ortholog of  Ceres SEQ ID NO 13597475 as cited in SEQ ID NO 65105
  misc_feature (1)..(1172): Ortholog of  Ceres SEQ ID NO 14301761 as cited in SEQ ID NO 66790
gtgatggaaagaaagaaaaaaacataactttgctcaaaaagatcgatcgagatatggggaagaagaaaggtgtcaagtactttgtggtggatgctttcactgattcggctttcaaagggaatccagctgctgtttgttttctcaacgacgataacgagagagatgacacgtggcttcagtctctcgccgccgaattcaacatctccgaaacttgttttcttattcccatcactggtttccaagctcgcttcagtctacgctggtttacccctttagccgaggtggatctctgtggtcatgcaactttggcatctgctcattgtctcttctcaaatggtttggttgattcagacatggttgagtttgtcacaagatcagggattcttacagccaagcgtgtttcagatacttcagagctcagtgatggtgaagtgaaaggaggaacctttttgatcgaattgaatttccctgtggttacaacttgtgatgttaatctcagtgatgtatcctcttctatgatcaccaaggccttgaacggagctaccattgttgatataaaagctactgcaacaaacaacatcctcgttgtgcttccatctaaggaatctgtcactgaattgcaaccaagaatggatgatatattgaaatgcccctgtgatggcataattgtgacagctgctggttctacaggatcgtcctatgatttttacagtcggtactttgctcctaagttcggagttgatgaggaccctgtttgtggaagtgcacattgtgcattggcacattactggagcatcaagatgaataagtttgatttcttagcctaccaagcttcgagtaggagtggaacgataaggattcatctagacaaggagaagcagagggttctcctgagaggcaaagccgttactgtgatggaaggccatgtcttggtctgatctgaaattatatactgtgttgaattctgctacaaaacaagctcctataatgaataacaatgaatttactcttttcaaaacaaaatagtgtcagctgactgatccaccttacatgaggtgtggtcgctcgtaggagccactgataggatatgtccatgttttctgaccatgtgtgttcattttgaatgactctccaacagttctctttcactcacagacaatacatttattgtt

SEQ ID NO: 82349 - protein, 311 aa, Arabidopsis thaliana
  peptide (1)..(311): Ceres Seq. ID no. 12665028
DGKKEKNITLLKKIDRDMGKKKGVKYFVVDAFTDSAFKGNPAAVCFLNDDNERDDTWLQSLAAEFNISETCFLIPITGFQARFSLRWFTPLAEVDLCGHATLASAHCLFSNGLVDSDMVEFVTRSGILTAKRVSDTSELSDGEVKGGTFLIELNFPVVTTCDVNLSDVSSSMITKALNGATIVDIKATATNNILVVLPSKESVTELQPRMDDILKCPCDGIIVTAAGSTGSSYDFYSRYFAPKFGVDEDPVCGSAHCALAHYWSIKMNKFDFLAYQASSRSGTIRIHLDKEKQRVLLRGKAVTVMEGHVLV

SEQ ID NO: 82350 - protein, 294 aa, Arabidopsis thaliana
  peptide (1)..(294): Ceres Seq. ID no. 12665029
MGKKKGVKYFVVDAFTDSAFKGNPAAVCFLNDDNERDDTWLQSLAAEFNISETCFLIPITGFQARFSLRWFTPLAEVDLCGHATLASAHCLFSNGLVDSDMVEFVTRSGILTAKRVSDTSELSDGEVKGGTFLIELNFPVVTTCDVNLSDVSSSMITKALNGATIVDIKATATNNILVVLPSKESVTELQPRMDDILKCPCDGIIVTAAGSTGSSYDFYSRYFAPKFGVDEDPVCGSAHCALAHYWSIKMNKFDFLAYQASSRSGTIRIHLDKEKQRVLLRGKAVTVMEGHVLV

SEQ ID NO: 82351 - protein, 194 aa, Arabidopsis thaliana
  peptide (1)..(194): Ceres Seq. ID no. 12665030
MVEFVTRSGILTAKRVSDTSELSDGEVKGGTFLIELNFPVVTTCDVNLSDVSSSMITKALNGATIVDIKATATNNILVVLPSKESVTELQPRMDDILKCPCDGIIVTAAGSTGSSYDFYSRYFAPKFGVDEDPVCGSAHCALAHYWSIKMNKFDFLAYQASSRSGTIRIHLDKEKQRVLLRGKAVTVMEGHVLV

SEQ ID NO: 82352 - DNA, 873 bp, Arabidopsis thaliana
  misc_feature (1)..(873): Ceres Seq. ID no. 12665169
  misc_feature (1)..(873): Ortholog of  Ceres SEQ ID NO 15168525 as cited in SEQ ID NO 58192
atgcttctacgaagcgcttcaacgccacttctaaactcattggttcatgtctcgagtccaagagattctccaatcgaaaccgttgaatctgttcatcagattcaacgacacagatccataacactctctgcgtcttcttcctcttgctgttatagcccgatgtctgtacactctagcgacgattcttcaaggaggatgaaaagaacggcgtcagatagcgatctacgacatttgacatcgacgaaaccgccggtgagtaagtttttgagcggtggtgctttgatggaggatgtggatgaaggaatcggattcggtcttatacgcacttcgtcttatgatggtataagttgggctttggatgaagatactgaggttgctggcggtggtggtggtgggatgtttcacggtggaggaaaaggaaggagtggtggtagatctgatggtggtgatggaggtgacgataacactgatgttcattatcgtaagatgattgaagctaatcctggaaatgggatttttctcagtaattatgctaaattcctgaaggaggttagaaaagattacttgaaagcagaggaatattgtgggagagctattctggtgagtcctaatgatgggaatgttctggctatgtacgctgagttggtttggaagatccataaggattcatctcgtgctgagaattacttcaatcaagctgttgcagctgctcctgaggactgttatgtacaagcttcgtatgcacggtttctatgggatgctgaagaggaagaagaagaggaaaaggaagagagacatgaagaagaacttgagcatcaaacttctcgaatgaatttcttcaccggaccttctccaatcacggccatgtcttaa

SEQ ID NO: 82353 - protein, 290 aa, Arabidopsis thaliana
  peptide (1)..(290): Ceres Seq. ID no. 12665170
MLLRSASTPLLNSLVHVSSPRDSPIETVESVHQIQRHRSITLSASSSSCCYSPMSVHSSDDSSRRMKRTASDSDLRHLTSTKPPVSKFLSGGALMEDVDEGIGFGLIRTSSYDGISWALDEDTEVAGGGGGGMFHGGGKGRSGGRSDGGDGGDDNTDVHYRKMIEANPGNGIFLSNYAKFLKEVRKDYLKAEEYCGRAILVSPNDGNVLAMYAELVWKIHKDSSRAENYFNQAVAAAPEDCYVQASYARFLWDAEEEEEEEKEERHEEELEHQTSRMNFFTGPSPITAMS

SEQ ID NO: 82354 - protein, 237 aa, Arabidopsis thaliana
  peptide (1)..(237): Ceres Seq. ID no. 12665171
MSVHSSDDSSRRMKRTASDSDLRHLTSTKPPVSKFLSGGALMEDVDEGIGFGLIRTSSYDGISWALDEDTEVAGGGGGGMFHGGGKGRSGGRSDGGDGGDDNTDVHYRKMIEANPGNGIFLSNYAKFLKEVRKDYLKAEEYCGRAILVSPNDGNVLAMYAELVWKIHKDSSRAENYFNQAVAAAPEDCYVQASYARFLWDAEEEEEEEKEERHEEELEHQTSRMNFFTGPSPITAMS

SEQ ID NO: 82355 - protein, 225 aa, Arabidopsis thaliana
  peptide (1)..(225): Ceres Seq. ID no. 12665172
MKRTASDSDLRHLTSTKPPVSKFLSGGALMEDVDEGIGFGLIRTSSYDGISWALDEDTEVAGGGGGGMFHGGGKGRSGGRSDGGDGGDDNTDVHYRKMIEANPGNGIFLSNYAKFLKEVRKDYLKAEEYCGRAILVSPNDGNVLAMYAELVWKIHKDSSRAENYFNQAVAAAPEDCYVQASYARFLWDAEEEEEEEKEERHEEELEHQTSRMNFFTGPSPITAMS

SEQ ID NO: 82356 - DNA, 2526 bp, Arabidopsis thaliana
  misc_feature (1)..(2526): Ceres Seq. ID no. 12665173
  misc_feature (1)..(2526): Ortholog of  Ceres SEQ ID NO 15226393 as cited in SEQ ID NO 53476
agagagatttcttctataaggaagtggtaaattttttgagaaaggaacactgaaacaaagagagttcatggccactcaaggagaagcgacgttctccgcggccgcgacgacgacgtcgagctatccgacgggaggtgttggtggcaaattgaagcggcaatcggcgaggaggcatgcggcgacaccttattctcgaccaacacagaaccaggtacaacggaggccgtggatctcgagaatcgtcgatcctgcttatcggattatttccggcggcgctaccagaatacttccatatttcttctcgaacgccgcctccgctcctgctcttgctgctcctccagaggatcaaaatcaacatcaaggtgagttgcagaataatccacaggacaatgatcccagtgtaaccccaatttcaaataaaccggagccagcatcaattgaagtgggaggtcctagtggtactgcaaacgtgaacgaaggcaatttcagtatcagtgcacagagaagagggaaagcagctttaaatgacgacgttgcaatctcggagcttgaaaggctaatggaaggaaaaacgttttcacaagctgaaattgatcgtctcatagagatgataagttcgagggctattgatctacctgatgtcaagagagacgagagaaatttggagattcctttgagagagggagccaagaaaaatatgagtttatttgataaggcaaaagagcccattggtggcaaggatgctaatagtgaaatatgggctacaccaaccccacttgcaaagtcaataatacttgacggagacaaaatacgagatgaagttggtctttcaccggcagaacttgccaaggcatatatgggaggtcagacatcatcaagtagttcccaaggttttgtagcaagaaatgaaaaggattgtttagataggagtatgcttgtagggaaatcatcacttgcatcaccatcaagcaagccttctgcttgttggcctggtatcaagtcaagtgagcaatctggttttgcaactcctcaaagccgacgagagagctatgggcttcaaaattttccaaggactccttattctagaaccattctttcaaattctaagtcaaagttgatgcaattgcagaacgatagtagcaagcacctaagcaacctccagtctccctctcaaagtgtggagagaagatatggccagcttagcaagggaagggatggtggactttttggacccagtagaagaactcgtcagagcgccacgccgtccatggtgtctccttattcacgaccttcccgtggtgcatctcgttttgaaaattctgctatcatgaagagctctgaagcaggggaatcaagttacctatctaggtcccagataacaacttatggtaagcataaagaggcagaagttggtaccctgactgtgcctacacattctagtcagattgctaggacaatattggatcaccttgaacggacccaatcccaatccaccccaaaaaataaaactgccgagttaaagcttgccacttcctggagacatccacagtcttcgaaaaccgttgaaaaaagcagctcggacgtcaccaatgtgaaaaaggatggctcagctaaattgcatgaagatatccagaacattttctctcagaatcagccatcctctgttcttaaaccacctgcaactaccactggtgacattcaaaatggaatgaacaagaccgcttcagcgacaaatggaatattccgtggaacacaagcagcaagtagcggtggtaacgcactccaatatgagtttgggaagcctaagggttctctttccagaagcatgcatgatgagttgggtacttcttctcaggacgctgcaaaagctgttccctattcttttggaggggaaactgcaaatctccccaaaccaccatctcactcactgggaaataacaaaccggtacttccatcgatctcagtagccaagcccttccaaaaatgggcagtcccttcgggttcaaacgctggcttcacattcccggtctcttcatctgatggaacaacatcatcagagcccacaactccatccatcatgcccttcacaacaagcccaccagtagcaagtggtggtggtgttgccattacgaatcatcacgaagcgagaaaagattacgagattcctcaatttagtttcgacggcagcaacagaagaggagataagtcgcccctggtgttttcgtttccctctgtaagcgaagaggtggtcagtgaggatgatgatgcgaggtttggtatcaaatacacatttgggtcagaaaagccggagaggatatcattcagctcagcaggaagtgacggtgtctgctgttaaaagacaaggacaacggtctttgtttcttgtatgttttccaaaaaaatttccttttttgttttctcgaattgtttttgcttctttacttttgagagtagaattttgtgcctagatcatgagttttgatttctattcatttgaggattgatttctttatgaatccgattttt

SEQ ID NO: 82357 - protein, 762 aa, Arabidopsis thaliana
  peptide (1)..(762): Ceres Seq. ID no. 12665174
MATQGEATFSAAATTTSSYPTGGVGGKLKRQSARRHAATPYSRPTQNQVQRRPWISRIVDPAYRIISGGATRILPYFFSNAASAPALAAPPEDQNQHQGELQNNPQDNDPSVTPISNKPEPASIEVGGPSGTANVNEGNFSISAQRRGKAALNDDVAISELERLMEGKTFSQAEIDRLIEMISSRAIDLPDVKRDERNLEIPLREGAKKNMSLFDKAKEPIGGKDANSEIWATPTPLAKSIILDGDKIRDEVGLSPAELAKAYMGGQTSSSSSQGFVARNEKDCLDRSMLVGKSSLASPSSKPSACWPGIKSSEQSGFATPQSRRESYGLQNFPRTPYSRTILSNSKSKLMQLQNDSSKHLSNLQSPSQSVERRYGQLSKGRDGGLFGPSRRTRQSATPSMVSPYSRPSRGASRFENSAIMKSSEAGESSYLSRSQITTYGKHKEAEVGTLTVPTHSSQIARTILDHLERTQSQSTPKNKTAELKLATSWRHPQSSKTVEKSSSDVTNVKKDGSAKLHEDIQNIFSQNQPSSVLKPPATTTGDIQNGMNKTASATNGIFRGTQAASSGGNALQYEFGKPKGSLSRSMHDELGTSSQDAAKAVPYSFGGETANLPKPPSHSLGNNKPVLPSISVAKPFQKWAVPSGSNAGFTFPVSSSDGTTSSEPTTPSIMPFTTSPPVASGGGVAITNHHEARKDYEIPQFSFDGSNRRGDKSPLVFSFPSVSEEVVSEDDDARFGIKYTFGSEKPERISFSSAGSDGVCC

SEQ ID NO: 82358 - protein, 598 aa, Arabidopsis thaliana; identical to SEQ ID NO: 71466
  peptide (1)..(598): Ceres Seq. ID no. 12665175

SEQ ID NO: 82359 - protein, 582 aa, Arabidopsis thaliana; identical to SEQ ID NO: 71467
  peptide (1)..(582): Ceres Seq. ID no. 12665176

SEQ ID NO: 82360 - DNA, 1005 bp, Arabidopsis thaliana
  misc_feature (1)..(1005): Ceres Seq. ID no. 12665177
  misc_feature (1)..(1005): Ortholog of  Ceres SEQ ID NO 14306410 as cited in SEQ ID NO 53870
atggagaagaaattcaaagtgtgggtgtacagagaaggagagacaccgttagttcacatgggtccaatgaacaacatatacagcattgaaggccaattcatggacgagatcgagacagggatgagcccgttcgcggctaacaaccccgaagaggctcatgcctttctcctccctgtcagcgtcgccaacatcgttcattacctataccggccgctcgtgacctactcgagggaacaacttcacaaagtttttcttgactacgtcgatgttgtggctcacaagtatccttattggaacagaagccttggagccgaccatttctacgtttcttgccatgattgggcaccagacgtctcaggatcgaacccggagctgatgaaaaacctgataagagttctctgcaacgccaacacatcagaaggtttcatgccccaacgagacgtctcaatcccggagatcaacatccccggaggccacctgggaccacctcggttatcgcgctcttcgggccatgaccgacccatccttgctttcttcgcagggggttcacacggttatatccgcagaattctattgcagcattggaaagacaaagatgaggaggtccaagtccacgagtacttagccaaaaacaaagactacttcaagctcatggctacggcaaggttctgtctctgtcctagtggctacgaagtggctagccctcgagtcgttgcagccattaacttaggttgcgtccctgtcatcatctctgatcactacgccttgcctttctcagacgttcttgattggactaagttcaccattcatgttccttctaagaagatccctgagatcaaaaccatactaaagagcatatcctggagacgctacagggtgttgcagagaagggttttgcaggtccagagacatttcgtgatcaacagaccgtcacaaccgtttgatatgcttagaatgcttcttcactctgtttggttgagaagactaaacctgaggttgccttag

SEQ ID NO: 82361 - protein, 334 aa, Arabidopsis thaliana
  peptide (1)..(334): Ceres Seq. ID no. 12665178
MEKKFKVWVYREGETPLVHMGPMNNIYSIEGQFMDEIETGMSPFAANNPEEAHAFLLPVSVANIVHYLYRPLVTYSREQLHKVFLDYVDVVAHKYPYWNRSLGADHFYVSCHDWAPDVSGSNPELMKNLIRVLCNANTSEGFMPQRDVSIPEINIPGGHLGPPRLSRSSGHDRPILAFFAGGSHGYIRRILLQHWKDKDEEVQVHEYLAKNKDYFKLMATARFCLCPSGYEVASPRVVAAINLGCVPVIISDHYALPFSDVLDWTKFTIHVPSKKIPEIKTILKSISWRRYRVLQRRVLQVQRHFVINRPSQPFDMLRMLLHSVWLRRLNLRLP

SEQ ID NO: 82362 - protein, 315 aa, Arabidopsis thaliana
  peptide (1)..(315): Ceres Seq. ID no. 12665179
MGPMNNIYSIEGQFMDEIETGMSPFAANNPEEAHAFLLPVSVANIVHYLYRPLVTYSREQLHKVFLDYVDVVAHKYPYWNRSLGADHFYVSCHDWAPDVSGSNPELMKNLIRVLCNANTSEGFMPQRDVSIPEINIPGGHLGPPRLSRSSGHDRPILAFFAGGSHGYIRRILLQHWKDKDEEVQVHEYLAKNKDYFKLMATARFCLCPSGYEVASPRVVAAINLGCVPVIISDHYALPFSDVLDWTKFTIHVPSKKIPEIKTILKSISWRRYRVLQRRVLQVQRHFVINRPSQPFDMLRMLLHSVWLRRLNLRLP

SEQ ID NO: 82363 - protein, 312 aa, Arabidopsis thaliana
  peptide (1)..(312): Ceres Seq. ID no. 12665180
MNNIYSIEGQFMDEIETGMSPFAANNPEEAHAFLLPVSVANIVHYLYRPLVTYSREQLHKVFLDYVDVVAHKYPYWNRSLGADHFYVSCHDWAPDVSGSNPELMKNLIRVLCNANTSEGFMPQRDVSIPEINIPGGHLGPPRLSRSSGHDRPILAFFAGGSHGYIRRILLQHWKDKDEEVQVHEYLAKNKDYFKLMATARFCLCPSGYEVASPRVVAAINLGCVPVIISDHYALPFSDVLDWTKFTIHVPSKKIPEIKTILKSISWRRYRVLQRRVLQVQRHFVINRPSQPFDMLRMLLHSVWLRRLNLRLP

SEQ ID NO: 82364 - DNA, 2358 bp, Arabidopsis thaliana
  misc_feature (1)..(2358): Ceres Seq. ID no. 12665214
  misc_feature (1)..(2358): Ortholog of  Ceres SEQ ID NO 13659033 as cited in SEQ ID NO 66372
  misc_feature (1)..(2358): Ortholog of  Ceres SEQ ID NO 12625899 as cited in SEQ ID NO 69079
  misc_feature (1)..(2358): Ortholog of  Ceres SEQ ID NO 15180366 as cited in SEQ ID NO 0
ggtcatcatatcattcaaagccttgtttttttgttctctcccaaatttatttgaatttgacatttgatttgatttctcgaacgtagtgatttcctccgtacggcgtctccggtgaatcgaatttcatcatcgccgacatccctaaaagagtgtctatctattgattcactttcttcccaaattcttgttccctcgaattgattgacgaggaagagatttgtatttgatctgatatctcagattccaggatcagtgtttaggatttttttttggtcattaaaggtaagattgaaaggtcaccaataatcttatgtgattaggcaaggaatctactcctaaatgtgttgatcaactaattgttgtgaaaggatcacactgaacctcgagctagctggacatatgccttgatctagtatgaacgaaactttctctgcaacgccaagaagcatgaccatccatagatataggatgaaaagaggagcccttagacgaagggctagggatatctctgttatgcttgttgtacttgtttgtgcaactgtagtcatatggacatgggatagaactccaacctcggcctttcttccacctgaaagtcactatctaaagctgcaatcagaagaaaaggttgagaaattacctactgcgctgaatactgaaactaaagacagctactcatcagctattccatttgtaaacaaagaggaaagcaaagaggattcatccgataataaagatacagaagaagaagaggagaaacaagtggaagaagttactgtaagtaatacgaatcgagggaagataccaacgattgaagaaaaaaagggggaacatgaagttattgcaagtgagccaaaatatcggaagacgccaactagagaagattttaaattagaaaaggtgaaacatgaggttgctgttggtgagggcgaagctacggagacaacacatattaaagagactaattcagatccaaagagtaatattcttgcaacagacgaagagaggactgatggtacttcaacagctcgcatcacgaatcaagcttgcaattatgcgaaagggaaatgggttgtggacaatcaccgtcctttgtattcaggatctcaatgcaaacagtggcttgcttcaatgtgggcatgcaggttgatgcaacgtacagactttgcctttgaaagtttaagatggcaacctaaagattgctctatggaagaatttgagggttccaagttcttgagaaggatgaagaacaaaaccctagcctttgttggagactcgttgggaagacaacagtttcagtctatgatgtgtatgatctcgggaggcaaagagagactcgatgtccttgatgtgggaccagaatttgggttcataactcccgaaggtggagctcgtcctggtggttgggcttacagattcccagaaactaacacaacggtcctataccactggtcatctacactgtgcgacatagaaccgctcaacatcactgaccccgcaactgaacacgctatgcatcttgatcgcccaccagcgtttttacgccaataccttcaaaagatcgacgtattggtaatgaacacaggtcaccattggaaccgcgggaagctcaacgggaacaaatgggtgatgcatgttaatggcgttcccaacactaacaggaagttagctgctcttgggaacgccaagaatttcacaatccacagcacagttagttgggttaactcacaactccctctccatcccggtctcaaggcattctacagaagcctttcaccgagacatttcgtgggtggggaatggaacaccggagggagctgcaataacacaaccccaatgtctatcgggaaagaagttttgcaagaggagtcaagcgactacagcgcgggtcgtgcagtgaaaggtacaggggttaagcttttagacataacagccttatctcatattagagacgaaggtcacatatcacggttcagtatctcggcttcacggggagttcaggattgcctccattggtgcttgcccggtgttcctgatacgtggaatgaaatcctttttgcaatgatctaagttttcaagttacagctgttgcatcaatcaacagaaaagttcagagaaagggcttgagccaaatcaaagccagcctttgatagctttctacaacacacattgaagttttagcggcaggaggtgtaagttagtatttattttggtacaaaaccaaagctctgggtatcatagacgtattgtcgttatcgtaaccataccggggtttggtttcgaccatattttacagaacagattctaactcttggaatttgtctttgatcgattaaaagaaaattttagagttacttc

SEQ ID NO: 82365 - protein, 551 aa, Arabidopsis thaliana
  peptide (1)..(551): Ceres Seq. ID no. 12665215
MNETFSATPRSMTIHRYRMKRGALRRRARDISVMLVVLVCATVVIWTWDRTPTSAFLPPESHYLKLQSEEKVEKLPTALNTETKDSYSSAIPFVNKEESKEDSSDNKDTEEEEEKQVEEVTVSNTNRGKIPTIEEKKGEHEVIASEPKYRKTPTREDFKLEKVKHEVAVGEGEATETTHIKETNSDPKSNILATDEERTDGTSTARITNQACNYAKGKWVVDNHRPLYSGSQCKQWLASMWACRLMQRTDFAFESLRWQPKDCSMEEFEGSKFLRRMKNKTLAFVGDSLGRQQFQSMMCMISGGKERLDVLDVGPEFGFITPEGGARPGGWAYRFPETNTTVLYHWSSTLCDIEPLNITDPATEHAMHLDRPPAFLRQYLQKIDVLVMNTGHHWNRGKLNGNKWVMHVNGVPNTNRKLAALGNAKNFTIHSTVSWVNSQLPLHPGLKAFYRSLSPRHFVGGEWNTGGSCNNTTPMSIGKEVLQEESSDYSAGRAVKGTGVKLLDITALSHIRDEGHISRFSISASRGVQDCLHWCLPGVPDTWNEILFAMI

SEQ ID NO: 82366 - protein, 540 aa, Arabidopsis thaliana
  peptide (1)..(540): Ceres Seq. ID no. 12665216
MTIHRYRMKRGALRRRARDISVMLVVLVCATVVIWTWDRTPTSAFLPPESHYLKLQSEEKVEKLPTALNTETKDSYSSAIPFVNKEESKEDSSDNKDTEEEEEKQVEEVTVSNTNRGKIPTIEEKKGEHEVIASEPKYRKTPTREDFKLEKVKHEVAVGEGEATETTHIKETNSDPKSNILATDEERTDGTSTARITNQACNYAKGKWVVDNHRPLYSGSQCKQWLASMWACRLMQRTDFAFESLRWQPKDCSMEEFEGSKFLRRMKNKTLAFVGDSLGRQQFQSMMCMISGGKERLDVLDVGPEFGFITPEGGARPGGWAYRFPETNTTVLYHWSSTLCDIEPLNITDPATEHAMHLDRPPAFLRQYLQKIDVLVMNTGHHWNRGKLNGNKWVMHVNGVPNTNRKLAALGNAKNFTIHSTVSWVNSQLPLHPGLKAFYRSLSPRHFVGGEWNTGGSCNNTTPMSIGKEVLQEESSDYSAGRAVKGTGVKLLDITALSHIRDEGHISRFSISASRGVQDCLHWCLPGVPDTWNEILFAMI

SEQ ID NO: 82367 - protein, 533 aa, Arabidopsis thaliana
  peptide (1)..(533): Ceres Seq. ID no. 12665217
MKRGALRRRARDISVMLVVLVCATVVIWTWDRTPTSAFLPPESHYLKLQSEEKVEKLPTALNTETKDSYSSAIPFVNKEESKEDSSDNKDTEEEEEKQVEEVTVSNTNRGKIPTIEEKKGEHEVIASEPKYRKTPTREDFKLEKVKHEVAVGEGEATETTHIKETNSDPKSNILATDEERTDGTSTARITNQACNYAKGKWVVDNHRPLYSGSQCKQWLASMWACRLMQRTDFAFESLRWQPKDCSMEEFEGSKFLRRMKNKTLAFVGDSLGRQQFQSMMCMISGGKERLDVLDVGPEFGFITPEGGARPGGWAYRFPETNTTVLYHWSSTLCDIEPLNITDPATEHAMHLDRPPAFLRQYLQKIDVLVMNTGHHWNRGKLNGNKWVMHVNGVPNTNRKLAALGNAKNFTIHSTVSWVNSQLPLHPGLKAFYRSLSPRHFVGGEWNTGGSCNNTTPMSIGKEVLQEESSDYSAGRAVKGTGVKLLDITALSHIRDEGHISRFSISASRGVQDCLHWCLPGVPDTWNEILFAMI

SEQ ID NO: 82368 - DNA, 1068 bp, Arabidopsis thaliana
  misc_feature (1)..(1068): Ceres Seq. ID no. 12665258
  misc_feature (1)..(1068): Ortholog of  Ceres SEQ ID NO 15171743 as cited in SEQ ID NO 57086
atgtctgattcttcctcaagccatgactcaccaccttctccggcgatcaccggagattcagaaaccacagtgaccaacaacgaatcagaatccaacacaaaatgtcaaacagcaatccaatccttatccacgatcgtcacaaacacaaacatcccttccacaataaccatcctcctcgacgatgaagccgtctccaccgcgatctcctctctcctcctacgtcccgattcaggcgccggagataacaacctctgccgttggctctacgacacattccaatccgcggaaccatcgcttcagcttctcgtcctccgattcgttcctttaatcgctggtctctacctctctcgtgtccctctccgtcaaccacaagccggattcgaagccgttttactcgctctctacgcgcacgaaacaacctcacgtgccggtcaagcaataaccgtcaacattccagatctctcatatccaagcatttaccatgaatccaaaggtctcacaaggaacaacaactcaacgtgcctcaacatcgctgtgatctcctccacgttagatccacacgggacggttagatccacgcgccgcgcgaggatcgtcggagtcgcgttggagctttactatagcaaaatctcgaaaatgccacgcgaatctaagcttaatttctgtgaatcgtgtgagaaatgggcggggcaaaacggagaaacggagcaatcttcacgggctgtgattccgactttgagcgatgattcgtggagagaggaagagaatgttgctattggaggaagatctgagagagatagtggaaggattccattgccatgggagcttctccaaccgattttgaggatcttagggcattgtctccttgggctcaaaatggaagatagggagttatctgaggcggcgaataaagcttgtcagagtttgtatctccgatctctgcatgatataaatccgaaggcgattttggctaccggaagtcttcttcggctccgtgagatggctcttgatcccaagaatcaaatcgatcacactgagctatcaaacgacaccgttctctccgtttga

SEQ ID NO: 82369 - protein, 355 aa, Arabidopsis thaliana
  peptide (1)..(355): Ceres Seq. ID no. 12665259
MSDSSSSHDSPPSPAITGDSETTVTNNESESNTKCQTAIQSLSTIVTNTNIPSTITILLDDEAVSTAISSLLLRPDSGAGDNNLCRWLYDTFQSAEPSLQLLVLRFVPLIAGLYLSRVPLRQPQAGFEAVLLALYAHETTSRAGQAITVNIPDLSYPSIYHESKGLTRNNNSTCLNIAVISSTLDPHGTVRSTRRARIVGVALELYYSKISKMPRESKLNFCESCEKWAGQNGETEQSSRAVIPTLSDDSWREEENVAIGGRSERDSGRIPLPWELLQPILRILGHCLLGLKMEDRELSEAANKACQSLYLRSLHDINPKAILATGSLLRLREMALDPKNQIDHTELSNDTVLSV

SEQ ID NO: 82370 - DNA, 633 bp, Arabidopsis thaliana
  misc_feature (1)..(633): Ceres Seq. ID no. 12665334
  misc_feature (1)..(633): Ortholog of  Ceres SEQ ID NO 14303374 as cited in SEQ ID NO 54088
  misc_feature (1)..(633): Ortholog of  Ceres SEQ ID NO 13639250 as cited in SEQ ID NO 56555
  misc_feature (1)..(633): Ortholog of  Ceres SEQ ID NO 15177034 as cited in SEQ ID NO 60024
  misc_feature (1)..(633): Ortholog of  Ceres SEQ ID NO 13598257 as cited in SEQ ID NO 63008
  misc_feature (1)..(633): Ortholog of  Ceres SEQ ID NO 13597309 as cited in SEQ ID NO 63851
  misc_feature (1)..(633): Ortholog of  Ceres SEQ ID NO 12599167 as cited in SEQ ID NO 64443
atgacggggagatactgcgaccaacacaacggctatgaggagaggaggatgaggatgatgatgagacgcatagcatgggcatgtcttggcctaatcgtggcggttgcgttcgtggtgttcttggtgtgggctatacttcacccgcacggaccgcgttttgtcctccaagacgtaaccattaacgacttcaacgtttctcagccaaatttcctctcttcaaatctccaggtcactgtatcttctcgcaatccaaacgacaagatcggcattttttatgatcgtctcgacatctacgtcacataccggaaccaagaggtaacgttggcgaggctcttgccgtcaacgtatcaaggacatctggaagtaacggtgtggtcaccatttctgattggctccgccgtgccggtggctccttacctatcttcggcattgaacgaagacttattcgccgggttggtgcttctcaacatcaaaatagacggttgggttaggtggaaagtgggctcgtgggtctctggcagttatcgcctccacgttaactgtcctgcgttcattaccgtcaccggaaagttaaccggcaccggtccggcgatcaagtaccagcttgttcagcgatgtgctgttgacgtatga

SEQ ID NO: 82371 - protein, 210 aa, Arabidopsis thaliana
  peptide (1)..(210): Ceres Seq. ID no. 12665335
MTGRYCDQHNGYEERRMRMMMRRIAWACLGLIVAVAFVVFLVWAILHPHGPRFVLQDVTINDFNVSQPNFLSSNLQVTVSSRNPNDKIGIFYDRLDIYVTYRNQEVTLARLLPSTYQGHLEVTVWSPFLIGSAVPVAPYLSSALNEDLFAGLVLLNIKIDGWVRWKVGSWVSGSYRLHVNCPAFITVTGKLTGTGPAIKYQLVQRCAVDV

SEQ ID NO: 82372 - protein, 194 aa, Arabidopsis thaliana
  peptide (1)..(194): Ceres Seq. ID no. 12665336
MRMMMRRIAWACLGLIVAVAFVVFLVWAILHPHGPRFVLQDVTINDFNVSQPNFLSSNLQVTVSSRNPNDKIGIFYDRLDIYVTYRNQEVTLARLLPSTYQGHLEVTVWSPFLIGSAVPVAPYLSSALNEDLFAGLVLLNIKIDGWVRWKVGSWVSGSYRLHVNCPAFITVTGKLTGTGPAIKYQLVQRCAVDV

SEQ ID NO: 82373 - protein, 192 aa, Arabidopsis thaliana
  peptide (1)..(192): Ceres Seq. ID no. 12665337
MMMRRIAWACLGLIVAVAFVVFLVWAILHPHGPRFVLQDVTINDFNVSQPNFLSSNLQVTVSSRNPNDKIGIFYDRLDIYVTYRNQEVTLARLLPSTYQGHLEVTVWSPFLIGSAVPVAPYLSSALNEDLFAGLVLLNIKIDGWVRWKVGSWVSGSYRLHVNCPAFITVTGKLTGTGPAIKYQLVQRCAVDV

SEQ ID NO: 82374 - DNA, 1023 bp, Arabidopsis thaliana
  misc_feature (1)..(1023): Ceres Seq. ID no. 12665349
  misc_feature (1)..(1023): Ortholog of  Ceres SEQ ID NO 13582619 as cited in SEQ ID NO 56520
  misc_feature (1)..(1023): Ortholog of  Ceres SEQ ID NO 12611392 as cited in SEQ ID NO 56826
  misc_feature (1)..(1023): Ortholog of  Ceres SEQ ID NO 13660872 as cited in SEQ ID NO 60830
atggacacgaaggcggttggagtttctaaggatacggcggcgtcgatggaagcgtcgacggtgtttcctgggtttaaattctcgccgacggatgtggagttgatttcgtattacctgaagcggaagatggatggcttggagaggtccgttgaggttataccggaccttgagatttacaatttcgagccttgggatttacccgataagtcgattgtgaaatctgatagcgagtggttcttcttctgtgcgcgtgggaaaaagtatccacatggttcacagaacaggagagcaacgaagatgggatactggaaagcaactgggaaagagcgtgatgtgaagtctggttctgaggtcattggaacaaagaggacgcttgttttccatattggtcgtgcaccaaaaggcgaaagaactgactggattatgcacgagtactgcgtgaaaggagtatctctggatgatgctatggttgtttgccgggttaggaggaacaaagaatacaatagtggtacaagtcagaaggcaccaaagccaaattcatcagccgagaagcatgcgaaagtccaaaatggcgctacgagttcagggagcccgtctgattgggacaacttggttgatttttacctagcaggtgaatcaggggagaaactactcgctgagatggcagagtcatcagaaaatctacaggtggataatgacgaggatttctttgcggatatcctaagagacgaaatcatcaatctcgatgaagcggtgatgacagggaacacaccaaacgaagtgccaacactagaatcagcatcaatggagataagggtacttcctttaccaaacatgatagacaaacaaatgtcatcactgttagaggaaagaccatcacagaagaagaaaggaaaagacgccacggaatcattgtcgagctgcttcgtgggtttatactcgatcaaatcagtgaacaaggcacgatgggatgttattataggtgtagtggctctgatagcaatgttgttttatctagaataa

SEQ ID NO: 82375 - protein, 340 aa, Arabidopsis thaliana; identical to SEQ ID NO: 41503
  peptide (1)..(340): Ceres Seq. ID no. 12665350

SEQ ID NO: 82376 - protein, 325 aa, Arabidopsis thaliana; identical to SEQ ID NO: 41504
  peptide (1)..(325): Ceres Seq. ID no. 12665351

SEQ ID NO: 82377 - protein, 298 aa, Arabidopsis thaliana
  peptide (1)..(298): Ceres Seq. ID no. 12665352
MDGLERSVEVIPDLEIYNFEPWDLPDKSIVKSDSEWFFFCARGKKYPHGSQNRRATKMGYWKATGKERDVKSGSEVIGTKRTLVFHIGRAPKGERTDWIMHEYCVKGVSLDDAMVVCRVRRNKEYNSGTSQKAPKPNSSAEKHAKVQNGATSSGSPSDWDNLVDFYLAGESGEKLLAEMAESSENLQVDNDEDFFADILRDEIINLDEAVMTGNTPNEVPTLESASMEIRVLPLPNMIDKQMSSLLEERPSQKKKGKDATESLSSCFVGLYSIKSVNKARWDVIIGVVALIAMLFYLE

SEQ ID NO: 82378 - DNA, 1449 bp, Arabidopsis thaliana
  misc_feature (1)..(1449): Ceres Seq. ID no. 12665375
  misc_feature (1)..(1449): Ortholog of  Ceres SEQ ID NO 14311313 as cited in SEQ ID NO 53503
  misc_feature (1)..(1449): Ortholog of  Ceres SEQ ID NO 14311625 as cited in SEQ ID NO 55184
  misc_feature (1)..(1449): Ortholog of  Ceres SEQ ID NO 14310588 as cited in SEQ ID NO 58770
atggagaagaagatgaaagaggaggaggaggagccactgagccctatggctcgggcatttcaggagccgagcatcgactgtggtattgtcataaagttcgggtgcaaaaccaagatcaaccctgacgtcattgttgattccttgaagcttaatgttttcaagcatcctcgtttctgcagccttttggacgatgatggtacaaaatggttaaggaccgatgttgtcaatgtagaggaacatgtatttgtaccagacatagatccaaaattgacagaggaagacgttgaatggttcgttgaggactacatatccagtataacgatgattcctctagacagaactaagcccttatgggaagttcatatcctaaacgctaaaacctctgacgccgaagctatatgtgtcataagatgtcaccatgcattaggagatggagtgtctatcttgtctctcatactagcatctacccgaaaaacatcggaacccgaggcattttctaccctccctgtcccaaagtgtcgtgaatcttacaaccatagacgcgggttctcattctttagattggttcttgtggtttgttccacagtgagattgatatggaataccctagtggattcctttttgtgcatggcaacaatatttttcttgaaggatacagatacacccctgaagggtaagcctggcgccataaagaaattttctcaccggattgtgtctttggatgacatcaaacttataaagaacgctatggaaatgactatcaacgacgttcttctgggggttacagaagccgctctcacacgctatctgcaccaatcatatgacaagaccaatgaggaagctggaacatcgcttacaccaaatcgacaagatttgcttgatagaattcgattacgttcacttatagtagtgaacctaaggcctactggaagccagtccatagccgatatgatggccaagggctctaaatgcagatggggtaactacatcagcgtcattctcttcccgtttaccatcgccttgcaatctgatccattagtgtatctctcaaatgttaaatccatgatagatcgaaagaaaaactctcttattacttatattatatacacattttcggagttcgtcatcaaagctttcgggatcaatgtcgcagtagcgtttcagcgtaaaatcatgttgaacacaacgatgtgcatttcaaaccttcccggtccgactgaggaagttagtttccatggccatccgatcgcttactttgctccaagcatctatggactaccacaagcattgacaatacattatctgagttatgcaaacaagatgataatttccgtcgctgttgatccaatgattattgacgctcacaagctatgtgatgaactagaggaatctctcaagaatatgaaacttgctatcttagagaaaggattaccaaatcatgtcaattaa

SEQ ID NO: 82379 - protein, 482 aa, Arabidopsis thaliana
  peptide (1)..(482): Ceres Seq. ID no. 12665376
MEKKMKEEEEEPLSPMARAFQEPSIDCGIVIKFGCKTKINPDVIVDSLKLNVFKHPRFCSLLDDDGTKWLRTDVVNVEEHVFVPDIDPKLTEEDVEWFVEDYISSITMIPLDRTKPLWEVHILNAKTSDAEAICVIRCHHALGDGVSILSLILASTRKTSEPEAFSTLPVPKCRESYNHRRGFSFFRLVLVVCSTVRLIWNTLVDSFLCMATIFFLKDTDTPLKGKPGAIKKFSHRIVSLDDIKLIKNAMEMTINDVLLGVTEAALTRYLHQSYDKTNEEAGTSLTPNRQDLLDRIRLRSLIVVNLRPTGSQSIADMMAKGSKCRWGNYISVILFPFTIALQSDPLVYLSNVKSMIDRKKNSLITYIIYTFSEFVIKAFGINVAVAFQRKIMLNTTMCISNLPGPTEEVSFHGHPIAYFAPSIYGLPQALTIHYLSYANKMIISVAVDPMIIDAHKLCDELEESLKNMKLAILEKGLPNHVN

SEQ ID NO: 82380 - protein, 478 aa, Arabidopsis thaliana
  peptide (1)..(478): Ceres Seq. ID no. 12665377
MKEEEEEPLSPMARAFQEPSIDCGIVIKFGCKTKINPDVIVDSLKLNVFKHPRFCSLLDDDGTKWLRTDVVNVEEHVFVPDIDPKLTEEDVEWFVEDYISSITMIPLDRTKPLWEVHILNAKTSDAEAICVIRCHHALGDGVSILSLILASTRKTSEPEAFSTLPVPKCRESYNHRRGFSFFRLVLVVCSTVRLIWNTLVDSFLCMATIFFLKDTDTPLKGKPGAIKKFSHRIVSLDDIKLIKNAMEMTINDVLLGVTEAALTRYLHQSYDKTNEEAGTSLTPNRQDLLDRIRLRSLIVVNLRPTGSQSIADMMAKGSKCRWGNYISVILFPFTIALQSDPLVYLSNVKSMIDRKKNSLITYIIYTFSEFVIKAFGINVAVAFQRKIMLNTTMCISNLPGPTEEVSFHGHPIAYFAPSIYGLPQALTIHYLSYANKMIISVAVDPMIIDAHKLCDELEESLKNMKLAILEKGLPNHVN

SEQ ID NO: 82381 - protein, 467 aa, Arabidopsis thaliana
  peptide (1)..(467): Ceres Seq. ID no. 12665378
MARAFQEPSIDCGIVIKFGCKTKINPDVIVDSLKLNVFKHPRFCSLLDDDGTKWLRTDVVNVEEHVFVPDIDPKLTEEDVEWFVEDYISSITMIPLDRTKPLWEVHILNAKTSDAEAICVIRCHHALGDGVSILSLILASTRKTSEPEAFSTLPVPKCRESYNHRRGFSFFRLVLVVCSTVRLIWNTLVDSFLCMATIFFLKDTDTPLKGKPGAIKKFSHRIVSLDDIKLIKNAMEMTINDVLLGVTEAALTRYLHQSYDKTNEEAGTSLTPNRQDLLDRIRLRSLIVVNLRPTGSQSIADMMAKGSKCRWGNYISVILFPFTIALQSDPLVYLSNVKSMIDRKKNSLITYIIYTFSEFVIKAFGINVAVAFQRKIMLNTTMCISNLPGPTEEVSFHGHPIAYFAPSIYGLPQALTIHYLSYANKMIISVAVDPMIIDAHKLCDELEESLKNMKLAILEKGLPNHVN

SEQ ID NO: 82382 - DNA, 1533 bp, Arabidopsis thaliana
  misc_feature (1)..(1533): Ceres Seq. ID no. 12665439
  misc_feature (1)..(1533): Ortholog of  Ceres SEQ ID NO 14314571 as cited in SEQ ID NO 59360
atggaaaatggtatgtataaaaagaaaggagtgtgcgactcttgtgtctcgtccaaaagcagatccaaccacagccccaaaagaagcatgatggagcctcagcctcaccatctcctcatggattggaacaaagctaatgatcttctcacacaagaacacgcagcttttctcaatgatcctcaccatctcatgttagatccacctcccgaaaccctaattcacttggacgaagacgaagagtacgatgaagacatggatgcgatgaaggagatgcagtacatgatcgccgtcatgcagcccgtagacatcgaccctgccacggtccctaagccgaaccgccgtaacgtaaggataagcgacgatcctcagacggtggttgctcgtcggcgtcgggaaaggatcagcgagaagatccgaattctcaagaggatcgtgcctggtggtgcgaagatggacacagcttccatgctcgacgaagccatacgttacaccaagttcttgaaacggcaggtgaggattcttcagcctcactctcagattggagctcctatggctaacccctcttacctttgttattaccacaactcccaaccctgatgaactacacagaagctcgctagctagacatttggtgtcatcctctcaacctttttcatgttgatatattatatatagatgcataaagattcgatccaagattgtatgggtgttttaatattattattctaagatatatgatgtacaattgtgtaccaagtttctttatcttgatatcatatgcataaataattggtgaataaaaagaagatattgattgtaaacaaaaaaaagaagatattgattgttaattagggtttgatcattctgtatgaaagctttggcctgcaaattaattttcgatatatatatatatatatggagaatatatatcaaatacttttttaatttgactataatttgtatcaattatctgaatctgatgagtgtaggttatatatggattagcaaaaaagaaaacaaccattattacgcacctacattaaaaatcatccaccaaagaagaaaccatcctcaagagggttcccatattggagaataatgaaaaatttaagaagaaaagggtcgagatttcgacggacaagcattctgattattacaaacatattttagagaaatttagaaagaaaattaaactaaaaattaaaaagaagcaaactgagataactctctgtctcaatggaacgccggccagaagtgatcatcgtgattttggttaccatcttgataaggtcaatcgaggagtgtatccgtttcaaacaccacacgtccactatatttcgccaagttaaattgaaaggaagatgaacaatcaagagatgtggtagttattttgaattaagcatatccaaaaagaccctaggcgaagctgagagatcgcaagttcgagtgacacttggaacgaaactaatattacatgatgtggtttcgggcctaaaggaattacgggcttcggcccagaacctcctgatattc

SEQ ID NO: 82383 - protein, 198 aa, Arabidopsis thaliana
  peptide (1)..(198): Ceres Seq. ID no. 12665440
MENGMYKKKGVCDSCVSSKSRSNHSPKRSMMEPQPHHLLMDWNKANDLLTQEHAAFLNDPHHLMLDPPPETLIHLDEDEEYDEDMDAMKEMQYMIAVMQPVDIDPATVPKPNRRNVRISDDPQTVVARRRRERISEKIRILKRIVPGGAKMDTASMLDEAIRYTKFLKRQVRILQPHSQIGAPMANPSYLCYYHNSQP

SEQ ID NO: 82384 - protein, 194 aa, Arabidopsis thaliana
  peptide (1)..(194): Ceres Seq. ID no. 12665441
MYKKKGVCDSCVSSKSRSNHSPKRSMMEPQPHHLLMDWNKANDLLTQEHAAFLNDPHHLMLDPPPETLIHLDEDEEYDEDMDAMKEMQYMIAVMQPVDIDPATVPKPNRRNVRISDDPQTVVARRRRERISEKIRILKRIVPGGAKMDTASMLDEAIRYTKFLKRQVRILQPHSQIGAPMANPSYLCYYHNSQP

SEQ ID NO: 82385 - protein, 169 aa, Arabidopsis thaliana
  peptide (1)..(169): Ceres Seq. ID no. 12665442
MMEPQPHHLLMDWNKANDLLTQEHAAFLNDPHHLMLDPPPETLIHLDEDEEYDEDMDAMKEMQYMIAVMQPVDIDPATVPKPNRRNVRISDDPQTVVARRRRERISEKIRILKRIVPGGAKMDTASMLDEAIRYTKFLKRQVRILQPHSQIGAPMANPSYLCYYHNSQP

SEQ ID NO: 82386 - DNA, 1058 bp, Arabidopsis thaliana
  misc_feature (1)..(1058): Ceres Seq. ID no. 12665443
  misc_feature (1)..(1058): Ortholog of  Ceres SEQ ID NO 14306439 as cited in SEQ ID NO 53628
  misc_feature (1)..(1058): Ortholog of  Ceres SEQ ID NO 12611235 as cited in SEQ ID NO 56101
  misc_feature (1)..(1058): Ortholog of  Ceres SEQ ID NO 15226202 as cited in SEQ ID NO 65001
  misc_feature (1)..(1058): Ortholog of  Ceres SEQ ID NO 15177896 as cited in SEQ ID NO 0
aaaatttgttcgattctcattcttcttctcacagtcgtaaaccctaaaaaaaaaacagagaaatcaaatttcaatctcgaaggatctacaaagaagcatgacgaccggagatctcgttaatatccatcctactgagcttaaattcccctttgagttgaagaaacaaagttcgtgttcgatgcaattgaccaacaagacaactactcaatgtgtcgcttttaaggttaaaacaaccaatcctcgcaaatactgtgttcgtcctaacactggtgttgtcttgcccggtgattcctgcaatgttacagtgacgatgcaagcccagaaagaggcaccacttgatatgcaatgcaaagacaagttccttgttcagactgttgttgtctctgatggtactacttccaaagaagtcctcgctgaaatgttcaacaaggaggctggtagagtgattgaggatttcaaactgcgagttgtttacattcctgctaatcctccttcacctgtccctgaaggttctgaagaaggcaactctcctatggcttccctcaacgatattgcctctcaatctgcctcactctttgatgacgtgtcaagaacgtttgaagaaacaagtgagaaatcttcagaggcatggtctatgatttccaaattgacggaggagaagacttctgctactcaacaaagtcagaagctccgtctcgaactggaaatgctgaggaaagaaacaagcaagaagcagtcgggtggtcattccttgctcttgatgctgctggtgggtctgctcggttgcgtgattggctacttattgaaccggatataaacgccatggggttagcttcatcatccttttaatcatcaaatcttgcaaagttcttaagatttttgaccagattttcgtaaaatggaggtggtttttttttaaaagtttcatatttaagctgtaaaatcagtagctgtagcacaggaacaggtgtgattttgtggcaggtttcttgttattgatttaaacacactttcgagtctgtagtaagatctcaagagtcgttcttatgattggaatt

SEQ ID NO: 82387 - protein, 239 aa, Arabidopsis thaliana; identical to SEQ ID NO: 22411
  peptide (1)..(239): Ceres Seq. ID no. 12665444

SEQ ID NO: 82388 - protein, 212 aa, Arabidopsis thaliana; identical to SEQ ID NO: 22412
  peptide (1)..(212): Ceres Seq. ID no. 12665445

SEQ ID NO: 82389 - protein, 168 aa, Arabidopsis thaliana; identical to SEQ ID NO: 22413
  peptide (1)..(168): Ceres Seq. ID no. 12665446

SEQ ID NO: 82390 - DNA, 1425 bp, Arabidopsis thaliana
  misc_feature (1)..(1425): Ceres Seq. ID no. 12665447
  misc_feature (1)..(1425): Ortholog of  Ceres SEQ ID NO 13594037 as cited in SEQ ID NO 55666
  misc_feature (1)..(1425): Ortholog of  Ceres SEQ ID NO 13657707 as cited in SEQ ID NO 66407
atggttttcggaaatgaaatgtgcgatgaaacgccgcatccgggtgaatgcaagactctactgattaaacacaaacccataagaagcactacacagttcctccaagtgtccgtggaacgaacactagatggggctgtcaaagccaagagtgacacgtattttcttgagccacaatttggttcaaagcaagcttgggaggaatgtatggatctgtacgagcagactattcacaggctcaacgagagcgtgttgtgtcccaagaacgtttgctctaggtcagacgtgcaagcatggctcagcaccgcactcaccaacctagacacatgtcaggaagagatgtcagaactcggtgtctcgtctcattccttggagagcattaccattgatgtcattaacaccttggccatcaacaagaggatggaacaaaacggtaaggagtttgggatatcgaaaataacaatgaaaacactatctataggtgaaaaagtggatgtagtggtggctcaagatggttccggggactacaaaactatccaagaggccgtgaatggtgctggagagaggctcaaaggaagcccaaggtatgtcatacatgtcaagcaaggcgtttacgaggaatatgtcaatgtaggaatcaagtctaataacatcatgatcactggcgatggtatcggcaaaaccataatcaccggtgacaaaagcaagggccgaggattttccacttacaaatctgccacttttgtggctgagggggacggtttcgtgggacgagacataacaatcaggaacacggcaggaccggaaaaccatcaggcggtggctctcagatcgaattcagacatgtcagtgttttacagatgtagcattgaaggctatcaagacacactctacgtgcactctggtcgtcagtttttcagggagtgcgacatatacggaaccgttgacttcattttcggaaacgccgcagctgttttacaaaactgtcggatatttgcacgtaacccaccgaatggagtcaacaccataacggcacagagccggttcaacccgaatcagacaacaggaatcgtaatccataactccgtggtgaaaggagctccgggggtacagttaggaggcgtgaaaacgtatttgggccgtccgtggaggtcgtacgcacggaccgtggtgatcgggacgtatcttgatacgttgatcgaacccaacggatggattgattgggataatgtaacggctctaagcacgttgtattatggggagtatcaaaactcgggaccgggttcggggacagagaaccgggttgattgggccgggtttcacgtgatatctgatatccaagaagctcgagagtttacgttacccaaattcatcgactctgcttcatggttaccgcctaccaaagtgcctttcaccatcaatctctaa

SEQ ID NO: 82391 - protein, 474 aa, Arabidopsis thaliana
  peptide (1)..(474): Ceres Seq. ID no. 12665448
MVFGNEMCDETPHPGECKTLLIKHKPIRSTTQFLQVSVERTLDGAVKAKSDTYFLEPQFGSKQAWEECMDLYEQTIHRLNESVLCPKNVCSRSDVQAWLSTALTNLDTCQEEMSELGVSSHSLESITIDVINTLAINKRMEQNGKEFGISKITMKTLSIGEKVDVVVAQDGSGDYKTIQEAVNGAGERLKGSPRYVIHVKQGVYEEYVNVGIKSNNIMITGDGIGKTIITGDKSKGRGFSTYKSATFVAEGDGFVGRDITIRNTAGPENHQAVALRSNSDMSVFYRCSIEGYQDTLYVHSGRQFFRECDIYGTVDFIFGNAAAVLQNCRIFARNPPNGVNTITAQSRFNPNQTTGIVIHNSVVKGAPGVQLGGVKTYLGRPWRSYARTVVIGTYLDTLIEPNGWIDWDNVTALSTLYYGEYQNSGPGSGTENRVDWAGFHVISDIQEAREFTLPKFIDSASWLPPTKVPFTINL

SEQ ID NO: 82392 - protein, 468 aa, Arabidopsis thaliana
  peptide (1)..(468): Ceres Seq. ID no. 12665449
MCDETPHPGECKTLLIKHKPIRSTTQFLQVSVERTLDGAVKAKSDTYFLEPQFGSKQAWEECMDLYEQTIHRLNESVLCPKNVCSRSDVQAWLSTALTNLDTCQEEMSELGVSSHSLESITIDVINTLAINKRMEQNGKEFGISKITMKTLSIGEKVDVVVAQDGSGDYKTIQEAVNGAGERLKGSPRYVIHVKQGVYEEYVNVGIKSNNIMITGDGIGKTIITGDKSKGRGFSTYKSATFVAEGDGFVGRDITIRNTAGPENHQAVALRSNSDMSVFYRCSIEGYQDTLYVHSGRQFFRECDIYGTVDFIFGNAAAVLQNCRIFARNPPNGVNTITAQSRFNPNQTTGIVIHNSVVKGAPGVQLGGVKTYLGRPWRSYARTVVIGTYLDTLIEPNGWIDWDNVTALSTLYYGEYQNSGPGSGTENRVDWAGFHVISDIQEAREFTLPKFIDSASWLPPTKVPFTINL

SEQ ID NO: 82393 - protein, 406 aa, Arabidopsis thaliana
  peptide (1)..(406): Ceres Seq. ID no. 12665450
MDLYEQTIHRLNESVLCPKNVCSRSDVQAWLSTALTNLDTCQEEMSELGVSSHSLESITIDVINTLAINKRMEQNGKEFGISKITMKTLSIGEKVDVVVAQDGSGDYKTIQEAVNGAGERLKGSPRYVIHVKQGVYEEYVNVGIKSNNIMITGDGIGKTIITGDKSKGRGFSTYKSATFVAEGDGFVGRDITIRNTAGPENHQAVALRSNSDMSVFYRCSIEGYQDTLYVHSGRQFFRECDIYGTVDFIFGNAAAVLQNCRIFARNPPNGVNTITAQSRFNPNQTTGIVIHNSVVKGAPGVQLGGVKTYLGRPWRSYARTVVIGTYLDTLIEPNGWIDWDNVTALSTLYYGEYQNSGPGSGTENRVDWAGFHVISDIQEAREFTLPKFIDSASWLPPTKVPFTINL

SEQ ID NO: 82394 - DNA, 2784 bp, Arabidopsis thaliana
  misc_feature (1)..(2784): Ceres Seq. ID no. 12665464
  misc_feature (1)..(2784): Ortholog of  Ceres SEQ ID NO 14313575 as cited in SEQ ID NO 58703
atggagaattatggttggaattacccttattacccttacaggcctccgcggcctaatcctccttacccagcaccgcctcatcaccatggatcaatgtctcattcgggtccattagaccaccaccaccctccaatgagttactatgcttcttttgattaccaacaccaacctcctcctccttaccctccagtgagttactatgcttcgttttcaagtcattcagatttatcatactcaggcaggctagattcgtctggtcatggttttacatctaccgcatcgccgcatagtcccggtatgcacattgtgccctttggtaaagcctccttgaaggtcctcttgttgcatggtaatttggatatttgggtttcttgtgctaataatctaccaaacttagatttgtttcataagacattgggtgttgtgtttggtggcatgaccaatatgatcgaaggccagttgagcaagaagatcactagtgatccttacgtgtccatatcagtcgctggtgctgtcataggaagaacatatgtcattagcaacagcgaaaatcctgtctggcagcagcatttttatgtccctgtagctcatcacgctgccgaggtccattttgttgttaaggacagtgatgccgtcggttcacagcttataggaattgttacaatccctgttgaacaaatttactcaggtgcaagaattgaagggacttactccattcgagacagcaatggaaagccttgtaaaccaggggcaactctatcattgtcgattcagtatacttcaatgaataaactcagtgtttatcacagcggagttggtgcaggtccctattaccagggggtgcctggaacatattttcctcttagggaaggtggaagtgtcacattgtaccaagatgcacatgtacctgaagggatgctcccgggaataaaactcggaaatggaatgtgttacgaacatggaaagtgttggcatgatatgtttcatgccatttgtcaagctagacgtttgatttatattacaggctggtcagtgtggcataatgtcaggcttgttcgggataaagaagatccttcttcagaatgtagactaggtgagctcctaagatcaaagtcccaagaaggtgtgagagtcctgcttttggtttgggacgacccaacttcacaaaacatcttgggatacatgaccgatggggttatgggaacccatgacgaggagacacgccgttttttcaaggactcctcagtgcaagtcttgctatgccctcgaaatgctggaaagcgacatagttgggtcaaacagagggaagttggaaccatctatacacaccaccaaaaaaacttaatagtagatgccgatgctgggggtaacagaaggaaaatcgtagcttttgtgggcgggcttgatctatgtgatggccgatatgatactcctcaacatccgttgtttaggacactgcaaacagatcataatggtgactatcacaaccccactttcacgggtaacgtgtccggttgtccaagagaaccttggcatgacttgcacagtaagattgatggcccagctgcgtatgatgtgctgacaaattttgaggagaggtggctgaaggctgctaagcctcacagaatcaataaattgaagacgtcatatgatgatgcactactaaggatcgacaggattccagatatattaagagttttggatgctcctactgttagtgcaaacgaccccgaggcttggcatgttcagattttccggtcaatcgattcaaactctgtgaaaggttttccaaaggatccaaaatatgctacaagcaagaatttggtgtgcggtaagaatgtgctcattgacatgagcatacacaccgcatatgtaaaggccattcgtgcagctcaacacttcatctacatcgagaaccagtatttcattggatcctcctacgactggaatgctcacaaggacataggtgccaacaacctgattcctatggaaattgcgttgaagattgctgataagatcagagcaaaggaacggtttgctgcatatattgtcattccaatgtggccagaaggagttcctaccggcgccgctacacaaagaattctatattggcagcacaagacgatgcaaatgatgtatggaactatctacaatgcgttagtggaggccgggcttgaagatgaatactccccacaagactatttgaatttcttctgtcttggaaaccgagaaatggtgaacggaaataatgaatcgggtacaggaagtgcaagcaacgagaacactcctcagggattatgtcgaaagagcagaagatttatgatatatgttcattcaaaagggatggttgttgatgatgagtatgtggtaattggatctgcaaacataaaccaaagatcaatggaggggacaagagatacagagattgcaatgggagcttaccagcctcaacatacatgggcacgacgacagtcaggtcctcggggtcagatctacggatatagaatgtcgctttgggcagaacacatggcactgctagatgattgctttgtggagccagagagtctagggtgtgtaaggaaagtgagaacagtggcggaggagaactgggaacagtttaggagtgaggaagtgtcggagatgagaggacatctgatgaaatatccggtggaagttgatcggaaaggcaaagtccgaccacttccaggaagtgaggagttccctgatgtcggaggaaacgttgttggatcctttctagccatacaggagaatctcactatctaa

SEQ ID NO: 82395 - protein, 927 aa, Arabidopsis thaliana
  peptide (1)..(927): Ceres Seq. ID no. 12665465
MENYGWNYPYYPYRPPRPNPPYPAPPHHHGSMSHSGPLDHHHPPMSYYASFDYQHQPPPPYPPVSYYASFSSHSDLSYSGRLDSSGHGFTSTASPHSPGMHIVPFGKASLKVLLLHGNLDIWVSCANNLPNLDLFHKTLGVVFGGMTNMIEGQLSKKITSDPYVSISVAGAVIGRTYVISNSENPVWQQHFYVPVAHHAAEVHFVVKDSDAVGSQLIGIVTIPVEQIYSGARIEGTYSIRDSNGKPCKPGATLSLSIQYTSMNKLSVYHSGVGAGPYYQGVPGTYFPLREGGSVTLYQDAHVPEGMLPGIKLGNGMCYEHGKCWHDMFHAICQARRLIYITGWSVWHNVRLVRDKEDPSSECRLGELLRSKSQEGVRVLLLVWDDPTSQNILGYMTDGVMGTHDEETRRFFKDSSVQVLLCPRNAGKRHSWVKQREVGTIYTHHQKNLIVDADAGGNRRKIVAFVGGLDLCDGRYDTPQHPLFRTLQTDHNGDYHNPTFTGNVSGCPREPWHDLHSKIDGPAAYDVLTNFEERWLKAAKPHRINKLKTSYDDALLRIDRIPDILRVLDAPTVSANDPEAWHVQIFRSIDSNSVKGFPKDPKYATSKNLVCGKNVLIDMSIHTAYVKAIRAAQHFIYIENQYFIGSSYDWNAHKDIGANNLIPMEIALKIADKIRAKERFAAYIVIPMWPEGVPTGAATQRILYWQHKTMQMMYGTIYNALVEAGLEDEYSPQDYLNFFCLGNREMVNGNNESGTGSASNENTPQGLCRKSRRFMIYVHSKGMVVDDEYVVIGSANINQRSMEGTRDTEIAMGAYQPQHTWARRQSGPRGQIYGYRMSLWAEHMALLDDCFVEPESLGCVRKVRTVAEENWEQFRSEEVSEMRGHLMKYPVEVDRKGKVRPLPGSEEFPDVGGNVVGSFLAIQENLTI

SEQ ID NO: 82396 - protein, 896 aa, Arabidopsis thaliana
  peptide (1)..(896): Ceres Seq. ID no. 12665466
MSHSGPLDHHHPPMSYYASFDYQHQPPPPYPPVSYYASFSSHSDLSYSGRLDSSGHGFTSTASPHSPGMHIVPFGKASLKVLLLHGNLDIWVSCANNLPNLDLFHKTLGVVFGGMTNMIEGQLSKKITSDPYVSISVAGAVIGRTYVISNSENPVWQQHFYVPVAHHAAEVHFVVKDSDAVGSQLIGIVTIPVEQIYSGARIEGTYSIRDSNGKPCKPGATLSLSIQYTSMNKLSVYHSGVGAGPYYQGVPGTYFPLREGGSVTLYQDAHVPEGMLPGIKLGNGMCYEHGKCWHDMFHAICQARRLIYITGWSVWHNVRLVRDKEDPSSECRLGELLRSKSQEGVRVLLLVWDDPTSQNILGYMTDGVMGTHDEETRRFFKDSSVQVLLCPRNAGKRHSWVKQREVGTIYTHHQKNLIVDADAGGNRRKIVAFVGGLDLCDGRYDTPQHPLFRTLQTDHNGDYHNPTFTGNVSGCPREPWHDLHSKIDGPAAYDVLTNFEERWLKAAKPHRINKLKTSYDDALLRIDRIPDILRVLDAPTVSANDPEAWHVQIFRSIDSNSVKGFPKDPKYATSKNLVCGKNVLIDMSIHTAYVKAIRAAQHFIYIENQYFIGSSYDWNAHKDIGANNLIPMEIALKIADKIRAKERFAAYIVIPMWPEGVPTGAATQRILYWQHKTMQMMYGTIYNALVEAGLEDEYSPQDYLNFFCLGNREMVNGNNESGTGSASNENTPQGLCRKSRRFMIYVHSKGMVVDDEYVVIGSANINQRSMEGTRDTEIAMGAYQPQHTWARRQSGPRGQIYGYRMSLWAEHMALLDDCFVEPESLGCVRKVRTVAEENWEQFRSEEVSEMRGHLMKYPVEVDRKGKVRPLPGSEEFPDVGGNVVGSFLAIQENLTI

SEQ ID NO: 82397 - protein, 883 aa, Arabidopsis thaliana
  peptide (1)..(883): Ceres Seq. ID no. 12665467
MSYYASFDYQHQPPPPYPPVSYYASFSSHSDLSYSGRLDSSGHGFTSTASPHSPGMHIVPFGKASLKVLLLHGNLDIWVSCANNLPNLDLFHKTLGVVFGGMTNMIEGQLSKKITSDPYVSISVAGAVIGRTYVISNSENPVWQQHFYVPVAHHAAEVHFVVKDSDAVGSQLIGIVTIPVEQIYSGARIEGTYSIRDSNGKPCKPGATLSLSIQYTSMNKLSVYHSGVGAGPYYQGVPGTYFPLREGGSVTLYQDAHVPEGMLPGIKLGNGMCYEHGKCWHDMFHAICQARRLIYITGWSVWHNVRLVRDKEDPSSECRLGELLRSKSQEGVRVLLLVWDDPTSQNILGYMTDGVMGTHDEETRRFFKDSSVQVLLCPRNAGKRHSWVKQREVGTIYTHHQKNLIVDADAGGNRRKIVAFVGGLDLCDGRYDTPQHPLFRTLQTDHNGDYHNPTFTGNVSGCPREPWHDLHSKIDGPAAYDVLTNFEERWLKAAKPHRINKLKTSYDDALLRIDRIPDILRVLDAPTVSANDPEAWHVQIFRSIDSNSVKGFPKDPKYATSKNLVCGKNVLIDMSIHTAYVKAIRAAQHFIYIENQYFIGSSYDWNAHKDIGANNLIPMEIALKIADKIRAKERFAAYIVIPMWPEGVPTGAATQRILYWQHKTMQMMYGTIYNALVEAGLEDEYSPQDYLNFFCLGNREMVNGNNESGTGSASNENTPQGLCRKSRRFMIYVHSKGMVVDDEYVVIGSANINQRSMEGTRDTEIAMGAYQPQHTWARRQSGPRGQIYGYRMSLWAEHMALLDDCFVEPESLGCVRKVRTVAEENWEQFRSEEVSEMRGHLMKYPVEVDRKGKVRPLPGSEEFPDVGGNVVGSFLAIQENLTI

SEQ ID NO: 82398 - DNA, 1481 bp, Arabidopsis thaliana
  misc_feature (1)..(1481): Ceres Seq. ID no. 12665475
  misc_feature (1)..(1481): Ortholog of  Ceres SEQ ID NO 14307164 as cited in SEQ ID NO 54775
  misc_feature (1)..(1481): Ortholog of  Ceres SEQ ID NO 13654989 as cited in SEQ ID NO 63117
  misc_feature (1)..(1481): Ortholog of  Ceres SEQ ID NO 13584744 as cited in SEQ ID NO 69137
ggagaagaaaaagttgaaaaaattgtaaagtcagtctctccgactcttccttccttccgtgttcaccattgctacacgttctccacgaactttccgatgcccagtcgtcggagacatagctacaccgtcggatctcctgcaaccacatcttccaattacagtaacactactttcaccgatcgttccttcccgacaacccctgcccgtacatccaccgacacaaccacctccatcgctcgtcgcatctccggtatcttcatcaactgcttcactcctcccgattccgtttcctccaactacatcgacaattcaaagtcctcttccgacaataatatccgtagtagacgtagctcaacaggaagtagtagtgtacagaggagttatggaaatgcaaacgaaacagagcatacaagattcaccttcgatgaaatctacgacgcgaccaagaacttctctccgtcctttaggatcggacaaggcggttttggcactgtttacaaggtcaaactcagagatggcaaaacctttgctgtgaaacgtgccaaaaagagtatgcatgacgaccgtcaaggtgcagatgcagagtttatgagtgagattcagacattagctcaagttactcatttgagtttggttaaatactatggatttgttgttcataacgacgagaagattctcgttgtggagtatgtagccaatggaactcttagagatcacttggattgtaaggaaggaaagactctcgacatggcgactcggttagatatcgcaaccgatgtagctcatgccataacctatcttcacatgtatacacagccacctatcatccacagagatatcaaatcttcaaacattctcctcactgagaattacagagccaaggttgctgatttcgggtttgcaagattagctccagatactgattcaggagccacgcatgtgtcaacacaagtcaaaggaaccgctggttacttagacccagagtacttaacaacgtatcaactcacagagaaaagtgacgtctactcttttggtgtactgctcgtcgagcttctcacaggtcggcgtcccatcgagcttagcagaggacaaaaagaacgcatcaccattagatgggcgatcaagaagttcacgagtggagatacgatatcggtattggacccgaagctagaacagaattcagcgaacaacttagcattagagaaggtattggagatggcgtttcaatgtctagctcctcatagacgttcgagaccaagcatgaaaaaatgcagtgagattttgtggggaattcgtaaagattacagagagttgctcaacacaagtctttgatgatattattctctacgcttatataatatggttttgaatacacaattatatattatttgtttgaatattaatttgtcatacacgatgcattcttgtacgagaattgttgatttgtaattgattttgaaatttgtagtattatattaacg

SEQ ID NO: 82399 - protein, 443 aa, Arabidopsis thaliana
  peptide (1)..(443): Ceres Seq. ID no. 12665476
GEEKVEKIVKSVSPTLPSFRVHHCYTFSTNFPMPSRRRHSYTVGSPATTSSNYSNTTFTDRSFPTTPARTSTDTTTSIARRISGIFINCFTPPDSVSSNYIDNSKSSSDNNIRSRRSSTGSSSVQRSYGNANETEHTRFTFDEIYDATKNFSPSFRIGQGGFGTVYKVKLRDGKTFAVKRAKKSMHDDRQGADAEFMSEIQTLAQVTHLSLVKYYGFVVHNDEKILVVEYVANGTLRDHLDCKEGKTLDMATRLDIATDVAHAITYLHMYTQPPIIHRDIKSSNILLTENYRAKVADFGFARLAPDTDSGATHVSTQVKGTAGYLDPEYLTTYQLTEKSDVYSFGVLLVELLTGRRPIELSRGQKERITIRWAIKKFTSGDTISVLDPKLEQNSANNLALEKVLEMAFQCLAPHRRSRPSMKKCSEILWGIRKDYRELLNTSL

SEQ ID NO: 82400 - protein, 411 aa, Arabidopsis thaliana
  peptide (1)..(411): Ceres Seq. ID no. 12665477
MPSRRRHSYTVGSPATTSSNYSNTTFTDRSFPTTPARTSTDTTTSIARRISGIFINCFTPPDSVSSNYIDNSKSSSDNNIRSRRSSTGSSSVQRSYGNANETEHTRFTFDEIYDATKNFSPSFRIGQGGFGTVYKVKLRDGKTFAVKRAKKSMHDDRQGADAEFMSEIQTLAQVTHLSLVKYYGFVVHNDEKILVVEYVANGTLRDHLDCKEGKTLDMATRLDIATDVAHAITYLHMYTQPPIIHRDIKSSNILLTENYRAKVADFGFARLAPDTDSGATHVSTQVKGTAGYLDPEYLTTYQLTEKSDVYSFGVLLVELLTGRRPIELSRGQKERITIRWAIKKFTSGDTISVLDPKLEQNSANNLALEKVLEMAFQCLAPHRRSRPSMKKCSEILWGIRKDYRELLNTSL

SEQ ID NO: 82401 - protein, 259 aa, Arabidopsis thaliana
  peptide (1)..(259): Ceres Seq. ID no. 12665478
MHDDRQGADAEFMSEIQTLAQVTHLSLVKYYGFVVHNDEKILVVEYVANGTLRDHLDCKEGKTLDMATRLDIATDVAHAITYLHMYTQPPIIHRDIKSSNILLTENYRAKVADFGFARLAPDTDSGATHVSTQVKGTAGYLDPEYLTTYQLTEKSDVYSFGVLLVELLTGRRPIELSRGQKERITIRWAIKKFTSGDTISVLDPKLEQNSANNLALEKVLEMAFQCLAPHRRSRPSMKKCSEILWGIRKDYRELLNTSL

SEQ ID NO: 82402 - DNA, 1422 bp, Arabidopsis thaliana
  misc_feature (1)..(1422): Ceres Seq. ID no. 12665495
  misc_feature (1)..(1422): Ortholog of  Ceres SEQ ID NO 13574398 as cited in SEQ ID NO 0
atggagaatttatcgaatccagatgaaaacgacgatcatcaatcacctagatccattgaccaaaatgatcaatcagcagtagaaactccggtttactcgacgatgagcatagattcctttgtttaccctcgaacttgttcagagaccacttcagggttttcagaccagatagatgaaaccaacagcttctgtagtgaagcttctccttgtaactggcctgtccttactgaatctaagagctccaaatgtctctctggtttagagatgcaatcaaatgaatgtcttgtagtccaagaaatttctgaaccagaacttgagacaatgaaggaaagattcgctaagcttctacttggagaagatatgtcagggagtggtaaaggagtttgcactgcagtgactatctcaaacgcaattaccaatctttatgctacagtgtttggacagaatctgaggttagagccgttagaaacagagaagagagcattgtggaagagagaaatgaattgtcttttatctgtatgcgattacattgtcgaattcatccctagatgtcagaatctaagcaatggagctactgttgaggtgatggagagtagaccaagagcagatatctatatcaacttgcctgcattgagaaagctagattcaatgcttatggaagcattggatagttttcagaacacagagttttggtatgcagaagaaggaagtttatcgatgaaatcagctcgttcttcgactggatcattcaggaaagttatagtacaaaggaaagaagagaaatggtggttaccagttcctctagtaccatcagaaggtttgtcagataaagccagaaaacaactcaagaacaagagagaaagtaccaatcagattcataaagctgcaatggctatcaacagtagcattctcagtgaaatggagattccagactcttacatgacaactcttccaaagtgtggtaaaagcagtgttggagattcaatttaccgttacatgagtggttctggtcggtttttcccagagcaactcttagattgtctgaacatatcttccgaacatgaagctgttcagttagcagatagagtagaagcttcgatgtacacatggagacgcaaatcttgtcttagtaactccaagaactcatggaacatggtgaaagatcttatgtcaactacagagagaacagacaagaactatgttatggctgagagagctgagactctcctcttctgtttgaaacagcgttatccagaattgtctcagacatcattagatatatgcaagattcagtacaataaggatgttggaaaagctgtgttggagagctactcaagagtacttgaaggtttagcttttaacatagttgcttggattgatgatgttctctatgtagacaaaaccatgagaggtagtgaataa

SEQ ID NO: 82403 - protein, 473 aa, Arabidopsis thaliana
  peptide (1)..(473): Ceres Seq. ID no. 12665496
MENLSNPDENDDHQSPRSIDQNDQSAVETPVYSTMSIDSFVYPRTCSETTSGFSDQIDETNSFCSEASPCNWPVLTESKSSKCLSGLEMQSNECLVVQEISEPELETMKERFAKLLLGEDMSGSGKGVCTAVTISNAITNLYATVFGQNLRLEPLETEKRALWKREMNCLLSVCDYIVEFIPRCQNLSNGATVEVMESRPRADIYINLPALRKLDSMLMEALDSFQNTEFWYAEEGSLSMKSARSSTGSFRKVIVQRKEEKWWLPVPLVPSEGLSDKARKQLKNKRESTNQIHKAAMAINSSILSEMEIPDSYMTTLPKCGKSSVGDSIYRYMSGSGRFFPEQLLDCLNISSEHEAVQLADRVEASMYTWRRKSCLSNSKNSWNMVKDLMSTTERTDKNYVMAERAETLLFCLKQRYPELSQTSLDICKIQYNKDVGKAVLESYSRVLEGLAFNIVAWIDDVLYVDKTMRGSE

SEQ ID NO: 82404 - protein, 439 aa, Arabidopsis thaliana
  peptide (1)..(439): Ceres Seq. ID no. 12665497
MSIDSFVYPRTCSETTSGFSDQIDETNSFCSEASPCNWPVLTESKSSKCLSGLEMQSNECLVVQEISEPELETMKERFAKLLLGEDMSGSGKGVCTAVTISNAITNLYATVFGQNLRLEPLETEKRALWKREMNCLLSVCDYIVEFIPRCQNLSNGATVEVMESRPRADIYINLPALRKLDSMLMEALDSFQNTEFWYAEEGSLSMKSARSSTGSFRKVIVQRKEEKWWLPVPLVPSEGLSDKARKQLKNKRESTNQIHKAAMAINSSILSEMEIPDSYMTTLPKCGKSSVGDSIYRYMSGSGRFFPEQLLDCLNISSEHEAVQLADRVEASMYTWRRKSCLSNSKNSWNMVKDLMSTTERTDKNYVMAERAETLLFCLKQRYPELSQTSLDICKIQYNKDVGKAVLESYSRVLEGLAFNIVAWIDDVLYVDKTMRGSE

SEQ ID NO: 82405 - protein, 385 aa, Arabidopsis thaliana
  peptide (1)..(385): Ceres Seq. ID no. 12665498
MQSNECLVVQEISEPELETMKERFAKLLLGEDMSGSGKGVCTAVTISNAITNLYATVFGQNLRLEPLETEKRALWKREMNCLLSVCDYIVEFIPRCQNLSNGATVEVMESRPRADIYINLPALRKLDSMLMEALDSFQNTEFWYAEEGSLSMKSARSSTGSFRKVIVQRKEEKWWLPVPLVPSEGLSDKARKQLKNKRESTNQIHKAAMAINSSILSEMEIPDSYMTTLPKCGKSSVGDSIYRYMSGSGRFFPEQLLDCLNISSEHEAVQLADRVEASMYTWRRKSCLSNSKNSWNMVKDLMSTTERTDKNYVMAERAETLLFCLKQRYPELSQTSLDICKIQYNKDVGKAVLESYSRVLEGLAFNIVAWIDDVLYVDKTMRGSE

SEQ ID NO: 82406 - DNA, 702 bp, Arabidopsis thaliana
  misc_feature (1)..(702): Ceres Seq. ID no. 12665522
  misc_feature (1)..(702): Ortholog of  Ceres SEQ ID NO 12582251 as cited in SEQ ID NO 55724
atgtttgtggatgcaatgcaagatttagctctagtcaatagtgccttgtctaagagaaacagaaagaagattttggtttcgcataaaaactccaatattgacatctctggagaaactttacaatgcctaaggccgaatcaatggcttaacgatgatgtcactaatctctatctggagttgctgaaagagagacaaactagagatccgcaaaagtacttcaagtgtcatttcttcaataccttcttttacgttaagctcgtaagcggctccggttacaattacaaagctgtcagtagatggactaccaagagaaagcttggatatgatcttattgactgtgacataatatttgttccaatccacatagatatacattggaccctgggagtgattaacaatagggaacgcaagttcgtgtatcttgattcattatttactggagcaaagtacttggtggatgaagtaaaacaaaagagtcaaaagaatattgacgttagttcatggggaatggaatacgttgaagaacgtcctcagcaacagaacgggtacgactgtgggatgtttatgcttaaatacattgatttttacagtagaggattgagtctacaatttagccaggtaataagagatgtcatcaagaaagacatgccgtacttcaggttaagaacagctaaggagatactgagactgcgagctgactaa

SEQ ID NO: 82407 - protein, 233 aa, Arabidopsis thaliana
  peptide (1)..(233): Ceres Seq. ID no. 12665523
MFVDAMQDLALVNSALSKRNRKKILVSHKNSNIDISGETLQCLRPNQWLNDDVTNLYLELLKERQTRDPQKYFKCHFFNTFFYVKLVSGSGYNYKAVSRWTTKRKLGYDLIDCDIIFVPIHIDIHWTLGVINNRERKFVYLDSLFTGAKYLVDEVKQKSQKNIDVSSWGMEYVEERPQQQNGYDCGMFMLKYIDFYSRGLSLQFSQVIRDVIKKDMPYFRLRTAKEILRLRAD

SEQ ID NO: 82408 - protein, 228 aa, Arabidopsis thaliana
  peptide (1)..(228): Ceres Seq. ID no. 12665524
MQDLALVNSALSKRNRKKILVSHKNSNIDISGETLQCLRPNQWLNDDVTNLYLELLKERQTRDPQKYFKCHFFNTFFYVKLVSGSGYNYKAVSRWTTKRKLGYDLIDCDIIFVPIHIDIHWTLGVINNRERKFVYLDSLFTGAKYLVDEVKQKSQKNIDVSSWGMEYVEERPQQQNGYDCGMFMLKYIDFYSRGLSLQFSQVIRDVIKKDMPYFRLRTAKEILRLRAD

SEQ ID NO: 82409 - DNA, 792 bp, Arabidopsis thaliana
  misc_feature (1)..(792): Ceres Seq. ID no. 12665561
  misc_feature (1)..(792): Ortholog of  Ceres SEQ ID NO 14305022 as cited in SEQ ID NO 53586
  misc_feature (1)..(792): Ortholog of  Ceres SEQ ID NO 12506279 as cited in SEQ ID NO 55440
  misc_feature (1)..(792): Ortholog of  Ceres SEQ ID NO 13654847 as cited in SEQ ID NO 62459
  misc_feature (1)..(792): Ortholog of  Ceres SEQ ID NO 15174357 as cited in SEQ ID NO 0
atgggtgtactcacgaacaaagtcgagagagacgagcttaaacctggtgatcacatctacacttatcgagccgtcttcgcttattctcaccacggcgtatttgttggtggttgcaaagtggttcatttcaaacctgagcacagcttgatatctcctacactcgcttcttcttcttcttcttcgtcttcttcagtttcagaggttaatgattcttcagaagctccttgtcctacatatcctgactgtggatataaacgaccaaagagtggagtagtactttcttgcctagactgctttctcaagaaaggttctctctaccgttttgattatggagtcagctcatcgattttcctcaccagattccgcggtggcacgtgcacaactgctccatctgacccgcttcaaacagtcatccatagagcaatgcaccttctccaaaacggatttggtaactacaatgtcttccagaataactgcgaagattttgctctctactgcaagacaggattgctcattctggataagaacggggttgggagaagtggtcaagccagttctatcataggtgctcctctagctgcactactctcgtcacctctcacattgttgattccaaatcctgttggtgtagcaactgtcactgctgggatgtattgtatgagtaggtatgctactgatatcggtgttagaaacgatgtgatcaaggttcctgttgaggatttagctctgaaccttggccttaaacctctcaagagaaaaaggaaagcttgtgacaccagcatttccaggtga

SEQ ID NO: 82410 - protein, 263 aa, Arabidopsis thaliana
  peptide (1)..(263): Ceres Seq. ID no. 12665562
MGVLTNKVERDELKPGDHIYTYRAVFAYSHHGVFVGGCKVVHFKPEHSLISPTLASSSSSSSSSVSEVNDSSEAPCPTYPDCGYKRPKSGVVLSCLDCFLKKGSLYRFDYGVSSSIFLTRFRGGTCTTAPSDPLQTVIHRAMHLLQNGFGNYNVFQNNCEDFALYCKTGLLILDKNGVGRSGQASSIIGAPLAALLSSPLTLLIPNPVGVATVTAGMYCMSRYATDIGVRNDVIKVPVEDLALNLGLKPLKRKRKACDTSISR

SEQ ID NO: 82411 - DNA, 2091 bp, Arabidopsis thaliana
  misc_feature (1)..(2091): Ceres Seq. ID no. 12665579
  misc_feature (1)..(2091): Ortholog of  Ceres SEQ ID NO 14313674 as cited in SEQ ID NO 59602
atggcttttggccgcaacaatcgtgtaaggttcagagattggatttcagagggaacagagtatggttacggaagaaataaagctagaccatctctaaacacagttttgaagaatgttcgtagaggacttaagaaacctttaagttttggttcacataataagaagagagattctaattctagtaccactacacagaagaatattataaacccacaaggatcttttttacagaactggaacaaaatctttctttttgcttcagtgattgctttggctattgatccattgtttttctatattcctattgttgatggagaaagacactgtcttaatttgcatcgtaacttggagatagcagctagtgtgcttcgcacgtttatagatgctttctacatcattcacattgtgtttcagtttagaactgcttatatctctccttcttctcgtgttttcggaagaggcgagttggttgatgatcctaaagctatagccatcaagtacctctcctcctacttcatcatcgatcttctttctatccttccactcccacagcttgtagtcttagctgtcatccccaatgtcaacaagccggtctctttgatcactaaggactatttgataactgtcatatttactcaatacattccaaggattcttcgtatctatccactttacactgaagttacaagaacatctggcatagttactgaaaccgcttgggctggagctgcttggaacctatctctctatatgttagccagtcatgtgtttggagccttatggtacttaatatcagtagaacgagaagacagatgctggcgtgaagcttgtgagaagataccagaagtgtgtaactttagatttctctactgcgatggaaacagtagtgttagaaacgatttcctgactacctcgtgcccgtttatcaaccctgatgatataacaaattcaactgtcttcaactttggtatctttactgatgctttaaagagtgggattgttgaatcagatgatttctggaagaagttcttctactgcttctggtggggtttgcgtaatttaagtgcattgggacaaaatctcaatacaagcaaattcgttggggaaatcatatttgctgtatcaatttgtatatctggactagtcttattcgcactacttatcggcaatatgcagaaatacttggaatcaactacagtgagggaagaggagatgagagtgagaaaaagagatgcagagcaatggatgtctcatcgaatgttacccgatgacttgaggaaacgtatcagaaggtatgagcagtacaaatggcaggaaactagaggagtagaagaagaaaaccttctgcgtaatctccctaaagacctcaggagagacatcaaacgccatttctgcctcgatcttctcaagaaagtacctctgttcgagataatggatgagcaattgctagatgccgtgtgtgacaagctaaaaccagtgctctacaccgagaacagctatgcaattcgagaaggagatccagtggaagagatgttgtttgtcatgagaggaaaactgatgagcgccaccacaaacggtggccggaccggcttctttaacgccgtatacctaaaacctagtgacttttgcggcgaagatcttctcacatgggcattagatcctcaatcttcgtctcattttccgatatcgactagaacagttcaagctttaaccgaagtagaagcctttgctcttgcagcagatgatctcaagcttgttgcttcacagttcagacgactacatagcaaacagcttcaacatactttcaggttttattcggttcaatggagaacttggggtgcgtctttcatacaagcggcgtggcggagacattgccggaggaaactagctagatcattaaccgaagaagaagatcgattccgaaacgcgatcacaaaacgcgaacgcaatgcggcgtcttcgtctagcctggttgcaacgttatacgcgtcgcggtttgcttcaaacgcgcttcgcaatctgcgtacaaacaacctacctttgctacctcctaaaccctccgagcctgatttcagtctccgaaacccttaa

SEQ ID NO: 82412 - protein, 696 aa, Arabidopsis thaliana
  peptide (1)..(696): Ceres Seq. ID no. 12665580
MAFGRNNRVRFRDWISEGTEYGYGRNKARPSLNTVLKNVRRGLKKPLSFGSHNKKRDSNSSTTTQKNIINPQGSFLQNWNKIFLFASVIALAIDPLFFYIPIVDGERHCLNLHRNLEIAASVLRTFIDAFYIIHIVFQFRTAYISPSSRVFGRGELVDDPKAIAIKYLSSYFIIDLLSILPLPQLVVLAVIPNVNKPVSLITKDYLITVIFTQYIPRILRIYPLYTEVTRTSGIVTETAWAGAAWNLSLYMLASHVFGALWYLISVEREDRCWREACEKIPEVCNFRFLYCDGNSSVRNDFLTTSCPFINPDDITNSTVFNFGIFTDALKSGIVESDDFWKKFFYCFWWGLRNLSALGQNLNTSKFVGEIIFAVSICISGLVLFALLIGNMQKYLESTTVREEEMRVRKRDAEQWMSHRMLPDDLRKRIRRYEQYKWQETRGVEEENLLRNLPKDLRRDIKRHFCLDLLKKVPLFEIMDEQLLDAVCDKLKPVLYTENSYAIREGDPVEEMLFVMRGKLMSATTNGGRTGFFNAVYLKPSDFCGEDLLTWALDPQSSSHFPISTRTVQALTEVEAFALAADDLKLVASQFRRLHSKQLQHTFRFYSVQWRTWGASFIQAAWRRHCRRKLARSLTEEEDRFRNAITKRERNAASSSSLVATLYASRFASNALRNLRTNNLPLLPPKPSEPDFSLRNP

SEQ ID NO: 82413 - protein, 446 aa, Arabidopsis thaliana
  peptide (1)..(446): Ceres Seq. ID no. 12665581
MLASHVFGALWYLISVEREDRCWREACEKIPEVCNFRFLYCDGNSSVRNDFLTTSCPFINPDDITNSTVFNFGIFTDALKSGIVESDDFWKKFFYCFWWGLRNLSALGQNLNTSKFVGEIIFAVSICISGLVLFALLIGNMQKYLESTTVREEEMRVRKRDAEQWMSHRMLPDDLRKRIRRYEQYKWQETRGVEEENLLRNLPKDLRRDIKRHFCLDLLKKVPLFEIMDEQLLDAVCDKLKPVLYTENSYAIREGDPVEEMLFVMRGKLMSATTNGGRTGFFNAVYLKPSDFCGEDLLTWALDPQSSSHFPISTRTVQALTEVEAFALAADDLKLVASQFRRLHSKQLQHTFRFYSVQWRTWGASFIQAAWRRHCRRKLARSLTEEEDRFRNAITKRERNAASSSSLVATLYASRFASNALRNLRTNNLPLLPPKPSEPDFSLRNP

SEQ ID NO: 82414 - DNA, 729 bp, Arabidopsis thaliana
  misc_feature (1)..(729): Ceres Seq. ID no. 12665603
  misc_feature (1)..(729): Ortholog of  Ceres SEQ ID NO 13597809 as cited in SEQ ID NO 64598
  misc_feature (1)..(729): Ortholog of  Ceres SEQ ID NO 12617960 as cited in SEQ ID NO 69051
  misc_feature (1)..(729): Ortholog of  Ceres SEQ ID NO 13589401 as cited in SEQ ID NO 0
atggaggaggagaagctagaaatcgtcgggcctttggaggagccgttgatgggaaacatcgtaccagaggagatcaatggcttggattcgcttacgtcgtcggattctgatagcgagaaaccagattcccccgttcccataaatgctccgatctaccggatgtttggaagagaacgaccaattcacatggttctcggcggagctgctgatgtgttgctatggagagacaagaaggtcacgttaggattactcagtgcagtgactgtgatttggcttttgtttggatttggtggtcgtcgtcttctcacatctctttgtcgtggatccattctctttctgcttctatcattcctctggtccaatgccctcaacaaatctccagagaacatgatggatatttacatacctgagaagccattactccaagctgcttctgcgatgacatttgagcttaattgtgcttttgcaaccttaaggagcattgctttagaaagagacatcaagaactttgtaatggcagtcataggactttggctagtatcggtcatcggaaactggttcagcttcttgtcattgctctacatttgttttgtactaattcacacggtgccaatgctttatgagaagtatgaagatgagattgatccaattgcagagaaggctgtgattgagatgaagaaacattaccaagtttttgaagctaagtttttaagtaagatccctcattag

SEQ ID NO: 82415 - protein, 242 aa, Arabidopsis thaliana
  peptide (1)..(242): Ceres Seq. ID no. 12665604
MEEEKLEIVGPLEEPLMGNIVPEEINGLDSLTSSDSDSEKPDSPVPINAPIYRMFGRERPIHMVLGGAADVLLWRDKKVTLGLLSAVTVIWLLFGFGGRRLLTSLCRGSILFLLLSFLWSNALNKSPENMMDIYIPEKPLLQAASAMTFELNCAFATLRSIALERDIKNFVMAVIGLWLVSVIGNWFSFLSLLYICFVLIHTVPMLYEKYEDEIDPIAEKAVIEMKKHYQVFEAKFLSKIPH

SEQ ID NO: 82416 - protein, 226 aa, Arabidopsis thaliana
  peptide (1)..(226): Ceres Seq. ID no. 12665605
MGNIVPEEINGLDSLTSSDSDSEKPDSPVPINAPIYRMFGRERPIHMVLGGAADVLLWRDKKVTLGLLSAVTVIWLLFGFGGRRLLTSLCRGSILFLLLSFLWSNALNKSPENMMDIYIPEKPLLQAASAMTFELNCAFATLRSIALERDIKNFVMAVIGLWLVSVIGNWFSFLSLLYICFVLIHTVPMLYEKYEDEIDPIAEKAVIEMKKHYQVFEAKFLSKIPH

SEQ ID NO: 82417 - protein, 189 aa, Arabidopsis thaliana
  peptide (1)..(189): Ceres Seq. ID no. 12665606
MFGRERPIHMVLGGAADVLLWRDKKVTLGLLSAVTVIWLLFGFGGRRLLTSLCRGSILFLLLSFLWSNALNKSPENMMDIYIPEKPLLQAASAMTFELNCAFATLRSIALERDIKNFVMAVIGLWLVSVIGNWFSFLSLLYICFVLIHTVPMLYEKYEDEIDPIAEKAVIEMKKHYQVFEAKFLSKIPH

SEQ ID NO: 82418 - DNA, 1116 bp, Arabidopsis thaliana
  misc_feature (1)..(1116): Ceres Seq. ID no. 12665618
  misc_feature (1)..(1116): Ortholog of  Ceres SEQ ID NO 14316382 as cited in SEQ ID NO 57756
atgttattggtttgctcattgtttcagattactaactttgtttcttctttctgtgtgttttcagttgatatgagccaacaacgtacacgctctcggaacccgttcaagattctgtttacgaagaagaacaatgctcgattatcgccaaagcttctctcactgttgaacaatttcgagactaacttgacggtatcgattagagaacttgtaccaaaggataagaatgatatcgttagtgtttcttggatgatacaagccatgcagtctctttgtgagacacacaagagtatcaggacgctcgtgaaggatttagaggttccagtatcggatttggaggagaatttcatttatatcttctctgactttagcttgaagcgggaactctgcaacgcctttacctcagagatatatcatttggaacatggcaatctattactaaagtttgcttttagtaagctggagacaaacagtggcaatattcttcagcgttggaatcagcacatggtttccaagaacccgagtatcgaaaactggggcgcggttttgagtaggctggttgaatcgatggatcatcatcatcatatctccaagaaggggaagaagaaatactctgcggaaggaaaagttctcttacgagttttatacggtgtaaaggtcaagactttatacatattcagcgtgtttgatgcatcgttctcgggttcttccaagaatctcttctatctaaccattccaaaggagatggaggagcttccatgggttcaagctttcatggaactgcagaacactattaacccggagatcaaaaacacatttttatcagacggattcacggttataaaagatctcgaggctgttgaaaccggtgtgaagaagctttacacagcggtacaagaagggtcggttcctattttgttagtggaaccattggagaagtcagtgatagaactttcggaaaggtttgagctagtctccaaggaaacacgttgcttgtcgaagatggtgatctctgcccgagacgcattgttggagagcctgtggacgaaatgcgcagaagagctaggagtgacattgccaacgatggttaaaagtgttaatatagaggaaaagagctaa

SEQ ID NO: 82419 - protein, 371 aa, Arabidopsis thaliana
  peptide (1)..(371): Ceres Seq. ID no. 12665619
MLLVCSLFQITNFVSSFCVFSVDMSQQRTRSRNPFKILFTKKNNARLSPKLLSLLNNFETNLTVSIRELVPKDKNDIVSVSWMIQAMQSLCETHKSIRTLVKDLEVPVSDLEENFIYIFSDFSLKRELCNAFTSEIYHLEHGNLLLKFAFSKLETNSGNILQRWNQHMVSKNPSIENWGAVLSRLVESMDHHHHISKKGKKKYSAEGKVLLRVLYGVKVKTLYIFSVFDASFSGSSKNLFYLTIPKEMEELPWVQAFMELQNTINPEIKNTFLSDGFTVIKDLEAVETGVKKLYTAVQEGSVPILLVEPLEKSVIELSERFELVSKETRCLSKMVISARDALLESLWTKCAEELGVTLPTMVKSVNIEEKS

SEQ ID NO: 82420 - protein, 348 aa, Arabidopsis thaliana
  peptide (1)..(348): Ceres Seq. ID no. 12665620
MSQQRTRSRNPFKILFTKKNNARLSPKLLSLLNNFETNLTVSIRELVPKDKNDIVSVSWMIQAMQSLCETHKSIRTLVKDLEVPVSDLEENFIYIFSDFSLKRELCNAFTSEIYHLEHGNLLLKFAFSKLETNSGNILQRWNQHMVSKNPSIENWGAVLSRLVESMDHHHHISKKGKKKYSAEGKVLLRVLYGVKVKTLYIFSVFDASFSGSSKNLFYLTIPKEMEELPWVQAFMELQNTINPEIKNTFLSDGFTVIKDLEAVETGVKKLYTAVQEGSVPILLVEPLEKSVIELSERFELVSKETRCLSKMVISARDALLESLWTKCAEELGVTLPTMVKSVNIEEKS

SEQ ID NO: 82421 - protein, 289 aa, Arabidopsis thaliana
  peptide (1)..(289): Ceres Seq. ID no. 12665621
MIQAMQSLCETHKSIRTLVKDLEVPVSDLEENFIYIFSDFSLKRELCNAFTSEIYHLEHGNLLLKFAFSKLETNSGNILQRWNQHMVSKNPSIENWGAVLSRLVESMDHHHHISKKGKKKYSAEGKVLLRVLYGVKVKTLYIFSVFDASFSGSSKNLFYLTIPKEMEELPWVQAFMELQNTINPEIKNTFLSDGFTVIKDLEAVETGVKKLYTAVQEGSVPILLVEPLEKSVIELSERFELVSKETRCLSKMVISARDALLESLWTKCAEELGVTLPTMVKSVNIEEKS

SEQ ID NO: 82422 - DNA, 1086 bp, Arabidopsis thaliana
  misc_feature (1)..(1086): Ceres Seq. ID no. 12665631
  misc_feature (1)..(1086): Ortholog of  Ceres SEQ ID NO 13595351 as cited in SEQ ID NO 55934
  misc_feature (1)..(1086): Ortholog of  Ceres SEQ ID NO 13639645 as cited in SEQ ID NO 57488
atgggttttatcgatggaaagtgggcaccaatgatagtcttaattgtttctaacatgattgcgggaatggttaatgctttagttaagaaagttcttgatggaggcatcaatcatatggttattgctacttatcgtttgggtatatctactcttttccttcttccagtcgcttatttttgggaacggaaaacaagaccaaagctaactctaagcatctcatgtcagcttttcgtcagtgccctttttggggcgagcttgatgcaatatttctacttgcttggactgtcctacacgtctgcaacgctgggatctgctttctgggccataatgccttccctcactttcgttatggctttaatatttgggttcgaaaagctaagtttgaaaacaaaaataggatacggtgtcgttcttggaactttgataagcttagtaggaggtttacttcttactatgtatcaagggattccattaacaaactctccagaacaagcagcaaattcaaataaccacacaggacatgagaattggatcaaaggttgtttctttttattgaccggagttgttcttttcagttcttggatgcttatacaagccaagatcaacgtgaaatacccttgtccatactcgagtaccgttattttgtcggtctttggtacgcttcaatgcgcccttcttagtttaattaagactagacatttggaagattggatccttagagatgagcttaccatcatcaccgtcgttatagcgggagtggttgcacaaggtatgtgtacggtgggcatgtcgtggtgtatcaaacaacaaggacctgtcgtttcctcatcatttagtcctgtcgtgcttatgtctgcaaccgtgttcgatttcttgattcttcatcgtgagatttatttgggaagcgttattggatctgtggtggttgtgatcggtttatatatatttctatggagtaggagtaagcaaatagtagagtgtaagatcatgaagttgcctaccaatacggtggaagaagaaaaggaagaggaaggccgtacaaatgttaacaacggtcaacttttggttattccgatgactccttga

SEQ ID NO: 82423 - protein, 361 aa, Arabidopsis thaliana
  peptide (1)..(361): Ceres Seq. ID no. 12665632
MGFIDGKWAPMIVLIVSNMIAGMVNALVKKVLDGGINHMVIATYRLGISTLFLLPVAYFWERKTRPKLTLSISCQLFVSALFGASLMQYFYLLGLSYTSATLGSAFWAIMPSLTFVMALIFGFEKLSLKTKIGYGVVLGTLISLVGGLLLTMYQGIPLTNSPEQAANSNNHTGHENWIKGCFFLLTGVVLFSSWMLIQAKINVKYPCPYSSTVILSVFGTLQCALLSLIKTRHLEDWILRDELTIITVVIAGVVAQGMCTVGMSWCIKQQGPVVSSSFSPVVLMSATVFDFLILHREIYLGSVIGSVVVVIGLYIFLWSRSKQIVECKIMKLPTNTVEEEKEEEGRTNVNNGQLLVIPMTP

SEQ ID NO: 82424 - protein, 351 aa, Arabidopsis thaliana
  peptide (1)..(351): Ceres Seq. ID no. 12665633
MIVLIVSNMIAGMVNALVKKVLDGGINHMVIATYRLGISTLFLLPVAYFWERKTRPKLTLSISCQLFVSALFGASLMQYFYLLGLSYTSATLGSAFWAIMPSLTFVMALIFGFEKLSLKTKIGYGVVLGTLISLVGGLLLTMYQGIPLTNSPEQAANSNNHTGHENWIKGCFFLLTGVVLFSSWMLIQAKINVKYPCPYSSTVILSVFGTLQCALLSLIKTRHLEDWILRDELTIITVVIAGVVAQGMCTVGMSWCIKQQGPVVSSSFSPVVLMSATVFDFLILHREIYLGSVIGSVVVVIGLYIFLWSRSKQIVECKIMKLPTNTVEEEKEEEGRTNVNNGQLLVIPMTP

SEQ ID NO: 82425 - protein, 343 aa, Arabidopsis thaliana
  peptide (1)..(343): Ceres Seq. ID no. 12665634
MIAGMVNALVKKVLDGGINHMVIATYRLGISTLFLLPVAYFWERKTRPKLTLSISCQLFVSALFGASLMQYFYLLGLSYTSATLGSAFWAIMPSLTFVMALIFGFEKLSLKTKIGYGVVLGTLISLVGGLLLTMYQGIPLTNSPEQAANSNNHTGHENWIKGCFFLLTGVVLFSSWMLIQAKINVKYPCPYSSTVILSVFGTLQCALLSLIKTRHLEDWILRDELTIITVVIAGVVAQGMCTVGMSWCIKQQGPVVSSSFSPVVLMSATVFDFLILHREIYLGSVIGSVVVVIGLYIFLWSRSKQIVECKIMKLPTNTVEEEKEEEGRTNVNNGQLLVIPMTP

SEQ ID NO: 82426 - DNA, 759 bp, Arabidopsis thaliana
  misc_feature (1)..(759): Ceres Seq. ID no. 12665639
  misc_feature (1)..(759): Ortholog of  Ceres SEQ ID NO 13655598 as cited in SEQ ID NO 64077
  misc_feature (1)..(759): Ortholog of  Ceres SEQ ID NO 15179351 as cited in SEQ ID NO 0
  misc_feature (1)..(759): Ortholog of  Ceres SEQ ID NO 15180408 as cited in SEQ ID NO 0
atgcctatcaacagaattgcgattggaacgccgggggaagctagtcgtcccgatgcgattagagcagctttcgcggagtttttctcgatggttatattcgttttcgcgggtcaaggctctggaatggcttatggaaaactaactggagatggtccagccacacctgccggtcttgtggccgcgtctttgtctcatgcgtttgcgttgttcgttgcggtttccgttggagctaacgtttcaggtggtcatgtgaacccggcggttacatttggggcttttattggtggaaacataacgttgttgagagctattctttattggatcgctcaattactcggagcagtcgtagcttgcttgttgctcaaggtaagcactggcgggatggaaacggctgcgttttcgctatcatatggagtgacgccctggaacgcagtcgttttcgagattgtgatgacgtttgggttagtttacacggtttacgctactgccgtggatcccaagaaaggtgatattggaatcattgcgcctttggcgattgggttaatcgttggagctaacattctggttggtggtgctttcgacggtgcatcgatgaaccccgcggtttcatttggtccggccgtggttagctggatttggacgaatcattgggtctattgggttggtccttttatcggtgcagccattgcagctattgtttatgatactatctttatcggtagtaatggacatgaaccacttccttctaatgatttctaa

SEQ ID NO: 82427 - protein, 252 aa, Arabidopsis thaliana
  peptide (1)..(252): Ceres Seq. ID no. 12665640
MPINRIAIGTPGEASRPDAIRAAFAEFFSMVIFVFAGQGSGMAYGKLTGDGPATPAGLVAASLSHAFALFVAVSVGANVSGGHVNPAVTFGAFIGGNITLLRAILYWIAQLLGAVVACLLLKVSTGGMETAAFSLSYGVTPWNAVVFEIVMTFGLVYTVYATAVDPKKGDIGIIAPLAIGLIVGANILVGGAFDGASMNPAVSFGPAVVSWIWTNHWVYWVGPFIGAAIAAIVYDTIFIGSNGHEPLPSNDF

SEQ ID NO: 82428 - protein, 223 aa, Arabidopsis thaliana
  peptide (1)..(223): Ceres Seq. ID no. 12665641
MVIFVFAGQGSGMAYGKLTGDGPATPAGLVAASLSHAFALFVAVSVGANVSGGHVNPAVTFGAFIGGNITLLRAILYWIAQLLGAVVACLLLKVSTGGMETAAFSLSYGVTPWNAVVFEIVMTFGLVYTVYATAVDPKKGDIGIIAPLAIGLIVGANILVGGAFDGASMNPAVSFGPAVVSWIWTNHWVYWVGPFIGAAIAAIVYDTIFIGSNGHEPLPSNDF

SEQ ID NO: 82429 - protein, 211 aa, Arabidopsis thaliana
  peptide (1)..(211): Ceres Seq. ID no. 12665642
MAYGKLTGDGPATPAGLVAASLSHAFALFVAVSVGANVSGGHVNPAVTFGAFIGGNITLLRAILYWIAQLLGAVVACLLLKVSTGGMETAAFSLSYGVTPWNAVVFEIVMTFGLVYTVYATAVDPKKGDIGIIAPLAIGLIVGANILVGGAFDGASMNPAVSFGPAVVSWIWTNHWVYWVGPFIGAAIAAIVYDTIFIGSNGHEPLPSNDF

SEQ ID NO: 82430 - DNA, 768 bp, Arabidopsis thaliana
  misc_feature (1)..(768): Ceres Seq. ID no. 12665664
  misc_feature (1)..(768): Ortholog of  Ceres SEQ ID NO 15173907 as cited in SEQ ID NO 62356
  misc_feature (1)..(768): Ortholog of  Ceres SEQ ID NO 13596519 as cited in SEQ ID NO 62572
  misc_feature (1)..(768): Ortholog of  Ceres SEQ ID NO 12625108 as cited in SEQ ID NO 68102
atgacgaagattttctctctattggtcgcaatgatcttctccacaatgttcttcatgaagatcagctcagtttctgctggttggttgcaagctcatgcgaccttttatggcggaagtgatgcctctggtacaatgggtggagcttgtggttatggaaacctatacacagacggctacaagacaaacaccgcggcgttaagcacggccctgttcaacgacggcaagtcatgcggtggatgttaccaaatcttgtgtgatgcaaccaaagtaccacaatggtgtcttaaaggcaaatcaatcactatcacagctacaaacttctgtccaccgaactttgctcaggcaagcgacaatggaggttggtgcaacccaccgagacctcatttcgacatggctcagcctgcgtttctcaccatcgctaagtacaaagctggaatcgtccccattctttacaaaaaagttggatgtagaagaagcggagggatgagatttacaataaacggtagaaactatttcgagcttgttctcatctcaaacgtagcaggagggggtgagatctctaaagtttggatcaaaggatctaagagcaacaaatgggagacaatgtcaagaaattggggagctaattatcagagtaatacttaccttaatggtcaatctctatctttcaaagttcaacttagtgatggaagtatcaaagcagctctcaacgttgttccttcgaattggcggtttggtcagagcttcaagagcaacgttaacttctaa

SEQ ID NO: 82431 - protein, 255 aa, Arabidopsis thaliana
  peptide (1)..(255): Ceres Seq. ID no. 12665665
MTKIFSLLVAMIFSTMFFMKISSVSAGWLQAHATFYGGSDASGTMGGACGYGNLYTDGYKTNTAALSTALFNDGKSCGGCYQILCDATKVPQWCLKGKSITITATNFCPPNFAQASDNGGWCNPPRPHFDMAQPAFLTIAKYKAGIVPILYKKVGCRRSGGMRFTINGRNYFELVLISNVAGGGEISKVWIKGSKSNKWETMSRNWGANYQSNTYLNGQSLSFKVQLSDGSIKAALNVVPSNWRFGQSFKSNVNF

SEQ ID NO: 82432 - protein, 245 aa, Arabidopsis thaliana
  peptide (1)..(245): Ceres Seq. ID no. 12665666
MIFSTMFFMKISSVSAGWLQAHATFYGGSDASGTMGGACGYGNLYTDGYKTNTAALSTALFNDGKSCGGCYQILCDATKVPQWCLKGKSITITATNFCPPNFAQASDNGGWCNPPRPHFDMAQPAFLTIAKYKAGIVPILYKKVGCRRSGGMRFTINGRNYFELVLISNVAGGGEISKVWIKGSKSNKWETMSRNWGANYQSNTYLNGQSLSFKVQLSDGSIKAALNVVPSNWRFGQSFKSNVNF

SEQ ID NO: 82433 - protein, 240 aa, Arabidopsis thaliana
  peptide (1)..(240): Ceres Seq. ID no. 12665667
MFFMKISSVSAGWLQAHATFYGGSDASGTMGGACGYGNLYTDGYKTNTAALSTALFNDGKSCGGCYQILCDATKVPQWCLKGKSITITATNFCPPNFAQASDNGGWCNPPRPHFDMAQPAFLTIAKYKAGIVPILYKKVGCRRSGGMRFTINGRNYFELVLISNVAGGGEISKVWIKGSKSNKWETMSRNWGANYQSNTYLNGQSLSFKVQLSDGSIKAALNVVPSNWRFGQSFKSNVNF

SEQ ID NO: 82434 - DNA, 1385 bp, Arabidopsis thaliana
  misc_feature (1)..(1385): Ceres Seq. ID no. 12665677
  misc_feature (1)..(1385): Ortholog of  Ceres SEQ ID NO 12611159 as cited in SEQ ID NO 59821
  misc_feature (1)..(1385): Ortholog of  Ceres SEQ ID NO 15180029 as cited in SEQ ID NO 0
acttcaaactctctctatctttctctctcacctcatattatgaactaaagatttctctgaaagctgacttcataaactttttctgaagaagaaacacacaaaaacgatcgatcttgaattgattctttgtagtattttatttacatatatatatagatgggaagacattcatgttgttacaaacagaaactgaggaaaggactttggtctcctgaagaagatgagaagcttcttcgttacatcactaagtatggtcatggttgctggagctctgtccctaaacaagctggtttacagagatgtggaaaaagttgtagattaagatggataaattatttaagaccagatttgaagagaggagcattttctcaagatgaagaaaatctcattattgaacttcatgccgttcttggcaatagatggtctcagatagctgcacagcttcctggaagaaccgacaatgaaatcaagaatctttggaattcttgtttgaagaagaaattgaggctgagaggaattgacccggttacacacaagctcttaaccgaaatcgaaaccggtacagatgacaaaacaaaaccggttgagaagagtcaacagacctacctcgttgagactgatggctcctctagtaccactacttgtagtactaaccaaaacaacaacactgatcatctttataccggaaatttcggttttcaacggttaagtctagaaaacggttcaagaatcgcagccggttctgacctcggtatctggattccccaaaccggaagaaaccatcatcatcatgtcgatgaaaccatccctagtgcagtggtactacccggttcaatgttctcatccggtttaaccggttatagatcctccaatctcggtttaattgaattggaaaactcattctcaaccgggccaatgatgacagagcatcagcaaattcaagagagtaactacaacaattcaacattctttggaaatgggaatctgaattggggattaacaatggaggaaaatcaaaatccattcacaatatcgaatcattcaaattcgtccttatacagtgatataaaatcagagaccaatttttttggcacagaggctacaaatgttggtatgtggccatgtaaccagctccagcctcagcaacatgcatatggccatatataaatcttcttgtatattataaggtgtgtgaatcttcttttttttttttctcaaatatggttttttttttttttaatgggttgtgtatatagtttgtgttatatatcatttaatttaacagtattggtttttacatttttttgttttcatattcgatgtaccttgtgaaccacagatttatggactcggggattttgtttctctattgttaatggcttacg

SEQ ID NO: 82435 - protein, 336 aa, Arabidopsis thaliana
  peptide (1)..(336): Ceres Seq. ID no. 12665678
MGRHSCCYKQKLRKGLWSPEEDEKLLRYITKYGHGCWSSVPKQAGLQRCGKSCRLRWINYLRPDLKRGAFSQDEENLIIELHAVLGNRWSQIAAQLPGRTDNEIKNLWNSCLKKKLRLRGIDPVTHKLLTEIETGTDDKTKPVEKSQQTYLVETDGSSSTTTCSTNQNNNTDHLYTGNFGFQRLSLENGSRIAAGSDLGIWIPQTGRNHHHHVDETIPSAVVLPGSMFSSGLTGYRSSNLGLIELENSFSTGPMMTEHQQIQESNYNNSTFFGNGNLNWGLTMEENQNPFTISNHSNSSLYSDIKSETNFFGTEATNVGMWPCNQLQPQQHAYGHI

SEQ ID NO: 82436 - DNA, 823 bp, Arabidopsis thaliana
  misc_feature (1)..(823): Ceres Seq. ID no. 12665699
  misc_feature (1)..(823): Ortholog of  Ceres SEQ ID NO 13638815 as cited in SEQ ID NO 52231
gaaagttgtgttaaaaaaaaaactagaatcatggcggcgtcaatgacgaaacccatctcaataacttctctcggtttctattctgatcgaaagaacattgctttctctgattgcatttcgatttgttctggattcagacattcccgaccatcttgcctcgatttggtcacaaagtcaccgagtaataacagtcgtgttttacctgtcgttagtgcccaaatatcttctgattatattccagactcgaaattttacaaggtggaagcaattgtcagaccatggagaatccagcaagtttcatcggctttactgaaaatcgggattcgaggtgttactgtttctgatgtgagagggtttggtgcacaaggaggttctaccgagagacacggtggctctgagttctcggaagacaaatttgttgctaaagttaagatggaaatcgttgttaagaaagaccaagtggaatctgtaatcaacacaataattgaaggagcaaggacaggagagattggtgatggcaagatttttgttttgcctgtgtcagatgtcataagagttaggacaggtgagcgtggggagaaagcagagaagatgactggtgatatgctttcaccgtcttaggaacaaacagagctcaagaatggtttttttttttttcatttcggtctctagattctgcgaataataatgaatggagtctgtgtttggtttcatgttgaatcgatcaagatgtgtttttaactgtacatgaattatgcagaaacatctgtcctggttctcagacatcgaaactctgttcctaataaaagccgaagtccctgtt

SEQ ID NO: 82437 - protein, 206 aa, Arabidopsis thaliana
  peptide (1)..(206): Ceres Seq. ID no. 12665700
ESCVKKKTRIMAASMTKPISITSLGFYSDRKNIAFSDCISICSGFRHSRPSCLDLVTKSPSNNSRVLPVVSAQISSDYIPDSKFYKVEAIVRPWRIQQVSSALLKIGIRGVTVSDVRGFGAQGGSTERHGGSEFSEDKFVAKVKMEIVVKKDQVESVINTIIEGARTGEIGDGKIFVLPVSDVIRVRTGERGEKAEKMTGDMLSPS

SEQ ID NO: 82438 - protein, 196 aa, Arabidopsis thaliana
  peptide (1)..(196): Ceres Seq. ID no. 12665701
MAASMTKPISITSLGFYSDRKNIAFSDCISICSGFRHSRPSCLDLVTKSPSNNSRVLPVVSAQISSDYIPDSKFYKVEAIVRPWRIQQVSSALLKIGIRGVTVSDVRGFGAQGGSTERHGGSEFSEDKFVAKVKMEIVVKKDQVESVINTIIEGARTGEIGDGKIFVLPVSDVIRVRTGERGEKAEKMTGDMLSPS

SEQ ID NO: 82439 - protein, 192 aa, Arabidopsis thaliana
  peptide (1)..(192): Ceres Seq. ID no. 12665702
MTKPISITSLGFYSDRKNIAFSDCISICSGFRHSRPSCLDLVTKSPSNNSRVLPVVSAQISSDYIPDSKFYKVEAIVRPWRIQQVSSALLKIGIRGVTVSDVRGFGAQGGSTERHGGSEFSEDKFVAKVKMEIVVKKDQVESVINTIIEGARTGEIGDGKIFVLPVSDVIRVRTGERGEKAEKMTGDMLSPS

SEQ ID NO: 82440 - DNA, 1660 bp, Arabidopsis thaliana
  misc_feature (1)..(1660): Ceres Seq. ID no. 12665712
  misc_feature (1)..(1660): Ortholog of  Ceres SEQ ID NO 14309674 as cited in SEQ ID NO 55707
  misc_feature (1)..(1660): Ortholog of  Ceres SEQ ID NO 13658728 as cited in SEQ ID NO 66270
  misc_feature (1)..(1660): Ortholog of  Ceres SEQ ID NO 12465428 as cited in SEQ ID NO 68898
agaaaaaaattcaaaatccgtaaatctgatgatgcattccgtttcacggctcgcgaggaggttctgtgcaacgctcgctactgctacggcggagattagcggcgaggctgctgcttctgttccgacgaaggcgaaaaagcatcggtcaatatacaagaaactctcaagccttggcacgaggggaggagggaaaatggaggaaacgctaaatcagttcgtcatggaaggcgtacctgtcaaaaaacacgacctcattcgctacgcaaaggatcttcgcaagtttcgtcaacctcaacgcgctctcgagatctttgagtggatggaaagaaaggaaatagcgtttactggcagcgatcacgcgattcgtttgaatctaattgcaaagagtaaaggcttagaggcggctgagacctacttcaacagtttagacgattctattaagaatcagtccacttatggttccttattgaactgttactgtgtggaaaaggaggaagttaaagcaaaggctcattttgaaaatatggttgatctcaatcatgtgagtaattctttgccgtttaataacctgatggctatgtatatggggctaggtcaaccagagaaggtgcctgcattggttgttgcgatgaaagagaagagtattactccttgtgatattacttactccatgtggatacaaagctgtggaagtttaaaggatttagatggagtagagaaggttcttgatgaaatgaaagcagaaggtgaaggtattttctcttggaatacatttgctaatcttgcagcaatttatattaaagtcggtctctacggtaaagcagaagaggcgttgaaatctctggagaacaatatgaatcctgacgtacgtgattgttatcattttctcattaacttgtatactggaattgcaaatgcttctgaggtttatcgagtttgggatttgcttaagaaaagataccctaatgtcaacaattcaagctatcttacaatgcttcgagcactgagtaaactcgatgacattgatggagtcaagaaagtctttgcagaatgggaatcgacatgctggacttacgatatgcggatggcgaatgtagcgattagcagctacttaaagcagaacatgtacgaagaagctgaggctgttttcaacggcgccatgaaaaagtgtaaaggtcaattctcaaaggcaaggcagcttttgatgatgcacctgttgaagaacgatcaggcagatttggctctgaagcattttgaagcggcggttttggatcaagacaagaactggacttggagctcagagctgatcagttcgttctttcttcactttgaggaagccaaagacgttgatggagcagaagaattctgcaaaaccttgacgaaatggagtcccctcagttctgaaacttacactcttcttatgaagacttacctcgctgcagggaaagcttgtccggatatgaaaaagagattggaagaacaagggatcctggtagacgaagagcaagaatgtttgcttagcaagatttgcccttgattcatcctaaagcttagtaatgataagtgaatgttctgtaaaactaagcatttgaagcattttgttcggactcatgttctcgttatagtttgccttagatctatatgcataaaacgtgtgtac

SEQ ID NO: 82441 - protein, 511 aa, Arabidopsis thaliana
  peptide (1)..(511): Ceres Seq. ID no. 12665713
EKNSKSVNLMMHSVSRLARRFCATLATATAEISGEAAASVPTKAKKHRSIYKKLSSLGTRGGGKMEETLNQFVMEGVPVKKHDLIRYAKDLRKFRQPQRALEIFEWMERKEIAFTGSDHAIRLNLIAKSKGLEAAETYFNSLDDSIKNQSTYGSLLNCYCVEKEEVKAKAHFENMVDLNHVSNSLPFNNLMAMYMGLGQPEKVPALVVAMKEKSITPCDITYSMWIQSCGSLKDLDGVEKVLDEMKAEGEGIFSWNTFANLAAIYIKVGLYGKAEEALKSLENNMNPDVRDCYHFLINLYTGIANASEVYRVWDLLKKRYPNVNNSSYLTMLRALSKLDDIDGVKKVFAEWESTCWTYDMRMANVAISSYLKQNMYEEAEAVFNGAMKKCKGQFSKARQLLMMHLLKNDQADLALKHFEAAVLDQDKNWTWSSELISSFFLHFEEAKDVDGAEEFCKTLTKWSPLSSETYTLLMKTYLAAGKACPDMKKRLEEQGILVDEEQECLLSKICP

SEQ ID NO: 82442 - protein, 502 aa, Arabidopsis thaliana
  peptide (1)..(502): Ceres Seq. ID no. 12665714
MMHSVSRLARRFCATLATATAEISGEAAASVPTKAKKHRSIYKKLSSLGTRGGGKMEETLNQFVMEGVPVKKHDLIRYAKDLRKFRQPQRALEIFEWMERKEIAFTGSDHAIRLNLIAKSKGLEAAETYFNSLDDSIKNQSTYGSLLNCYCVEKEEVKAKAHFENMVDLNHVSNSLPFNNLMAMYMGLGQPEKVPALVVAMKEKSITPCDITYSMWIQSCGSLKDLDGVEKVLDEMKAEGEGIFSWNTFANLAAIYIKVGLYGKAEEALKSLENNMNPDVRDCYHFLINLYTGIANASEVYRVWDLLKKRYPNVNNSSYLTMLRALSKLDDIDGVKKVFAEWESTCWTYDMRMANVAISSYLKQNMYEEAEAVFNGAMKKCKGQFSKARQLLMMHLLKNDQADLALKHFEAAVLDQDKNWTWSSELISSFFLHFEEAKDVDGAEEFCKTLTKWSPLSSETYTLLMKTYLAAGKACPDMKKRLEEQGILVDEEQECLLSKICP

SEQ ID NO: 82443 - protein, 501 aa, Arabidopsis thaliana
  peptide (1)..(501): Ceres Seq. ID no. 12665715
MHSVSRLARRFCATLATATAEISGEAAASVPTKAKKHRSIYKKLSSLGTRGGGKMEETLNQFVMEGVPVKKHDLIRYAKDLRKFRQPQRALEIFEWMERKEIAFTGSDHAIRLNLIAKSKGLEAAETYFNSLDDSIKNQSTYGSLLNCYCVEKEEVKAKAHFENMVDLNHVSNSLPFNNLMAMYMGLGQPEKVPALVVAMKEKSITPCDITYSMWIQSCGSLKDLDGVEKVLDEMKAEGEGIFSWNTFANLAAIYIKVGLYGKAEEALKSLENNMNPDVRDCYHFLINLYTGIANASEVYRVWDLLKKRYPNVNNSSYLTMLRALSKLDDIDGVKKVFAEWESTCWTYDMRMANVAISSYLKQNMYEEAEAVFNGAMKKCKGQFSKARQLLMMHLLKNDQADLALKHFEAAVLDQDKNWTWSSELISSFFLHFEEAKDVDGAEEFCKTLTKWSPLSSETYTLLMKTYLAAGKACPDMKKRLEEQGILVDEEQECLLSKICP

SEQ ID NO: 82444 - DNA, 1835 bp, Arabidopsis thaliana
  misc_feature (1)..(1835): Ceres Seq. ID no. 12665756
  misc_feature (1)..(1835): Ortholog of  Ceres SEQ ID NO 15171212 as cited in SEQ ID NO 56899
  misc_feature (1)..(1835): Ortholog of  Ceres SEQ ID NO 12613725 as cited in SEQ ID NO 68196
atcaaaatttgagagagaaatcaaatggaagtagaaatgcatggtgatgtctccaaatgggaaggctacgctgactggagaaacaaagccgccttgagaggccgtcacggcggaatgctcgccgcctccttcgtcttggcggtggagatattggagaatctagcgtttttagcgaacgcaagcaacttggtgttgtatctcaagaacttcatgcacatgtctctagccagatcgtcgagtgaagtgaccactttcatggccacagccttccttctcgctctcctcggtggcttccttgctgacgccttcttctccacattcgtcattttcctcatctccgcctccatcgagtttctgggacttatcctgctcacaatccaagcccggcgtccgtccttaatgccgccgccatgcaagagctctgccgcattgcgatgcgaggtcgttggtggttcgaaggcggcgtttctgtttgtgggactatatctagtgtctctaggaatcggagggataaaagggtcattaccgtcacacggagcagagcaattcgacgagggcacgcccaaaggtcgaaaacaaagatccacattcttcaactactatgtgttctgtctctcatgtggagcacttgtggccgtgacgttcgttgtctggatcgaggacaacaaaggctgggagtggggatttggagtctccaccatctctatatttctctccattcttgtctttctattaggttcgaggttttataaaaacaaaatccctcgtggtagtcctcttaccacaatctttaaggttcttctcgcagcttccatagttagttgctcgagtaaaacttcgagtaatcactttacttccagagaagttcaatcagaacatgaagaaaagacgccttctcagtcacttaccaatagcttgacatgtctaaacaaagcaatagaggggaaaacacaccatatttggctcgaatgcacggtccaacaagtagaagacgtgaagattgtgctaaaaatgcttccaatatttggttgcaccataatgctcaattgctgcttagctcagctttctacttactctgtccaccaagctgcaacgatgaacagaaagatcgttaacttcaatgttccttcagcttctttaccggtttttccggttgttttcatgctgattcttgctccaacctatgaccatctgattatcccattcgcaagaaaagtaaccaaatccgaaattggtatcactcatttgcaaagaatcggtgtaggcttagtcctttcgatagtagcaatggcagtggctgctttagtcgagttaaagcggaagcaagtggctagagaagctggattacttgactctgaagaaactttaccaatcacttttctgtggattgctcttcagtatctgtttctaggatcagctgatctgttcacactagctggattgctagagtttttcttcacagaagcaccttcttctatgagatcattggctacatcgctctcatgggcttctttggcattagggtattatctaagctcggtgatggtgccgatagtgaacagagtaactaagagtgctggacaaagcccatggcttggagaaaaacttaaccgtaacagactagacttgttttattggctcatgtgtgtcctaagtgttgttaacttcttgcactatctcttctgggcaaagcgttacaagtatatctcaactggttcaataagttgatatgatatacataacctctttaatagatagaataaacaatcaatagagaaagaagattagtgatgtcgactttggagaaagaacgccaataataccatgaaaagttc

SEQ ID NO: 82445 - protein, 567 aa, Arabidopsis thaliana
  peptide (1)..(567): Ceres Seq. ID no. 12665757
MEVEMHGDVSKWEGYADWRNKAALRGRHGGMLAASFVLAVEILENLAFLANASNLVLYLKNFMHMSLARSSSEVTTFMATAFLLALLGGFLADAFFSTFVIFLISASIEFLGLILLTIQARRPSLMPPPCKSSAALRCEVVGGSKAAFLFVGLYLVSLGIGGIKGSLPSHGAEQFDEGTPKGRKQRSTFFNYYVFCLSCGALVAVTFVVWIEDNKGWEWGFGVSTISIFLSILVFLLGSRFYKNKIPRGSPLTTIFKVLLAASIVSCSSKTSSNHFTSREVQSEHEEKTPSQSLTNSLTCLNKAIEGKTHHIWLECTVQQVEDVKIVLKMLPIFGCTIMLNCCLAQLSTYSVHQAATMNRKIVNFNVPSASLPVFPVVFMLILAPTYDHLIIPFARKVTKSEIGITHLQRIGVGLVLSIVAMAVAALVELKRKQVAREAGLLDSEETLPITFLWIALQYLFLGSADLFTLAGLLEFFFTEAPSSMRSLATSLSWASLALGYYLSSVMVPIVNRVTKSAGQSPWLGEKLNRNRLDLFYWLMCVLSVVNFLHYLFWAKRYKYISTGSIS

SEQ ID NO: 82446 - protein, 563 aa, Arabidopsis thaliana
  peptide (1)..(563): Ceres Seq. ID no. 12665758
MHGDVSKWEGYADWRNKAALRGRHGGMLAASFVLAVEILENLAFLANASNLVLYLKNFMHMSLARSSSEVTTFMATAFLLALLGGFLADAFFSTFVIFLISASIEFLGLILLTIQARRPSLMPPPCKSSAALRCEVVGGSKAAFLFVGLYLVSLGIGGIKGSLPSHGAEQFDEGTPKGRKQRSTFFNYYVFCLSCGALVAVTFVVWIEDNKGWEWGFGVSTISIFLSILVFLLGSRFYKNKIPRGSPLTTIFKVLLAASIVSCSSKTSSNHFTSREVQSEHEEKTPSQSLTNSLTCLNKAIEGKTHHIWLECTVQQVEDVKIVLKMLPIFGCTIMLNCCLAQLSTYSVHQAATMNRKIVNFNVPSASLPVFPVVFMLILAPTYDHLIIPFARKVTKSEIGITHLQRIGVGLVLSIVAMAVAALVELKRKQVAREAGLLDSEETLPITFLWIALQYLFLGSADLFTLAGLLEFFFTEAPSSMRSLATSLSWASLALGYYLSSVMVPIVNRVTKSAGQSPWLGEKLNRNRLDLFYWLMCVLSVVNFLHYLFWAKRYKYISTGSIS

SEQ ID NO: 82447 - protein, 537 aa, Arabidopsis thaliana
  peptide (1)..(537): Ceres Seq. ID no. 12665759
MLAASFVLAVEILENLAFLANASNLVLYLKNFMHMSLARSSSEVTTFMATAFLLALLGGFLADAFFSTFVIFLISASIEFLGLILLTIQARRPSLMPPPCKSSAALRCEVVGGSKAAFLFVGLYLVSLGIGGIKGSLPSHGAEQFDEGTPKGRKQRSTFFNYYVFCLSCGALVAVTFVVWIEDNKGWEWGFGVSTISIFLSILVFLLGSRFYKNKIPRGSPLTTIFKVLLAASIVSCSSKTSSNHFTSREVQSEHEEKTPSQSLTNSLTCLNKAIEGKTHHIWLECTVQQVEDVKIVLKMLPIFGCTIMLNCCLAQLSTYSVHQAATMNRKIVNFNVPSASLPVFPVVFMLILAPTYDHLIIPFARKVTKSEIGITHLQRIGVGLVLSIVAMAVAALVELKRKQVAREAGLLDSEETLPITFLWIALQYLFLGSADLFTLAGLLEFFFTEAPSSMRSLATSLSWASLALGYYLSSVMVPIVNRVTKSAGQSPWLGEKLNRNRLDLFYWLMCVLSVVNFLHYLFWAKRYKYISTGSIS

SEQ ID NO: 82448 - DNA, 732 bp, Arabidopsis thaliana
  misc_feature (1)..(732): Ceres Seq. ID no. 12665768
  misc_feature (1)..(732): Ortholog of  Ceres SEQ ID NO 12611884 as cited in SEQ ID NO 51018
  misc_feature (1)..(732): Ortholog of  Ceres SEQ ID NO 15177083 as cited in SEQ ID NO 51917
  misc_feature (1)..(732): Ortholog of  Ceres SEQ ID NO 12609093 as cited in SEQ ID NO 52008
  misc_feature (1)..(732): Ortholog of  Ceres SEQ ID NO 12609839 as cited in SEQ ID NO 52022
  misc_feature (1)..(732): Ortholog of  Ceres SEQ ID NO 13638885 as cited in SEQ ID NO 55803
  misc_feature (1)..(732): Ortholog of  Ceres SEQ ID NO 12587429 as cited in SEQ ID NO 63113
  misc_feature (1)..(732): Ortholog of  Ceres SEQ ID NO 12615635 as cited in SEQ ID NO 63133
  misc_feature (1)..(732): Ortholog of  Ceres SEQ ID NO 12586351 as cited in SEQ ID NO 64028
  misc_feature (1)..(732): Ortholog of  Ceres SEQ ID NO 13654441 as cited in SEQ ID NO 67814
atggctcagaacgatacagtgaagctgataggttgttcggatgaccctttttccattaggccacgagtggctctacacttgaaatctatcaagtacgagtacttagaagaacctgatgatgatcttggggaaaagagccaactccttctcaaatctaaccctatccacaagaaaacccctgtcctcattcatggtgaccttgcaatctgtgagtccctcaacatcgttcaatacctcgacgaggcttggccttctgatccatccatccttccttctaatgcctatgatcgtgcgtctgctcggttctgggctcagtacatcgacgacaagtgcttcgaggcggcgaatgcgctgaccggagcaaacaacgacgaagagagaatagcggcgacgggaaagctgacggagtgtttggcgatactagaagagacgtttcagaagagcagcaaagggttagggtttttcggaggagaaaccatcggctaccttgacattgcatgtgcggctcttttgggtccgatctctgtgatcgagatgttttccgccgacaagtttgtccgggaagagacaacacctgggttgatccaatgggccgtgaggtttagggcccatgaagctgttaggccttacatgccaaccgtcgaagaggtcactgaattagtaaagcaaaggattgaggagggttttaagcgaaacttcaaaagcaatgtttcgacttcggaatatgaatag

SEQ ID NO: 82449 - protein, 243 aa, Arabidopsis thaliana
  peptide (1)..(243): Ceres Seq. ID no. 12665769
MAQNDTVKLIGCSDDPFSIRPRVALHLKSIKYEYLEEPDDDLGEKSQLLLKSNPIHKKTPVLIHGDLAICESLNIVQYLDEAWPSDPSILPSNAYDRASARFWAQYIDDKCFEAANALTGANNDEERIAATGKLTECLAILEETFQKSSKGLGFFGGETIGYLDIACAALLGPISVIEMFSADKFVREETTPGLIQWAVRFRAHEAVRPYMPTVEEVTELVKQRIEEGFKRNFKSNVSTSEYE

SEQ ID NO: 82450 - DNA, 4635 bp, Arabidopsis thaliana
  misc_feature (1)..(4635): Ceres Seq. ID no. 12665770
  misc_feature (1)..(4635): Ortholog of  Ceres SEQ ID NO 14303434 as cited in SEQ ID NO 53963
atggtgaagaccggcgatgtttccgatcagcgttcgaggctcgagtgggatgtattcctcagtttccaaagagacgcgcgccacaaatttacagagcgtctctatgaagtgctcgtcaaggaacaggtccgggtttggaacaatgatgatgtggaacgtgggaatcatgagctcggtgcaagtctcgtggaggctatggaggactcggtcgctctagtcgtcgttttatctcctaactatgctaaatctcactggtgccttgaagaattagccatgctctgtgatctaaagtcgtctctaggtcgtctggtgttaccgatcttttacgaggttgaaccgtgtatgttacgtaaacagaacggtccttacgagatggattttgaagaacattcgaaaagatttagcgaagagaagatacagagatggaggagagctttgaatataatcggaaatatccctggatttgtttacagatcggagatggaatctggcgttgtttcgaagccgcataggctcaagtatgacgtattcctcagtttccgtggcgcagacacgcgcgataacttcggagaccatctctataaagcgctcaaggataaagttcgggtcttccgcgacaacgaaggtatggaacgcggagatgagatcagttcaagtcttaaggcaggcatggaggactctgcggcctctgtcatcgtcatatcgcgtaactactctggctctcgctggtgccttgatgaattagctatgctctgcaagatgaaatcatctctagatcgtcgaatcttacccattttttatcatgtcgatccctcgcatgttcgcaaacagagcgatcatatcaagaaggattttgaagaacaccaagtaagatttagcgaggagaaagagaaggtacaagaatggagagaagctttgacattagttgggaatcttgctggatatgtttgcgacaaggactcgaaggatgatgatatgatagagcttgtggtgaaaagggttttagctgaattgagcaatacaccagagaaagtgggagaattcattgttggtctggaatcacctttaaaggatttgacgggcctgatcgacactgaatccagttctggcgtccaagtcttgggactttatggtatgggtggtattgggaagactacccttgcaaaagccttttataacaagattgtcggaaacttcgagcaacgagctttcatctcagacattagagaaagatcatcagccgaaaatgggttagtcactcttcaaaaaactctcatcaaggaacttttccgtttggtacctgaaatagaggatgttagcataggcctggaaaagataaaagcaaatgttcacgagaagaagattattgtggttttagatgatgttgatcacatagaccaggttcatgccctggttggtgaaacaagatggtatggtcaaggaacacttatagtaatcactactagagattctgagattctgagtaagctctcagtgaaccaacagtatgaggtcaagtgcttgactgagccgcaggcattgaagctctttagttatcattcactacgaaaagaagaaccaacaaagaatctgttggcgttatccaagaagattgtccagatatcaggactattgccgcttgcagttgaagtttttggatctcttttgtatgacaagaaggaggaaaaggattggcaaactcaactggataagctgaaaaagactcaaccaggcaatcttcaggatgttctggaactgagtttcaaatctttagacgatgaagaaaagaaagtattcctcgacattgcatgtctctttcttaaaatggagataaaaaaagacgaagttgtcattgtactgaaaggatgtgggttaaacgctgaggctgctctcagtgtccttagacagaaatctcttgttaagatcttggcaaacgatactctttggatgcatgatcagattagagacatgggtaggcagatggtccttaaagaaagccgtgaggatccgggattgcgaagtagactctgggatcgtggtgaaattatgaccgtactgaacaatatgaagggaacatcatccattcgaggaatcgtacttgactttaaaaaaaagtttgctagggaccctactgcagatgaaattgtctcgaggaatctacgcaacaatccgggtatctactctgtattcaattacctgaagaataagttagtaagatttccagcagaggaaaagccaaaaagttctgaaatcaccattcccgtagaatcttttgcaccaatgacgaagttgagacttcttcagattaataacgtggaactggaaggaaatcttaaacttctcccatctgaactcaagtggatacagtggaaaggttgccccttagaaaatctccctccggattttcttgctaggcaactttctgttcttgatctttcagagagtggaataagacaagtccagactttgcgcaacaaaatggtggatgagaatttgaaggttgtaattttgcgtggttgccacagcttagaagccattcctgatttatcaaaccatgaagccctagagaagcttgttttcgagcaatgcacccttctggtgaaggttcctaaatcagttggtaatctgagaaaattgattcacctggacttcagaaggtgttcaaagctttctgaatttcttgtggatgtttctggacttaagcttcttgaaaaactattcctctctggctgttcagatctgagtgtgttaccagaaaacattggtgccatgacaagcttgaaagagcttcttcttgatggaactgcgataaagaacttaccagaatctataaatcgcctccaaaatcttgaaatccttagtctaagaggttgcaaaattcaagagctacctttgtgcataggaacattgaaatcgctggagaagctatatcttgatgatactgcgttgaaaaatcttccgagttctattggagatctaaaaaatctccaggacctccatttggtacgctgcacatccctttctaagattcctgacagtatcaatgagctcaaatctttgaagaaactattcatcaacggaagcgcggtggaggaattacctctaaaaccgagttcactgccaagcttgtatgacttctcagcaggagattgcaaatttctgaaacaggttccgagttcaattggtagattaaattctcttctccaacttcagttgagtagcaccccaattgaagctctaccagaagagattggtgccttgcattttatacgcgaacttgagttgagaaactgcaaatttctgaagtttctgcctaagtcaattggagatatggacacactctatagcttaaaccttgaaggctctaacattgaggaactgccggaagaatttggcaagctggaaaagctagttgaactgcgaatgagcaactgtaaaatgctcaagaggcttcctgaatcgtttggagacttgaaatctcttcaccgtctgtacatgaaggaaactttggtctcagagttgccagaaagtttcggaaacctctcaaatttaatggtactggaaatgctgaagaagcctctttttagaatttctgagagtaatgttccaggtacaagcgaagaacctcgttttgtagaagtaccaaactctttctcaaagctcttgaagcttgaggaactagatgcttgcagctggagaatatcgggtaaaatccctgatgatcttgagaagctttcgtgtttgatgaaactgaatctggggaataattattttcatagtcttccgtctagcctcgtaaagttatcaaatctccaagaactttcattacgtgactgccgagagctcaagcgtcttccccctcttccatgtaaactggagcagctaaacctagcaaactgtttctcattggagagtgtatccgacctttcagagttaacgatcttgacggatctcaatctcacaaactgtgcgaaagtggttgatattccaggcctagagcacttgacggctctgaaaagattatacatgaccggatgtaactccaactactcccttgcagtaaagaaaagactttccaaggcttctttgaagatgatgcggaatctgagcttgcctggaaacagggtcccggactggttctcgcaaggccctgtcacattctcagctcaaccgaacagagagctcagaggtgtaatcattgctgttgttgtggctcttaatgatgaaaccgaagatgacgactatcagctgcctgatgtgatggaggttcaagcccaaattcataaacttgatcatcacaaatgcaccaacacattgcatctctccggagtgcctagaacaaataacgatcagcttcacatctgccgatactcagcttttcacccactggttacgatgttgaaagacgggtacaccatacaggtgatcaaacgaaacccaccaatcaaacaaggcgttgagctaaagatgcatggcattcatctcgtttacgagggggatgatgatttggaaggcagagaaaatactttacccgagactcaacaaaccgtttctcagaaacttgccaattttttcagctctttcgaagaagaagaaggtgaaaccatctcagaaagtgaatctacagttatatga

SEQ ID NO: 82451 - protein, 1544 aa, Arabidopsis thaliana
  peptide (1)..(1544): Ceres Seq. ID no. 12665771
MVKTGDVSDQRSRLEWDVFLSFQRDARHKFTERLYEVLVKEQVRVWNNDDVERGNHELGASLVEAMEDSVALVVVLSPNYAKSHWCLEELAMLCDLKSSLGRLVLPIFYEVEPCMLRKQNGPYEMDFEEHSKRFSEEKIQRWRRALNIIGNIPGFVYRSEMESGVVSKPHRLKYDVFLSFRGADTRDNFGDHLYKALKDKVRVFRDNEGMERGDEISSSLKAGMEDSAASVIVISRNYSGSRWCLDELAMLCKMKSSLDRRILPIFYHVDPSHVRKQSDHIKKDFEEHQVRFSEEKEKVQEWREALTLVGNLAGYVCDKDSKDDDMIELVVKRVLAELSNTPEKVGEFIVGLESPLKDLTGLIDTESSSGVQVLGLYGMGGIGKTTLAKAFYNKIVGNFEQRAFISDIRERSSAENGLVTLQKTLIKELFRLVPEIEDVSIGLEKIKANVHEKKIIVVLDDVDHIDQVHALVGETRWYGQGTLIVITTRDSEILSKLSVNQQYEVKCLTEPQALKLFSYHSLRKEEPTKNLLALSKKIVQISGLLPLAVEVFGSLLYDKKEEKDWQTQLDKLKKTQPGNLQDVLELSFKSLDDEEKKVFLDIACLFLKMEIKKDEVVIVLKGCGLNAEAALSVLRQKSLVKILANDTLWMHDQIRDMGRQMVLKESREDPGLRSRLWDRGEIMTVLNNMKGTSSIRGIVLDFKKKFARDPTADEIVSRNLRNNPGIYSVFNYLKNKLVRFPAEEKPKSSEITIPVESFAPMTKLRLLQINNVELEGNLKLLPSELKWIQWKGCPLENLPPDFLARQLSVLDLSESGIRQVQTLRNKMVDENLKVVILRGCHSLEAIPDLSNHEALEKLVFEQCTLLVKVPKSVGNLRKLIHLDFRRCSKLSEFLVDVSGLKLLEKLFLSGCSDLSVLPENIGAMTSLKELLLDGTAIKNLPESINRLQNLEILSLRGCKIQELPLCIGTLKSLEKLYLDDTALKNLPSSIGDLKNLQDLHLVRCTSLSKIPDSINELKSLKKLFINGSAVEELPLKPSSLPSLYDFSAGDCKFLKQVPSSIGRLNSLLQLQLSSTPIEALPEEIGALHFIRELELRNCKFLKFLPKSIGDMDTLYSLNLEGSNIEELPEEFGKLEKLVELRMSNCKMLKRLPESFGDLKSLHRLYMKETLVSELPESFGNLSNLMVLEMLKKPLFRISESNVPGTSEEPRFVEVPNSFSKLLKLEELDACSWRISGKIPDDLEKLSCLMKLNLGNNYFHSLPSSLVKLSNLQELSLRDCRELKRLPPLPCKLEQLNLANCFSLESVSDLSELTILTDLNLTNCAKVVDIPGLEHLTALKRLYMTGCNSNYSLAVKKRLSKASLKMMRNLSLPGNRVPDWFSQGPVTFSAQPNRELRGVIIAVVVALNDETEDDDYQLPDVMEVQAQIHKLDHHKCTNTLHLSGVPRTNNDQLHICRYSAFHPLVTMLKDGYTIQVIKRNPPIKQGVELKMHGIHLVYEGDDDLEGRENTLPETQQTVSQKLANFFSSFEEEEGETISESESTVI

SEQ ID NO: 82452 - protein, 1479 aa, Arabidopsis thaliana
  peptide (1)..(1479): Ceres Seq. ID no. 12665772
MEDSVALVVVLSPNYAKSHWCLEELAMLCDLKSSLGRLVLPIFYEVEPCMLRKQNGPYEMDFEEHSKRFSEEKIQRWRRALNIIGNIPGFVYRSEMESGVVSKPHRLKYDVFLSFRGADTRDNFGDHLYKALKDKVRVFRDNEGMERGDEISSSLKAGMEDSAASVIVISRNYSGSRWCLDELAMLCKMKSSLDRRILPIFYHVDPSHVRKQSDHIKKDFEEHQVRFSEEKEKVQEWREALTLVGNLAGYVCDKDSKDDDMIELVVKRVLAELSNTPEKVGEFIVGLESPLKDLTGLIDTESSSGVQVLGLYGMGGIGKTTLAKAFYNKIVGNFEQRAFISDIRERSSAENGLVTLQKTLIKELFRLVPEIEDVSIGLEKIKANVHEKKIIVVLDDVDHIDQVHALVGETRWYGQGTLIVITTRDSEILSKLSVNQQYEVKCLTEPQALKLFSYHSLRKEEPTKNLLALSKKIVQISGLLPLAVEVFGSLLYDKKEEKDWQTQLDKLKKTQPGNLQDVLELSFKSLDDEEKKVFLDIACLFLKMEIKKDEVVIVLKGCGLNAEAALSVLRQKSLVKILANDTLWMHDQIRDMGRQMVLKESREDPGLRSRLWDRGEIMTVLNNMKGTSSIRGIVLDFKKKFARDPTADEIVSRNLRNNPGIYSVFNYLKNKLVRFPAEEKPKSSEITIPVESFAPMTKLRLLQINNVELEGNLKLLPSELKWIQWKGCPLENLPPDFLARQLSVLDLSESGIRQVQTLRNKMVDENLKVVILRGCHSLEAIPDLSNHEALEKLVFEQCTLLVKVPKSVGNLRKLIHLDFRRCSKLSEFLVDVSGLKLLEKLFLSGCSDLSVLPENIGAMTSLKELLLDGTAIKNLPESINRLQNLEILSLRGCKIQELPLCIGTLKSLEKLYLDDTALKNLPSSIGDLKNLQDLHLVRCTSLSKIPDSINELKSLKKLFINGSAVEELPLKPSSLPSLYDFSAGDCKFLKQVPSSIGRLNSLLQLQLSSTPIEALPEEIGALHFIRELELRNCKFLKFLPKSIGDMDTLYSLNLEGSNIEELPEEFGKLEKLVELRMSNCKMLKRLPESFGDLKSLHRLYMKETLVSELPESFGNLSNLMVLEMLKKPLFRISESNVPGTSEEPRFVEVPNSFSKLLKLEELDACSWRISGKIPDDLEKLSCLMKLNLGNNYFHSLPSSLVKLSNLQELSLRDCRELKRLPPLPCKLEQLNLANCFSLESVSDLSELTILTDLNLTNCAKVVDIPGLEHLTALKRLYMTGCNSNYSLAVKKRLSKASLKMMRNLSLPGNRVPDWFSQGPVTFSAQPNRELRGVIIAVVVALNDETEDDDYQLPDVMEVQAQIHKLDHHKCTNTLHLSGVPRTNNDQLHICRYSAFHPLVTMLKDGYTIQVIKRNPPIKQGVELKMHGIHLVYEGDDDLEGRENTLPETQQTVSQKLANFFSSFEEEEGETISESESTVI

SEQ ID NO: 82453 - protein, 1453 aa, Arabidopsis thaliana
  peptide (1)..(1453): Ceres Seq. ID no. 12665773
MLCDLKSSLGRLVLPIFYEVEPCMLRKQNGPYEMDFEEHSKRFSEEKIQRWRRALNIIGNIPGFVYRSEMESGVVSKPHRLKYDVFLSFRGADTRDNFGDHLYKALKDKVRVFRDNEGMERGDEISSSLKAGMEDSAASVIVISRNYSGSRWCLDELAMLCKMKSSLDRRILPIFYHVDPSHVRKQSDHIKKDFEEHQVRFSEEKEKVQEWREALTLVGNLAGYVCDKDSKDDDMIELVVKRVLAELSNTPEKVGEFIVGLESPLKDLTGLIDTESSSGVQVLGLYGMGGIGKTTLAKAFYNKIVGNFEQRAFISDIRERSSAENGLVTLQKTLIKELFRLVPEIEDVSIGLEKIKANVHEKKIIVVLDDVDHIDQVHALVGETRWYGQGTLIVITTRDSEILSKLSVNQQYEVKCLTEPQALKLFSYHSLRKEEPTKNLLALSKKIVQISGLLPLAVEVFGSLLYDKKEEKDWQTQLDKLKKTQPGNLQDVLELSFKSLDDEEKKVFLDIACLFLKMEIKKDEVVIVLKGCGLNAEAALSVLRQKSLVKILANDTLWMHDQIRDMGRQMVLKESREDPGLRSRLWDRGEIMTVLNNMKGTSSIRGIVLDFKKKFARDPTADEIVSRNLRNNPGIYSVFNYLKNKLVRFPAEEKPKSSEITIPVESFAPMTKLRLLQINNVELEGNLKLLPSELKWIQWKGCPLENLPPDFLARQLSVLDLSESGIRQVQTLRNKMVDENLKVVILRGCHSLEAIPDLSNHEALEKLVFEQCTLLVKVPKSVGNLRKLIHLDFRRCSKLSEFLVDVSGLKLLEKLFLSGCSDLSVLPENIGAMTSLKELLLDGTAIKNLPESINRLQNLEILSLRGCKIQELPLCIGTLKSLEKLYLDDTALKNLPSSIGDLKNLQDLHLVRCTSLSKIPDSINELKSLKKLFINGSAVEELPLKPSSLPSLYDFSAGDCKFLKQVPSSIGRLNSLLQLQLSSTPIEALPEEIGALHFIRELELRNCKFLKFLPKSIGDMDTLYSLNLEGSNIEELPEEFGKLEKLVELRMSNCKMLKRLPESFGDLKSLHRLYMKETLVSELPESFGNLSNLMVLEMLKKPLFRISESNVPGTSEEPRFVEVPNSFSKLLKLEELDACSWRISGKIPDDLEKLSCLMKLNLGNNYFHSLPSSLVKLSNLQELSLRDCRELKRLPPLPCKLEQLNLANCFSLESVSDLSELTILTDLNLTNCAKVVDIPGLEHLTALKRLYMTGCNSNYSLAVKKRLSKASLKMMRNLSLPGNRVPDWFSQGPVTFSAQPNRELRGVIIAVVVALNDETEDDDYQLPDVMEVQAQIHKLDHHKCTNTLHLSGVPRTNNDQLHICRYSAFHPLVTMLKDGYTIQVIKRNPPIKQGVELKMHGIHLVYEGDDDLEGRENTLPETQQTVSQKLANFFSSFEEEEGETISESESTVI

SEQ ID NO: 82454 - DNA, 1329 bp, Arabidopsis thaliana
  misc_feature (1)..(1329): Ceres Seq. ID no. 12665835
  misc_feature (1)..(1329): Ortholog of  Ceres SEQ ID NO 15174752 as cited in SEQ ID NO 53279
  misc_feature (1)..(1329): Ortholog of  Ceres SEQ ID NO 14308389 as cited in SEQ ID NO 55226
  misc_feature (1)..(1329): Ortholog of  Ceres SEQ ID NO 15177652 as cited in SEQ ID NO 56858
  misc_feature (1)..(1329): Ortholog of  Ceres SEQ ID NO 15226087 as cited in SEQ ID NO 58655
  misc_feature (1)..(1329): Ortholog of  Ceres SEQ ID NO 13597162 as cited in SEQ ID NO 63955
  misc_feature (1)..(1329): Ortholog of  Ceres SEQ ID NO 14313292 as cited in SEQ ID NO 67393
  misc_feature (1)..(1329): Ortholog of  Ceres SEQ ID NO 14313567 as cited in SEQ ID NO 68074
atgcaagaactgccggattgtttgtacgaggaaaaccaaccaaccttaataactcctttatctcccacaccaaatcactctctctacctttcaaacctcgacgaccatcattttctcagattctctatcaagtacctttaccttttccaaaaatctatatcccctctcaccctgaaagattcgctctctagggttctagttgattactaccctttcgcgggtcggataagagtctccgatgaagggagcaagctcgaggtagactgtaatggagaaggcgcagttttcgcagaagctttcatggatataacttgtcaagattttgttcaactttctcccaaaccaaacaagtcttggaggaagctcttgttcaaggttcaagctcagagtttcttggatattcctcctcttgtcatacaggtgacgtatctccgttgtgggggtatgatcctctgcaccgcgatcaatcattgcctctgcgacggcattggcacatcgcagttcctacatgcatgggcccatgcgaccactagccaagctcatcttccgacccgaccattccactcccgtcacgtattagatccgcgaaaccctccacgtgtcacacactcacatcccggtttcacccgaaccaccaccgtagacaaaagctccaccttcgacatttccaagtatttacagtcccaaccattggctcctgccaccttaaccttcaaccaatctcatctcctacgcttaaagaaaacctgcgctccttcgctaaaatgcaccacgttcgaggcactagcggctaacacttggcgctcgtgggctcaatctctagatttaccaatgaccatgctggtcaaactcttattctcagtcaatatgagaaaacgactaactccagaacttccccaagggtattacggtaatggattcgtactagcttgcgccgagagcaaggtacaagacctagtcaatggtaatatttaccacgctgtaaaatcgatacaagaggcaaaatcaagaattaccgacgaatatgtaagatcaacgatagatttactggaggataaaacggtgaaaacggacgtctcgtgcagtttggtcatttcacaatgggcgaaattgggattagaggagttggacttgggaggaggaaagccaatgtatatgggtcctttgacgagtgatatctactgtttatttttacccgtggcgagcgataatgatgccatcagagttcaaatgtccctgccggaggaagttgtgaagagactagagtattgcatggttaagtttttagacggaaaagataacgaagatgagaattctcgtgcatgctaa

SEQ ID NO: 82455 - protein, 442 aa, Arabidopsis thaliana
  peptide (1)..(442): Ceres Seq. ID no. 12665836
MQELPDCLYEENQPTLITPLSPTPNHSLYLSNLDDHHFLRFSIKYLYLFQKSISPLTLKDSLSRVLVDYYPFAGRIRVSDEGSKLEVDCNGEGAVFAEAFMDITCQDFVQLSPKPNKSWRKLLFKVQAQSFLDIPPLVIQVTYLRCGGMILCTAINHCLCDGIGTSQFLHAWAHATTSQAHLPTRPFHSRHVLDPRNPPRVTHSHPGFTRTTTVDKSSTFDISKYLQSQPLAPATLTFNQSHLLRLKKTCAPSLKCTTFEALAANTWRSWAQSLDLPMTMLVKLLFSVNMRKRLTPELPQGYYGNGFVLACAESKVQDLVNGNIYHAVKSIQEAKSRITDEYVRSTIDLLEDKTVKTDVSCSLVISQWAKLGLEELDLGGGKPMYMGPLTSDIYCLFLPVASDNDAIRVQMSLPEEVVKRLEYCMVKFLDGKDNEDENSRAC

SEQ ID NO: 82456 - protein, 342 aa, Arabidopsis thaliana
  peptide (1)..(342): Ceres Seq. ID no. 12665837
MDITCQDFVQLSPKPNKSWRKLLFKVQAQSFLDIPPLVIQVTYLRCGGMILCTAINHCLCDGIGTSQFLHAWAHATTSQAHLPTRPFHSRHVLDPRNPPRVTHSHPGFTRTTTVDKSSTFDISKYLQSQPLAPATLTFNQSHLLRLKKTCAPSLKCTTFEALAANTWRSWAQSLDLPMTMLVKLLFSVNMRKRLTPELPQGYYGNGFVLACAESKVQDLVNGNIYHAVKSIQEAKSRITDEYVRSTIDLLEDKTVKTDVSCSLVISQWAKLGLEELDLGGGKPMYMGPLTSDIYCLFLPVASDNDAIRVQMSLPEEVVKRLEYCMVKFLDGKDNEDENSRAC

SEQ ID NO: 82457 - protein, 294 aa, Arabidopsis thaliana
  peptide (1)..(294): Ceres Seq. ID no. 12665838
MILCTAINHCLCDGIGTSQFLHAWAHATTSQAHLPTRPFHSRHVLDPRNPPRVTHSHPGFTRTTTVDKSSTFDISKYLQSQPLAPATLTFNQSHLLRLKKTCAPSLKCTTFEALAANTWRSWAQSLDLPMTMLVKLLFSVNMRKRLTPELPQGYYGNGFVLACAESKVQDLVNGNIYHAVKSIQEAKSRITDEYVRSTIDLLEDKTVKTDVSCSLVISQWAKLGLEELDLGGGKPMYMGPLTSDIYCLFLPVASDNDAIRVQMSLPEEVVKRLEYCMVKFLDGKDNEDENSRAC

SEQ ID NO: 82458 - DNA, 1933 bp, Arabidopsis thaliana
  misc_feature (1)..(1933): Ceres Seq. ID no. 12665843
  misc_feature (1)..(1933): Ortholog of  Ceres SEQ ID NO 14308221 as cited in SEQ ID NO 60363
ccgtttctctttccactgccaaaagttaaagctctctctctcactcaatcacacactcatttctcactatttcacaacttccttgtggacaaaattagtcgacttctctgttctctccaacactgtttcgttttcactacccaaaattcgaatctgggttattgaaaaagttccaatttttttatctgggtttttcgaaagctgatatctttttagaatctgatctatctcttctacttcatttcccttgcatttttttaataagttgtagaatctgtcttgttctggaaaaatatggagtcttgctttcctgccatgaagctgaatcagtgtacctttggtctcaacaacgaaattgtctctgagagagttagtgcgttctggggaacccaagttgtcaagcccaatcatttgaggacaacgaaacttaggagtgcacctcagaagaagattcagacaaacctcattcgctccgttcttactccatttgttgatcaagagtctcatgaacctctgttgagaactcaaaatgcagaccctaagaatgtagcgtctatcatactaggtggtggtgctgggactcgcttgttccctcttacaagcaagagagctaaacctgcggtgccaattggagggtgttacaggctgatagatataccgatgagcaattgcatcaacagtggtattagaaagatcttcatcttaactcagttcaactcattttctctcaatcgccacttgtctcgtacttacaactttggcaatggagtcaattttggtgatgggtttgttgaggtccttgctgcaacccaaacttccggagatgcaggaaagaaatggtttcagggaactgctgatgctgttaggcagtttatatgggtctttgaggatgccaagacaaagaatgtggaacatgtcttgatcttgtctggggatcatctctatcggatggattacatgaactttgtgcagaagcacattgagtccaatgctgatatcacagtttcttgtcttcccatggatgagagccgtgcttcggactttgggctgcttaaaattgaccagtctggtaaaatcattcaattctcggaaaaaccaaagggagatgacttaaaggcaatgcaagttgacacttccattcttggtttaccaccgaaagaagctgcggagtccccatacattgcatcgatgggtgtttacgtatttagaaaagaggttttgctaaagcttctaaggtcaagttatcctacatccaatgactttggttctgaaattatcccgttggccgtaggggagcataatgttcaggcatttttgttcaatgactattgggaggatattggaaccataggatcattctttgatgccaatttagccctcacggaacagcctcctaaattccaattctacgatcaaaaaacacccttcttcacttctccaagattcttgccacctaccaaagttgataaatgcaggatacttgattccatagtttcacatggatgcttcttgagagaatgcagtgtgcagcactcaatcgttggcatacgatcacgtctcgagtctggagtagagcttcaggatacaatgatgatgggagctgatttctaccaaacggaagctgagatcgcgtctcttttggcggaagggaaagttccggtaggggttggccagaacacaaaaatcaagaactgtatcattgacaagaacgccaagatcgggaagaacgtggtcatagcgaatgcagatggcgtggaagaaggcgatagaccagaggaagggtttcacataagatcaggcatcaccgttgtgctgaagaacgccaccattagagatggtctgcatatttaagcttttaaacctctctttaggagcagtgtatgtggcttcttgtgattttgtaacgagactagttacgttcgattaataattt

SEQ ID NO: 82459 - protein, 518 aa, Arabidopsis thaliana
  peptide (1)..(518): Ceres Seq. ID no. 12665844
MESCFPAMKLNQCTFGLNNEIVSERVSAFWGTQVVKPNHLRTTKLRSAPQKKIQTNLIRSVLTPFVDQESHEPLLRTQNADPKNVASIILGGGAGTRLFPLTSKRAKPAVPIGGCYRLIDIPMSNCINSGIRKIFILTQFNSFSLNRHLSRTYNFGNGVNFGDGFVEVLAATQTSGDAGKKWFQGTADAVRQFIWVFEDAKTKNVEHVLILSGDHLYRMDYMNFVQKHIESNADITVSCLPMDESRASDFGLLKIDQSGKIIQFSEKPKGDDLKAMQVDTSILGLPPKEAAESPYIASMGVYVFRKEVLLKLLRSSYPTSNDFGSEIIPLAVGEHNVQAFLFNDYWEDIGTIGSFFDANLALTEQPPKFQFYDQKTPFFTSPRFLPPTKVDKCRILDSIVSHGCFLRECSVQHSIVGIRSRLESGVELQDTMMMGADFYQTEAEIASLLAEGKVPVGVGQNTKIKNCIIDKNAKIGKNVVIANADGVEEGDRPEEGFHIRSGITVVLKNATIRDGLHI

SEQ ID NO: 82460 - protein, 511 aa, Arabidopsis thaliana
  peptide (1)..(511): Ceres Seq. ID no. 12665845
MKLNQCTFGLNNEIVSERVSAFWGTQVVKPNHLRTTKLRSAPQKKIQTNLIRSVLTPFVDQESHEPLLRTQNADPKNVASIILGGGAGTRLFPLTSKRAKPAVPIGGCYRLIDIPMSNCINSGIRKIFILTQFNSFSLNRHLSRTYNFGNGVNFGDGFVEVLAATQTSGDAGKKWFQGTADAVRQFIWVFEDAKTKNVEHVLILSGDHLYRMDYMNFVQKHIESNADITVSCLPMDESRASDFGLLKIDQSGKIIQFSEKPKGDDLKAMQVDTSILGLPPKEAAESPYIASMGVYVFRKEVLLKLLRSSYPTSNDFGSEIIPLAVGEHNVQAFLFNDYWEDIGTIGSFFDANLALTEQPPKFQFYDQKTPFFTSPRFLPPTKVDKCRILDSIVSHGCFLRECSVQHSIVGIRSRLESGVELQDTMMMGADFYQTEAEIASLLAEGKVPVGVGQNTKIKNCIIDKNAKIGKNVVIANADGVEEGDRPEEGFHIRSGITVVLKNATIRDGLHI

SEQ ID NO: 82461 - protein, 396 aa, Arabidopsis thaliana
  peptide (1)..(396): Ceres Seq. ID no. 12665846
MSNCINSGIRKIFILTQFNSFSLNRHLSRTYNFGNGVNFGDGFVEVLAATQTSGDAGKKWFQGTADAVRQFIWVFEDAKTKNVEHVLILSGDHLYRMDYMNFVQKHIESNADITVSCLPMDESRASDFGLLKIDQSGKIIQFSEKPKGDDLKAMQVDTSILGLPPKEAAESPYIASMGVYVFRKEVLLKLLRSSYPTSNDFGSEIIPLAVGEHNVQAFLFNDYWEDIGTIGSFFDANLALTEQPPKFQFYDQKTPFFTSPRFLPPTKVDKCRILDSIVSHGCFLRECSVQHSIVGIRSRLESGVELQDTMMMGADFYQTEAEIASLLAEGKVPVGVGQNTKIKNCIIDKNAKIGKNVVIANADGVEEGDRPEEGFHIRSGITVVLKNATIRDGLHI

SEQ ID NO: 82462 - DNA, 928 bp, Arabidopsis thaliana
  misc_feature (1)..(928): Ceres Seq. ID no. 12665855
  misc_feature (1)..(928): Ortholog of  Ceres SEQ ID NO 14305854 as cited in SEQ ID NO 52331
  misc_feature (1)..(928): Ortholog of  Ceres SEQ ID NO 15168588 as cited in SEQ ID NO 60235
agcaattaaacaatttcttcactgcaattcacaagcaaccttcaaactaaaactcgagagacaagaaatcctcagaatctttaacttaatggcgctcgaggctcttacatcaccaagattagcttctccgattcctcctttgttcgaagattcttcagtcttccatggagtcgagcactggacaaagggtaagcgatctaagagatcaagatccgatttccaccaccaaaacctcactgaggaagagtatctagctttttgcctcatgcttctcgctcgcgacaaccgtcagcctcctcctcctccggcggtggagaagttgagctacaagtgtagcgtctgcgacaagacgttctcttcttaccaagctctcggtggtcacaaggcaagccaccgtaagaacttatcacagactctctccggcggaggagatgatcattcaacctcgtcggcgacaaccacatccgccgtgactactggaagtgggaaatcacacgtttgcaccatctgtaacaagtcttttccttccggtcaagctctcggcggacacaagcggtgccactacgaaggaaacaacaacatcaacactagtagcgtgtccaactccgaaggtgcggggtccactagccacgttagcagtagccaccgtgggtttgacctcaacatccctccgatccctgaattctcgatggtcaacggagacgacgaagtcatgagccctatgccggcgaagaagcctcggtttgactttccggtcaaacttcaactttaaggaaatttacttagacgataagatttcgtttgtatactgttgagagttgtgtaggaatttgttgactgtacataccaaattggactttgactgattccaattcttcttgttctttcattttaaaaattattaaaccgattctttaccacatatttt

SEQ ID NO: 82463 - protein, 256 aa, Arabidopsis thaliana
  peptide (1)..(256): Ceres Seq. ID no. 12665856
AIKQFLHCNSQATFKLKLERQEILRIFNLMALEALTSPRLASPIPPLFEDSSVFHGVEHWTKGKRSKRSRSDFHHQNLTEEEYLAFCLMLLARDNRQPPPPPAVEKLSYKCSVCDKTFSSYQALGGHKASHRKNLSQTLSGGGDDHSTSSATTTSAVTTGSGKSHVCTICNKSFPSGQALGGHKRCHYEGNNNINTSSVSNSEGAGSTSHVSSSHRGFDLNIPPIPEFSMVNGDDEVMSPMPAKKPRFDFPVKLQL

SEQ ID NO: 82464 - protein, 227 aa, Arabidopsis thaliana
  peptide (1)..(227): Ceres Seq. ID no. 12665857
MALEALTSPRLASPIPPLFEDSSVFHGVEHWTKGKRSKRSRSDFHHQNLTEEEYLAFCLMLLARDNRQPPPPPAVEKLSYKCSVCDKTFSSYQALGGHKASHRKNLSQTLSGGGDDHSTSSATTTSAVTTGSGKSHVCTICNKSFPSGQALGGHKRCHYEGNNNINTSSVSNSEGAGSTSHVSSSHRGFDLNIPPIPEFSMVNGDDEVMSPMPAKKPRFDFPVKLQL

SEQ ID NO: 82465 - protein, 168 aa, Arabidopsis thaliana
  peptide (1)..(168): Ceres Seq. ID no. 12665858
MLLARDNRQPPPPPAVEKLSYKCSVCDKTFSSYQALGGHKASHRKNLSQTLSGGGDDHSTSSATTTSAVTTGSGKSHVCTICNKSFPSGQALGGHKRCHYEGNNNINTSSVSNSEGAGSTSHVSSSHRGFDLNIPPIPEFSMVNGDDEVMSPMPAKKPRFDFPVKLQL

SEQ ID NO: 82466 - DNA, 1642 bp, Arabidopsis thaliana
  misc_feature (1)..(1642): Ceres Seq. ID no. 12665879
  misc_feature (1)..(1642): Ortholog of  Ceres SEQ ID NO 14313074 as cited in SEQ ID NO 59199
gtgagaaatggatttgtcatcattcttctcaccgtccttagtctctgaaaataaattctgattttgatttcgaattttagggattttgagagagagtcagttatgagtagttcggagagagtaccgtgcgatttctgcggcgagcgtacggcggttttgttttgtagagccgatacggcgaagctgtgtttgccttgtgatcagcaagttcacacggcgaatctgttgtcgaggaagcacgtgcgatctcagatctgcgataattgcggtaacgagccagtctctgttcggtgtttcaccgataatctgattttgtgtcaggagtgtgattgggatgttcacggaagttgttcagtttccgatgctcatgttcgatccgccgtggaaggtttttccggttgtccatcggcgttggagcttgctgctttatggggacttgatttggagcaagggaggaaagatgaagagaatcaagttccgatgatggcgatgatgatggataatttcgggatgcagttggattcttgggttttgggatctaatgaattgattgttcccagcgatacgacgtttaagaagcgtggatcttgtggatctagttgtgggaggtataagcaggtattgtgtaagcagcttgaggagttgcttaagagtggtgttgtcggtggtgatggcgatgatggtgatcgtgaccgtgattgtgaccgtgagggtgcttgtgatggagatggagatggagaagcaggagaggggcttatggttccggagatgtcagagagattgaaatggtcaagagatgttgaggagatcaatggtggcggaggaggaggagttaaccagcagtggaatgctactactactaatcctagtggtggccagagttctcagatatgggattttaacttgggacagtcacggggacctgaggatacgagtcgagtggaagctgcatatgtagggaaaggtgctgcttcttcattcacaatcaacaattttgttgaccatatgaatgaaacttgttccactaatgtgaaaggtgtcaaagagattaaaaaggatgactacaagcgatcaacttcaggccaggtacaaccaacaaaatctgagagcaacaatcgtccaattacctttggctctgagaaaggttcgaactcctccagtgacttgcatttcacagagcatattgctggaactagttgtaagaccacaagactagttgcaactaaggctgatctggagcggctggctcagaacagaggagatgcaatgcagcgttacaaggaaaagaggaagacacggagatatgataagaccataaggtatgaatcgaggaaggcaagagctgacactaggttgcgtgtcagaggcagatttgtgaaagctagtgaagctccttacccttaaccttaagtctcttcacataggcttccttttagctacaaacttagttactttttttacttccactgcctcataaatgtacagaccggtctcgtttcatctggccgcccttctgttttattgccttatctggcccttttatgtaccttggaatcttatctagtttaaaaaagattgtaaccttctagaaaaccatattctgttgacagtatatacatgtctatccaagcattttgaagtc

SEQ ID NO: 82467 - protein, 433 aa, Arabidopsis thaliana
  peptide (1)..(433): Ceres Seq. ID no. 12665880
MSSSERVPCDFCGERTAVLFCRADTAKLCLPCDQQVHTANLLSRKHVRSQICDNCGNEPVSVRCFTDNLILCQECDWDVHGSCSVSDAHVRSAVEGFSGCPSALELAALWGLDLEQGRKDEENQVPMMAMMMDNFGMQLDSWVLGSNELIVPSDTTFKKRGSCGSSCGRYKQVLCKQLEELLKSGVVGGDGDDGDRDRDCDREGACDGDGDGEAGEGLMVPEMSERLKWSRDVEEINGGGGGGVNQQWNATTTNPSGGQSSQIWDFNLGQSRGPEDTSRVEAAYVGKGAASSFTINNFVDHMNETCSTNVKGVKEIKKDDYKRSTSGQVQPTKSESNNRPITFGSEKGSNSSSDLHFTEHIAGTSCKTTRLVATKADLERLAQNRGDAMQRYKEKRKTRRYDKTIRYESRKARADTRLRVRGRFVKASEAPYP

SEQ ID NO: 82468 - protein, 307 aa, Arabidopsis thaliana
  peptide (1)..(307): Ceres Seq. ID no. 12665881
MMAMMMDNFGMQLDSWVLGSNELIVPSDTTFKKRGSCGSSCGRYKQVLCKQLEELLKSGVVGGDGDDGDRDRDCDREGACDGDGDGEAGEGLMVPEMSERLKWSRDVEEINGGGGGGVNQQWNATTTNPSGGQSSQIWDFNLGQSRGPEDTSRVEAAYVGKGAASSFTINNFVDHMNETCSTNVKGVKEIKKDDYKRSTSGQVQPTKSESNNRPITFGSEKGSNSSSDLHFTEHIAGTSCKTTRLVATKADLERLAQNRGDAMQRYKEKRKTRRYDKTIRYESRKARADTRLRVRGRFVKASEAPYP

SEQ ID NO: 82469 - protein, 306 aa, Arabidopsis thaliana
  peptide (1)..(306): Ceres Seq. ID no. 12665882
MAMMMDNFGMQLDSWVLGSNELIVPSDTTFKKRGSCGSSCGRYKQVLCKQLEELLKSGVVGGDGDDGDRDRDCDREGACDGDGDGEAGEGLMVPEMSERLKWSRDVEEINGGGGGGVNQQWNATTTNPSGGQSSQIWDFNLGQSRGPEDTSRVEAAYVGKGAASSFTINNFVDHMNETCSTNVKGVKEIKKDDYKRSTSGQVQPTKSESNNRPITFGSEKGSNSSSDLHFTEHIAGTSCKTTRLVATKADLERLAQNRGDAMQRYKEKRKTRRYDKTIRYESRKARADTRLRVRGRFVKASEAPYP

SEQ ID NO: 82470 - DNA, 981 bp, Arabidopsis thaliana
  misc_feature (1)..(981): Ceres Seq. ID no. 12665887
  misc_feature (1)..(981): Ortholog of  Ceres SEQ ID NO 12614972 as cited in SEQ ID NO 61986
  misc_feature (1)..(981): Ortholog of  Ceres SEQ ID NO 14302317 as cited in SEQ ID NO 63244
  misc_feature (1)..(981): Ortholog of  Ceres SEQ ID NO 12625706 as cited in SEQ ID NO 64144
  misc_feature (1)..(981): Ortholog of  Ceres SEQ ID NO 13584933 as cited in SEQ ID NO 65009
  misc_feature (1)..(981): Ortholog of  Ceres SEQ ID NO 12634984 as cited in SEQ ID NO 0
  misc_feature (1)..(981): Ortholog of  Ceres SEQ ID NO 13599377 as cited in SEQ ID NO 0
atggatgagaccaagatcccaaagaaactgcaaagcgatgacgaagaaaacataagtttgatttcttcacttccctttgacgtagatttcgacagcacgaagctcttcaaataccaaggatgttggtacgacgacaaaactctgcaaggagtcctcaattttcaaagaggtttcgagccacaagacaccgatataattattgcttcgttccccaaatctggcactacttggctcaaagctctcacggtagctctcctcgagagatccaaacagaaacactcttctgatgatcatcctcttctacttgataatcctcatggactggtaccattcctcgagctcaggctgttcactgagacctcgaaaccagatctgaccagtatctcatcgtcgccgaggttattttcgactcatgtggcgttccaaacgctgcgagaggctctcaaaaactctccttgtaagatcgtttacgtgtggaggaacgtgaaagacgtactggtgtcgttttggtatttcaacagcgcaaaactaaagatagaagaggagagaagcattttggattcaatgttcgagtccttttgcagaggagttatcaattacggaccatcctgggaacatgtcttgaactattggagagcaagcttggaagactccaagaatgtgcttttcttgaagtacgaggagttaaaaacagaacctcgcgtgcagctgaagagacttgccgagttcttggattgtccttttacggtggaagaagaagagaggggatcagtggaagagatcttggacctttgctcattgcgtaacttgaagaatttggagatcaacaagaccggaaaaacgcttaggggggccgatcacaagattttttttcgtaaaggggaagtcggtgactcgaagaatcatctgactcctgaaatggagaagataattgacatgatcactgaggagaaatttgaaggttcggatttgaaattctga

SEQ ID NO: 82471 - protein, 326 aa, Arabidopsis thaliana
  peptide (1)..(326): Ceres Seq. ID no. 12665888
MDETKIPKKLQSDDEENISLISSLPFDVDFDSTKLFKYQGCWYDDKTLQGVLNFQRGFEPQDTDIIIASFPKSGTTWLKALTVALLERSKQKHSSDDHPLLLDNPHGLVPFLELRLFTETSKPDLTSISSSPRLFSTHVAFQTLREALKNSPCKIVYVWRNVKDVLVSFWYFNSAKLKIEEERSILDSMFESFCRGVINYGPSWEHVLNYWRASLEDSKNVLFLKYEELKTEPRVQLKRLAEFLDCPFTVEEEERGSVEEILDLCSLRNLKNLEINKTGKTLRGADHKIFFRKGEVGDSKNHLTPEMEKIIDMITEEKFEGSDLKF

SEQ ID NO: 82472 - DNA, 1309 bp, Arabidopsis thaliana
  misc_feature (1)..(1309): Ceres Seq. ID no. 12665901
  misc_feature (1)..(1309): Ortholog of  Ceres SEQ ID NO 13582564 as cited in SEQ ID NO 56447
tctctccctctctctctctctctctccgggaaaaatggataacttcttaccctttccctcttctaacgcaaactctgtccaagaactctctatggatcctaacaacaatcgctcgcacttcacaacagtccctacttatgatcatcatcaggctcagcctcatcacttcttgcctccgttttcatacccggtggagcagatggcggcggtgatgaatcctcagccggtttacttatcggagtgttatcctcagatcccggttacgcaaaccggaagtgaattcggttctctggttggtaatccttgtttgtggcaagagagaggtggttttcttgatccgcgtatgacgaagatggcaaggatcaacaggaaaaacgccatgatgagatcaagaaacaactctagccctaattctagtccaagtgagttggttgattcaaagagacagctgatgatgcttaacttgaaaaataacgtgcagatctccgacaagaaagatagctaccaacagtccacatttgataacaagaagcttagggttttgtgtgagaaggaattgaagaacagcgatgttgggtcactcgggaggatagttctaccaaagagagatgcagaagcaaatcttccgaagctatctgataaagaaggaatcgttgtacagatgagagatgttttctctatgcagtcttggtctttcaaatacaagttttggtccaataacaagagcagaatgtatgtcctcgagaacacaggagaatttgtgaagcaaaatggagctgagataggagactttttaacaatatacgaggacgaaagcaagaatctctacttcgccatgaatggaaattcgggaaaacaaaatgaaggaagagaaaatgagtcgagggaaaggaaccactacgaagaggcaatgcttgattacataccaagagacgaagaggaagcttccattgcaatgctcatcggaaatctaaacgatcactatcccatccctaacgatctcatggacctcaccactgaccttcagcaccatcaagccacgtcctcatcaatgccacctgaggatcacgcgtacgtgggttcatccgatgatcaggtgagctttaacgactttgagtggtggtgatatggtggtggaagttctcaagttcataaccccctttatgaaaatagaccttaagatatacaaaagagattaaaagaaaaaaaagttagtatatttcatcatatctctcattgaagatgagatttatatctataattgtttaatagtgtttttattacttttctatcaatatattaaagtttt

SEQ ID NO: 82473 - protein, 374 aa, Arabidopsis thaliana
  peptide (1)..(374): Ceres Seq. ID no. 12665902
LSLSLSLSPGKMDNFLPFPSSNANSVQELSMDPNNNRSHFTTVPTYDHHQAQPHHFLPPFSYPVEQMAAVMNPQPVYLSECYPQIPVTQTGSEFGSLVGNPCLWQERGGFLDPRMTKMARINRKNAMMRSRNNSSPNSSPSELVDSKRQLMMLNLKNNVQISDKKDSYQQSTFDNKKLRVLCEKELKNSDVGSLGRIVLPKRDAEANLPKLSDKEGIVVQMRDVFSMQSWSFKYKFWSNNKSRMYVLENTGEFVKQNGAEIGDFLTIYEDESKNLYFAMNGNSGKQNEGRENESRERNHYEEAMLDYIPRDEEEASIAMLIGNLNDHYPIPNDLMDLTTDLQHHQATSSSMPPEDHAYVGSSDDQVSFNDFEWW

SEQ ID NO: 82474 - protein, 363 aa, Arabidopsis thaliana
  peptide (1)..(363): Ceres Seq. ID no. 12665903
MDNFLPFPSSNANSVQELSMDPNNNRSHFTTVPTYDHHQAQPHHFLPPFSYPVEQMAAVMNPQPVYLSECYPQIPVTQTGSEFGSLVGNPCLWQERGGFLDPRMTKMARINRKNAMMRSRNNSSPNSSPSELVDSKRQLMMLNLKNNVQISDKKDSYQQSTFDNKKLRVLCEKELKNSDVGSLGRIVLPKRDAEANLPKLSDKEGIVVQMRDVFSMQSWSFKYKFWSNNKSRMYVLENTGEFVKQNGAEIGDFLTIYEDESKNLYFAMNGNSGKQNEGRENESRERNHYEEAMLDYIPRDEEEASIAMLIGNLNDHYPIPNDLMDLTTDLQHHQATSSSMPPEDHAYVGSSDDQVSFNDFEWW

SEQ ID NO: 82475 - protein, 344 aa, Arabidopsis thaliana
  peptide (1)..(344): Ceres Seq. ID no. 12665904
MDPNNNRSHFTTVPTYDHHQAQPHHFLPPFSYPVEQMAAVMNPQPVYLSECYPQIPVTQTGSEFGSLVGNPCLWQERGGFLDPRMTKMARINRKNAMMRSRNNSSPNSSPSELVDSKRQLMMLNLKNNVQISDKKDSYQQSTFDNKKLRVLCEKELKNSDVGSLGRIVLPKRDAEANLPKLSDKEGIVVQMRDVFSMQSWSFKYKFWSNNKSRMYVLENTGEFVKQNGAEIGDFLTIYEDESKNLYFAMNGNSGKQNEGRENESRERNHYEEAMLDYIPRDEEEASIAMLIGNLNDHYPIPNDLMDLTTDLQHHQATSSSMPPEDHAYVGSSDDQVSFNDFEWW

SEQ ID NO: 82476 - DNA, 1621 bp, Arabidopsis thaliana
  misc_feature (1)..(1621): Ceres Seq. ID no. 12665920
  misc_feature (1)..(1621): Ortholog of  Ceres SEQ ID NO 13654989 as cited in SEQ ID NO 63117
  misc_feature (1)..(1621): Ortholog of  Ceres SEQ ID NO 13584744 as cited in SEQ ID NO 69137
tctctctctctaaatctctcccatgggttatctctcttgcaacggcgaatccgccgtcgcaatctgcgatacttataactggaatcctcgtcgacgatctaaagtaccggagaaacgtcatcctcctaagcttcgggttttcaactacgacgaactcgccgtcgctactaacggcttctccgccaataacttcctcggaaaaggaagtcacggcagagtttacaaagcagttctcgacgacggaaagcttctcgccgccgtcaagagaacaacaatcaccactaccgttggtaataacaataacaacgtgagtcaggtagacaatgagatcgagattctttcacgggttcgtcaccgttggatggtcaacttaatcggttactgcgttgaccaccggaggaaaacaaagctgttagtcgtcgagtacatgcctaacggtacgcttcacgatcagttacattctcgtagttcgttagattcacggttaagtagttggaatcggagaattaaacacgcgcttcagatcgcgattgctgtccacgctcttcacaccgcagagactcaagtgatccaccgtgacattaaatcgtgtaacgttttaatagacggtgacggtaacgctaggttagctgatttcggattagcattgatcggaaacgttgacgatgagcgtttgaaatatactccgccggcgggtacgttgggatatttagatccgtcgtacttagcaccggcggacttgacggctaagagcgatgttttcagctttgggatattgttgttggagattattagtggtagagaagccattgatttgaattatagtccgtcgtgtatcgttgattgggcggtgccgcttatcaaacgcggcgattacgacgcgatttgtgatttgaagattaagaaccgtccttattacgccgtgattcggaagttggccgttatggcggctaggtgtgttagatcgacggcgaagaaacgtccagatatgttagaggttgttgagtgtttgaaaacggtgaggcagttatctccggcgtggaataaactgcggcggaggagtgaagagagatcggaaaatgttttggcggttgaggaagagaaggaagagattcatgtgaggattgtgagaggaggaagcaggaagaatcggaaggtatcgaacgtgacgacgagtgtggatgatgtttacgagagattagttccggaggaaacgctgccgtttcgtcgtcggaattttgtgctgagatcgagatcagtaggagcgaaagttggaccggatccatacgacgggtttggtgatgagacggtggttacaatgagattacttattgagaaagaaagaccggtgacgacggcagcgatgaggctgagtaagtcgaggtcggtggggattgtacgtagtcataaaacggcgtcgcggaagagatactgacatgttaactaaaagtcagcattttgacaggctatttgtttgaccgttgcctgttttgttttccacttttttctttctatttttgtttttttctgtctcatgtgtttgtctttttttattgagttgatattttggtttttgttttgttttggttgttgtattgaataaaattttgtgtttgctacg

SEQ ID NO: 82477 - protein, 470 aa, Arabidopsis thaliana
  peptide (1)..(470): Ceres Seq. ID no. 12665921
MGYLSCNGESAVAICDTYNWNPRRRSKVPEKRHPPKLRVFNYDELAVATNGFSANNFLGKGSHGRVYKAVLDDGKLLAAVKRTTITTTVGNNNNNVSQVDNEIEILSRVRHRWMVNLIGYCVDHRRKTKLLVVEYMPNGTLHDQLHSRSSLDSRLSSWNRRIKHALQIAIAVHALHTAETQVIHRDIKSCNVLIDGDGNARLADFGLALIGNVDDERLKYTPPAGTLGYLDPSYLAPADLTAKSDVFSFGILLLEIISGREAIDLNYSPSCIVDWAVPLIKRGDYDAICDLKIKNRPYYAVIRKLAVMAARCVRSTAKKRPDMLEVVECLKTVRQLSPAWNKLRRRSEERSENVLAVEEEKEEIHVRIVRGGSRKNRKVSNVTTSVDDVYERLVPEETLPFRRRNFVLRSRSVGAKVGPDPYDGFGDETVVTMRLLIEKERPVTTAAMRLSKSRSVGIVRSHKTASRKRY

SEQ ID NO: 82478 - protein, 357 aa, Arabidopsis thaliana
  peptide (1)..(357): Ceres Seq. ID no. 12665922
MVNLIGYCVDHRRKTKLLVVEYMPNGTLHDQLHSRSSLDSRLSSWNRRIKHALQIAIAVHALHTAETQVIHRDIKSCNVLIDGDGNARLADFGLALIGNVDDERLKYTPPAGTLGYLDPSYLAPADLTAKSDVFSFGILLLEIISGREAIDLNYSPSCIVDWAVPLIKRGDYDAICDLKIKNRPYYAVIRKLAVMAARCVRSTAKKRPDMLEVVECLKTVRQLSPAWNKLRRRSEERSENVLAVEEEKEEIHVRIVRGGSRKNRKVSNVTTSVDDVYERLVPEETLPFRRRNFVLRSRSVGAKVGPDPYDGFGDETVVTMRLLIEKERPVTTAAMRLSKSRSVGIVRSHKTASRKRY

SEQ ID NO: 82479 - protein, 335 aa, Arabidopsis thaliana
  peptide (1)..(335): Ceres Seq. ID no. 12665923
MPNGTLHDQLHSRSSLDSRLSSWNRRIKHALQIAIAVHALHTAETQVIHRDIKSCNVLIDGDGNARLADFGLALIGNVDDERLKYTPPAGTLGYLDPSYLAPADLTAKSDVFSFGILLLEIISGREAIDLNYSPSCIVDWAVPLIKRGDYDAICDLKIKNRPYYAVIRKLAVMAARCVRSTAKKRPDMLEVVECLKTVRQLSPAWNKLRRRSEERSENVLAVEEEKEEIHVRIVRGGSRKNRKVSNVTTSVDDVYERLVPEETLPFRRRNFVLRSRSVGAKVGPDPYDGFGDETVVTMRLLIEKERPVTTAAMRLSKSRSVGIVRSHKTASRKRY

SEQ ID NO: 82480 - DNA, 657 bp, Arabidopsis thaliana
  misc_feature (1)..(657): Ceres Seq. ID no. 12665941
  misc_feature (1)..(657): Ortholog of  Ceres SEQ ID NO 15175034 as cited in SEQ ID NO 62432
  misc_feature (1)..(657): Ortholog of  Ceres SEQ ID NO 12619999 as cited in SEQ ID NO 66123
  misc_feature (1)..(657): Ortholog of  Ceres SEQ ID NO 13656436 as cited in SEQ ID NO 69154
atgggagcatatagagcagaagacgattatgattacctcttcaaggtggtcttaaccggagattccggcgtcgggaaatctaatttgttatctcgtttcaccagaaatgatttcagccacgactcacgtgcaaccatcggtgtcgaattcgccacacgaagcatccaatgcgatgataagatcgtcaaggctcaaatatgggataccgccggccaagaaaggtaccgagccatcacgagcgcttattaccgaggagctgttggtgcattgcttgtttatgacgtgacgcgccacgtgacattcgagaatgttgagagatggctaaaggagcttagggaccacacggacgcaaacattgtgatcatgctcgttggcaacaaagctgatcttcgtcaccttcgagccatctcaaccgaagaagctaaagcttttgcagagagggagaatacctttttcatggagacttctgcacttgaagctgtgaatgttgataatgctttcactgaagttctcactcagatttacagagttgttagcaagaaggctcttgaagctggagatgatccaaccactgctttgcctaaaggacagatgattaatgttggaggccgagatgatatctcagccgttaaaaaacctggttgctgctctgcatag

SEQ ID NO: 82481 - protein, 218 aa, Arabidopsis thaliana
  peptide (1)..(218): Ceres Seq. ID no. 12665942
MGAYRAEDDYDYLFKVVLTGDSGVGKSNLLSRFTRNDFSHDSRATIGVEFATRSIQCDDKIVKAQIWDTAGQERYRAITSAYYRGAVGALLVYDVTRHVTFENVERWLKELRDHTDANIVIMLVGNKADLRHLRAISTEEAKAFAERENTFFMETSALEAVNVDNAFTEVLTQIYRVVSKKALEAGDDPTTALPKGQMINVGGRDDISAVKKPGCCSA

SEQ ID NO: 82482 - DNA, 1451 bp, Arabidopsis thaliana
  misc_feature (1)..(1451): Ceres Seq. ID no. 12665943
  misc_feature (1)..(1451): Ortholog of  Ceres SEQ ID NO 13592961 as cited in SEQ ID NO 20522
  misc_feature (1)..(1451): Ortholog of  Ceres SEQ ID NO 12583469 as cited in SEQ ID NO 51031
  misc_feature (1)..(1451): Ortholog of  Ceres SEQ ID NO 13597389 as cited in SEQ ID NO 63426
  misc_feature (1)..(1451): Ortholog of  Ceres SEQ ID NO 15169639 as cited in SEQ ID NO 64624
  misc_feature (1)..(1451): Ortholog of  Ceres SEQ ID NO 14303071 as cited in SEQ ID NO 67114
  misc_feature (1)..(1451): Ortholog of  Ceres SEQ ID NO 13595998 as cited in SEQ ID NO 68161
  misc_feature (1)..(1451): Ortholog of  Ceres SEQ ID NO 14303635 as cited in SEQ ID NO 68503
agctctctggcaatggcgtatcccggttcgcctatcttgatgaagctcctcgtcttcatctttttatcaacttttgtagtcactaacgtgagctcggaaactaagtgccgggagttcaaatcgatcatcagtttcggagattccattgccgacactggaaacttgcttggcctctcagatcctaaagatcttcctcacatggcgtttccaccgtatggagagaacttcttccaccacccaactggtcgtttctccaacggccgcctcatcattgatttcatcgctgaattcttgggtttaccgcttgtgcctccattctatggatctcataatgcaaactttgaaaagggagttaatttcgcggtagggggagcaaccgctttggaacgttcctttcttgaagacagaggaattcattttccttacactaatgtgagtttaggcgttcagcttaatagcttcaaggagagtttacctagcatatgtggctctccttcagactgtagagatatgatagaaaatgctttgattctcatgggggaaattggagggaatgactataactacgcgttcttcgtggacaaaggcattgaagagatcaaggagctgatgcccctggtgatcactactatttcttctgcaatcacggagttgatcggtatggggggaagaacatttttggtgcccggagagttcccagtcggatgctcagtattgtatttgacatcacatcaaacatcaaacatggaagaatacgatcctttaacaggatgtttgaaatggctgaacaagtttggtgaaaaccatggtgagcagcttagagcagaactcaacagactccagaagttgtaccctcatgttaacatcatatacgctgactactacaacgcgctgtttcacctttatcaagaaccagccaaattcggattcatgaacagacctttgtccgcttgttgcggcgcaggaggaccgtacaactataccgtaggtaggaaatgtgggactgatatagttgaaagttgtgatgatccttcaaagtatgtggcttgggacggtgttcatatgactgaggctgcgtacagattgatggctgagggtatactaaatggaccgtatgcgattcctccttttgattggtcttgccgtagctctggagttaagaacagtgggtcatctgacacatagaattctttgatgagaaactgatacaagttggtcaaaaaattgagaaaaggatactgataaaaacatgtatgttccttagtattgtcttggatcatgttcatgtattgtatcatgttgttatgtgaaataatttaaaagggtatcatgttcatgtatactccactccatatagagagtaagtaaccggcaacggcattgaaaacttggagataaattggaatatttgttgattcaatttggaaaatggcaaaaacaaattatttagc

SEQ ID NO: 82483 - protein, 394 aa, Arabidopsis thaliana
  peptide (1)..(394): Ceres Seq. ID no. 12665944
SSLAMAYPGSPILMKLLVFIFLSTFVVTNVSSETKCREFKSIISFGDSIADTGNLLGLSDPKDLPHMAFPPYGENFFHHPTGRFSNGRLIIDFIAEFLGLPLVPPFYGSHNANFEKGVNFAVGGATALERSFLEDRGIHFPYTNVSLGVQLNSFKESLPSICGSPSDCRDMIENALILMGEIGGNDYNYAFFVDKGIEEIKELMPLVITTISSAITELIGMGGRTFLVPGEFPVGCSVLYLTSHQTSNMEEYDPLTGCLKWLNKFGENHGEQLRAELNRLQKLYPHVNIIYADYYNALFHLYQEPAKFGFMNRPLSACCGAGGPYNYTVGRKCGTDIVESCDDPSKYVAWDGVHMTEAAYRLMAEGILNGPYAIPPFDWSCRSSGVKNSGSSDT

SEQ ID NO: 82484 - protein, 390 aa, Arabidopsis thaliana
  peptide (1)..(390): Ceres Seq. ID no. 12665945
MAYPGSPILMKLLVFIFLSTFVVTNVSSETKCREFKSIISFGDSIADTGNLLGLSDPKDLPHMAFPPYGENFFHHPTGRFSNGRLIIDFIAEFLGLPLVPPFYGSHNANFEKGVNFAVGGATALERSFLEDRGIHFPYTNVSLGVQLNSFKESLPSICGSPSDCRDMIENALILMGEIGGNDYNYAFFVDKGIEEIKELMPLVITTISSAITELIGMGGRTFLVPGEFPVGCSVLYLTSHQTSNMEEYDPLTGCLKWLNKFGENHGEQLRAELNRLQKLYPHVNIIYADYYNALFHLYQEPAKFGFMNRPLSACCGAGGPYNYTVGRKCGTDIVESCDDPSKYVAWDGVHMTEAAYRLMAEGILNGPYAIPPFDWSCRSSGVKNSGSSDT

SEQ ID NO: 82485 - protein, 381 aa, Arabidopsis thaliana
  peptide (1)..(381): Ceres Seq. ID no. 12665946
MKLLVFIFLSTFVVTNVSSETKCREFKSIISFGDSIADTGNLLGLSDPKDLPHMAFPPYGENFFHHPTGRFSNGRLIIDFIAEFLGLPLVPPFYGSHNANFEKGVNFAVGGATALERSFLEDRGIHFPYTNVSLGVQLNSFKESLPSICGSPSDCRDMIENALILMGEIGGNDYNYAFFVDKGIEEIKELMPLVITTISSAITELIGMGGRTFLVPGEFPVGCSVLYLTSHQTSNMEEYDPLTGCLKWLNKFGENHGEQLRAELNRLQKLYPHVNIIYADYYNALFHLYQEPAKFGFMNRPLSACCGAGGPYNYTVGRKCGTDIVESCDDPSKYVAWDGVHMTEAAYRLMAEGILNGPYAIPPFDWSCRSSGVKNSGSSDT

SEQ ID NO: 82486 - DNA, 1656 bp, Arabidopsis thaliana
  misc_feature (1)..(1656): Ceres Seq. ID no. 12665951
  misc_feature (1)..(1656): Ortholog of  Ceres SEQ ID NO 14313167 as cited in SEQ ID NO 54354
atggaggtcaaaagcgtgaacaccacggcgatgatacttggtctattttttctaatcagcttcgtcgctgcggaagatccgtataaattcttcgaatggcacgtaacttatggtaacatatctccgctcaaggttgcacaacagggtatattgatcaatgggaagttcccaggaccggacatcgccgctgttaccaatgataatctcatcattaacgtattcaaccatctcgacgaacctttccttatatcatggagcgggattcgaaactggaggaattcataccaggacggagtgtacgggacgacgtgtccaatcccgccggggaaaaactacacctacgctcttcaggttaaagatcagattggaagtttctactacttcccctctctcggctttcacaaagccgccggtggatttggagctattcgtatctccagccgccccagaatccccgttccattcccagcccccgctggtgattacaccgttctcatcggtgactggtacaaaaccaaccataaggacttgagagcacaactcgataatggtggaaagcttccattcccggatggaattctcatcaatgggcgcggtagtggcgccaccctcaacattgaaccaggtaagacttatagactgaggatatcaaatgttggattgcaaaactctctcaacttccgaatccaaaaccacaagatgaagttagttgaggtcgaagggacacacactattcagactccattctcttcgcttgatgttcacgtcggtcaatcttactcggtccttataacagctgaccagcctgcaaaagattattacattgtggtctctagtaggtttacctcgaagatccttattaccgctggtgttcttcattacagtaattctgctggacctgtttctggacctattccagaagcaccaattcagttgcgctggtcttttgaccaagcacgagccatcaagaccaaccttgcagcgagtggacctaggccaaacccacaaggtacataccactatggcaagataaaagtcactcgaacaatcaaacttgctagctctgctggaaatatcaatggcaagcaacgatacgcggtgaatagtgcatcattctacccaacagacacacctttgaaactagcggactacttcaaaattgccggtgtatacaaccctggaagcatacctgatcagcccacacatggagcaatataccctgtcacatctgttatgcaaactgattacaaagcttttgtggagattgttttcgagaattgggaagatattgtccagacctggcacctcgacggttactctttcttcgtggttgggatggaacttgggaagtggagtgctgccagtagaaaagtctacaatctaaacgacgcagtctcacggtgcactgttcaggtgtatccaagatcatggactgccatatacgtatcactggacaatgtaggaatgtggaacctaagatcagagttatgggaaagacaatacctgggacaacagttttacatgcgtgtttacacaccctccacttccctcagagatgagtacttgatcccgaagaacgctcttctctgcggcagggccactggccaccacaccacgacacccggtcctctgagtgaaggaagtgagaggttttga

SEQ ID NO: 82487 - protein, 551 aa, Arabidopsis thaliana
  peptide (1)..(551): Ceres Seq. ID no. 12665952
MEVKSVNTTAMILGLFFLISFVAAEDPYKFFEWHVTYGNISPLKVAQQGILINGKFPGPDIAAVTNDNLIINVFNHLDEPFLISWSGIRNWRNSYQDGVYGTTCPIPPGKNYTYALQVKDQIGSFYYFPSLGFHKAAGGFGAIRISSRPRIPVPFPAPAGDYTVLIGDWYKTNHKDLRAQLDNGGKLPFPDGILINGRGSGATLNIEPGKTYRLRISNVGLQNSLNFRIQNHKMKLVEVEGTHTIQTPFSSLDVHVGQSYSVLITADQPAKDYYIVVSSRFTSKILITAGVLHYSNSAGPVSGPIPEAPIQLRWSFDQARAIKTNLAASGPRPNPQGTYHYGKIKVTRTIKLASSAGNINGKQRYAVNSASFYPTDTPLKLADYFKIAGVYNPGSIPDQPTHGAIYPVTSVMQTDYKAFVEIVFENWEDIVQTWHLDGYSFFVVGMELGKWSAASRKVYNLNDAVSRCTVQVYPRSWTAIYVSLDNVGMWNLRSELWERQYLGQQFYMRVYTPSTSLRDEYLIPKNALLCGRATGHHTTTPGPLSEGSERF

SEQ ID NO: 82488 - protein, 541 aa, Arabidopsis thaliana
  peptide (1)..(541): Ceres Seq. ID no. 12665953
MILGLFFLISFVAAEDPYKFFEWHVTYGNISPLKVAQQGILINGKFPGPDIAAVTNDNLIINVFNHLDEPFLISWSGIRNWRNSYQDGVYGTTCPIPPGKNYTYALQVKDQIGSFYYFPSLGFHKAAGGFGAIRISSRPRIPVPFPAPAGDYTVLIGDWYKTNHKDLRAQLDNGGKLPFPDGILINGRGSGATLNIEPGKTYRLRISNVGLQNSLNFRIQNHKMKLVEVEGTHTIQTPFSSLDVHVGQSYSVLITADQPAKDYYIVVSSRFTSKILITAGVLHYSNSAGPVSGPIPEAPIQLRWSFDQARAIKTNLAASGPRPNPQGTYHYGKIKVTRTIKLASSAGNINGKQRYAVNSASFYPTDTPLKLADYFKIAGVYNPGSIPDQPTHGAIYPVTSVMQTDYKAFVEIVFENWEDIVQTWHLDGYSFFVVGMELGKWSAASRKVYNLNDAVSRCTVQVYPRSWTAIYVSLDNVGMWNLRSELWERQYLGQQFYMRVYTPSTSLRDEYLIPKNALLCGRATGHHTTTPGPLSEGSERF

SEQ ID NO: 82489 - protein, 318 aa, Arabidopsis thaliana
  peptide (1)..(318): Ceres Seq. ID no. 12665954
MKLVEVEGTHTIQTPFSSLDVHVGQSYSVLITADQPAKDYYIVVSSRFTSKILITAGVLHYSNSAGPVSGPIPEAPIQLRWSFDQARAIKTNLAASGPRPNPQGTYHYGKIKVTRTIKLASSAGNINGKQRYAVNSASFYPTDTPLKLADYFKIAGVYNPGSIPDQPTHGAIYPVTSVMQTDYKAFVEIVFENWEDIVQTWHLDGYSFFVVGMELGKWSAASRKVYNLNDAVSRCTVQVYPRSWTAIYVSLDNVGMWNLRSELWERQYLGQQFYMRVYTPSTSLRDEYLIPKNALLCGRATGHHTTTPGPLSEGSERF

SEQ ID NO: 82490 - DNA, 1617 bp, Arabidopsis thaliana
  misc_feature (1)..(1617): Ceres Seq. ID no. 12665955
  misc_feature (1)..(1617): Ortholog of  Ceres SEQ ID NO 14313167 as cited in SEQ ID NO 54354
atgaaggtcaaaagcatgaacactagggcgatgataaccactctattgtttctaatcagcctcgccttcgctgaagatccatacagattcttcgaatggcacgtaacctatggcaacatatctcctcttggtgttgcgcaacagggtatattgattaacgggaagtttccaggaccagacatcatctctattaccaatgacaatctcatcattaacgtattcaaccatctcgacgaacctttccttttgtcttggaacgggattcgaaattggaaaaattcgttccaggatggagtctacggaacgatgtgcccaatcccaccggggaagaactacacttacgctcttcaggttaaagatcagatcggaagtttctactacttcccctctctaggatttcacaaagctgccggcggattcggaggtatccgtatctccagccgtgcattgatccccgtccccttccccactccggccgatgattacactctcctagtaggcgactggtacaaaaccaaccacaaggacttgaaggcacaactcgataatggtggaaaacttcctttaccagatggaattctcataaatggtcgtagtagtggcgccactctcaacattgaaccaggtaagacttatagactgaggatatcaaatgttggattacagaactccctcaacttccgaatccaaaaccatacgatgaagttggttgaggtcgaagggagatacactattcagaatcttttctcttcgcttgatgttcacgttggtcaatcttactcggtccttataacagccgatcagcctgcaaaagattattacgttgtcgtctctagtaggtttacatcaaagatactcactactactggagttcttcattacagtaattctgttgcacctgtttctggacctattccagatggaccaattaagttaagctggtcttttaaccaagctcgagctatcaggaccaaccttacagcaagcggaccaaggccaaacccacaaggttcataccgctatggtgtgataaacatcacccgaacgatcagacttgctaacaatcttggacatattgaaggcaagcaacgatacgccgtgaacagtgcatcattttacccagcagacacccctttgaaactagtggattacttcaaaattgacggtgtatacaagcctggaagtatatctgaccagcccacaaatggagcaatattccctaccacatctgtaatgcaagctgatttcagagcctttgtggaagttattttcgagaattcggaagatattgtccagagctggcacctcgacggttactctttctacgttgttggaatggaacttgggaagtggagtcctgccagtagaaaagtctacaatctaaacgacgcaatcttacggtgcactattcaggtgtatccgagatcatggactgccatatacatagcactggacaatgtaggaatgtggaatatgagatcagagatatgggaaagacaatacttgggacaacagttctacatgcgtgtttacacaacctctacttctctcagagatgaatacttgatccctaagaacgctcttctgtgtggcagggccagcagcagccacagatga

SEQ ID NO: 82491 - protein, 538 aa, Arabidopsis thaliana
  peptide (1)..(538): Ceres Seq. ID no. 12665956
MKVKSMNTRAMITTLLFLISLAFAEDPYRFFEWHVTYGNISPLGVAQQGILINGKFPGPDIISITNDNLIINVFNHLDEPFLLSWNGIRNWKNSFQDGVYGTMCPIPPGKNYTYALQVKDQIGSFYYFPSLGFHKAAGGFGGIRISSRALIPVPFPTPADDYTLLVGDWYKTNHKDLKAQLDNGGKLPLPDGILINGRSSGATLNIEPGKTYRLRISNVGLQNSLNFRIQNHTMKLVEVEGRYTIQNLFSSLDVHVGQSYSVLITADQPAKDYYVVVSSRFTSKILTTTGVLHYSNSVAPVSGPIPDGPIKLSWSFNQARAIRTNLTASGPRPNPQGSYRYGVINITRTIRLANNLGHIEGKQRYAVNSASFYPADTPLKLVDYFKIDGVYKPGSISDQPTNGAIFPTTSVMQADFRAFVEVIFENSEDIVQSWHLDGYSFYVVGMELGKWSPASRKVYNLNDAILRCTIQVYPRSWTAIYIALDNVGMWNMRSEIWERQYLGQQFYMRVYTTSTSLRDEYLIPKNALLCGRASSSHR

SEQ ID NO: 82492 - protein, 533 aa, Arabidopsis thaliana
  peptide (1)..(533): Ceres Seq. ID no. 12665957
MNTRAMITTLLFLISLAFAEDPYRFFEWHVTYGNISPLGVAQQGILINGKFPGPDIISITNDNLIINVFNHLDEPFLLSWNGIRNWKNSFQDGVYGTMCPIPPGKNYTYALQVKDQIGSFYYFPSLGFHKAAGGFGGIRISSRALIPVPFPTPADDYTLLVGDWYKTNHKDLKAQLDNGGKLPLPDGILINGRSSGATLNIEPGKTYRLRISNVGLQNSLNFRIQNHTMKLVEVEGRYTIQNLFSSLDVHVGQSYSVLITADQPAKDYYVVVSSRFTSKILTTTGVLHYSNSVAPVSGPIPDGPIKLSWSFNQARAIRTNLTASGPRPNPQGSYRYGVINITRTIRLANNLGHIEGKQRYAVNSASFYPADTPLKLVDYFKIDGVYKPGSISDQPTNGAIFPTTSVMQADFRAFVEVIFENSEDIVQSWHLDGYSFYVVGMELGKWSPASRKVYNLNDAILRCTIQVYPRSWTAIYIALDNVGMWNMRSEIWERQYLGQQFYMRVYTTSTSLRDEYLIPKNALLCGRASSSHR

SEQ ID NO: 82493 - protein, 528 aa, Arabidopsis thaliana
  peptide (1)..(528): Ceres Seq. ID no. 12665958
MITTLLFLISLAFAEDPYRFFEWHVTYGNISPLGVAQQGILINGKFPGPDIISITNDNLIINVFNHLDEPFLLSWNGIRNWKNSFQDGVYGTMCPIPPGKNYTYALQVKDQIGSFYYFPSLGFHKAAGGFGGIRISSRALIPVPFPTPADDYTLLVGDWYKTNHKDLKAQLDNGGKLPLPDGILINGRSSGATLNIEPGKTYRLRISNVGLQNSLNFRIQNHTMKLVEVEGRYTIQNLFSSLDVHVGQSYSVLITADQPAKDYYVVVSSRFTSKILTTTGVLHYSNSVAPVSGPIPDGPIKLSWSFNQARAIRTNLTASGPRPNPQGSYRYGVINITRTIRLANNLGHIEGKQRYAVNSASFYPADTPLKLVDYFKIDGVYKPGSISDQPTNGAIFPTTSVMQADFRAFVEVIFENSEDIVQSWHLDGYSFYVVGMELGKWSPASRKVYNLNDAILRCTIQVYPRSWTAIYIALDNVGMWNMRSEIWERQYLGQQFYMRVYTTSTSLRDEYLIPKNALLCGRASSSHR

SEQ ID NO: 82494 - DNA, 1474 bp, Arabidopsis thaliana
  misc_feature (1)..(1474): Ceres Seq. ID no. 12665963
  misc_feature (1)..(1474): Ortholog of  Ceres SEQ ID NO 13639645 as cited in SEQ ID NO 57488
acagtcataactaattaagtacatttgaatacatcaaataccaagaaagagaaatttagagagaaagagaaagagataaaatggggagagggttaatgaatagtttgaaaccatacttagcaatgatatctatgcagtttggttatgccggtatgtacataatcaccatggtctctcttaagcatggcatgaaccattacgtcctagccgtttatcgccatgcaattgccactgccgtcatcgctccatttgctcttttccatgaaaggaaaataaggcccaagatgacgttccgaatattcctccaaattgcgctgctcggttttattgagccggtgcttgatcagaacctctactacgtcgggatgacttacacgtcagcaactttcgcttctgctactgctaatgtccttccggccatcaccttcgtcttggccattattttcaggttagaaagcgtgaactttaagaaggtacgaagcatagccaaagttgtaggaacggtgatcacagtctccggagcacttctcatgactctctacaagggtccaatagttgactttatccgattcggcggtggaggaggaggaggtagtgatggtgcaggaggatcccacggtggtgcaggagcggcagcgatggacaaacactggattccgggaacacttatgctgttgggaagaacttttggttgggccggtttcttcatcctacaatcgtttacactgaagcagtacccagctgagctgtcattaacgacgttaatatgtttaatgggaacgttagaaggaaccgctgtttcattggtaacggtacgtgacttgagtgcttggaaaatcggcttcgactctaatctcttcgccgctgcttactccggggtgatttgttcgggagtggcgtattacgtgcaaggagtagtaatgagagaaagaggaccagtttttgttgcgacatttaatccactttgtgtcgttataactgctgctcttggtgttgttgtcttgtctgaaagcattcatctcggaagtgtgattggaacgctatttataatcgtgggcctatacactgttgtatggggtaaaggcaaagacaaaagaatgacggatgatgacgaagattgcaaaggacttccgattaaaagtccggttaaaccggtagataccggtaaaggcttagccgcagaactggagatgaaatcaaaggaaggtcaagaggcaaaggctactactactactcaagttgagatttgaggatgcttatgtactgttgacggaggaagacacaaatctgtctttctttctctgtatattaagtttatgttttttgctttccaaggttacagaaagattttggcacatcagatgtaatatgatgagatgattcaatcatcttgtagttttaactagaagtttttgtgagatatgcaacttcaaaaattatcaaagagatcaataacaatgttttggttctactc

SEQ ID NO: 82495 - protein, 389 aa, Arabidopsis thaliana
  peptide (1)..(389): Ceres Seq. ID no. 12665964
MGRGLMNSLKPYLAMISMQFGYAGMYIITMVSLKHGMNHYVLAVYRHAIATAVIAPFALFHERKIRPKMTFRIFLQIALLGFIEPVLDQNLYYVGMTYTSATFASATANVLPAITFVLAIIFRLESVNFKKVRSIAKVVGTVITVSGALLMTLYKGPIVDFIRFGGGGGGGSDGAGGSHGGAGAAAMDKHWIPGTLMLLGRTFGWAGFFILQSFTLKQYPAELSLTTLICLMGTLEGTAVSLVTVRDLSAWKIGFDSNLFAAAYSGVICSGVAYYVQGVVMRERGPVFVATFNPLCVVITAALGVVVLSESIHLGSVIGTLFIIVGLYTVVWGKGKDKRMTDDDEDCKGLPIKSPVKPVDTGKGLAAELEMKSKEGQEAKATTTTQVEI

SEQ ID NO: 82496 - protein, 384 aa, Arabidopsis thaliana
  peptide (1)..(384): Ceres Seq. ID no. 12665965
MNSLKPYLAMISMQFGYAGMYIITMVSLKHGMNHYVLAVYRHAIATAVIAPFALFHERKIRPKMTFRIFLQIALLGFIEPVLDQNLYYVGMTYTSATFASATANVLPAITFVLAIIFRLESVNFKKVRSIAKVVGTVITVSGALLMTLYKGPIVDFIRFGGGGGGGSDGAGGSHGGAGAAAMDKHWIPGTLMLLGRTFGWAGFFILQSFTLKQYPAELSLTTLICLMGTLEGTAVSLVTVRDLSAWKIGFDSNLFAAAYSGVICSGVAYYVQGVVMRERGPVFVATFNPLCVVITAALGVVVLSESIHLGSVIGTLFIIVGLYTVVWGKGKDKRMTDDDEDCKGLPIKSPVKPVDTGKGLAAELEMKSKEGQEAKATTTTQVEI

SEQ ID NO: 82497 - protein, 375 aa, Arabidopsis thaliana
  peptide (1)..(375): Ceres Seq. ID no. 12665966
MISMQFGYAGMYIITMVSLKHGMNHYVLAVYRHAIATAVIAPFALFHERKIRPKMTFRIFLQIALLGFIEPVLDQNLYYVGMTYTSATFASATANVLPAITFVLAIIFRLESVNFKKVRSIAKVVGTVITVSGALLMTLYKGPIVDFIRFGGGGGGGSDGAGGSHGGAGAAAMDKHWIPGTLMLLGRTFGWAGFFILQSFTLKQYPAELSLTTLICLMGTLEGTAVSLVTVRDLSAWKIGFDSNLFAAAYSGVICSGVAYYVQGVVMRERGPVFVATFNPLCVVITAALGVVVLSESIHLGSVIGTLFIIVGLYTVVWGKGKDKRMTDDDEDCKGLPIKSPVKPVDTGKGLAAELEMKSKEGQEAKATTTTQVEI

SEQ ID NO: 82498 - DNA, 1971 bp, Arabidopsis thaliana
  misc_feature (1)..(1971): Ceres Seq. ID no. 12665990
  misc_feature (1)..(1971): Ortholog of  Ceres SEQ ID NO 13586013 as cited in SEQ ID NO 1182
atgtcggctagagctcatcctgtggacgatgacggagagatttccccggtggaaagatcttccccgcggcaagcaaatacaccgtatgtccacaaagtcgaagttcctcctaagcaaaaccttttcaatgagttcatgtacacttttaaagaaactttcttccacgatgatcctctaaggcatttcaaggaccagtcaaaatccaaaaagctcatgctcggtatccagtccgtctttccggttatcgagtggggaagaaaatataatcttaagttgtttcgcggcgatcttattgccggtttaaccatagccagtctctgcattcctcaggatattggatatgcaaagctcgcgagtcttgaccctaagtatggtctatattcaagttttgttcctccgttggtgtacgcatgtatgggaagctcaaaggatatagcgattggacccgttgcagtggtttcactcctattaggtactctgcttcgtgctgagatcgaccccaacacaaaccctaatgaatatctccgcttagccttcacctccacgttctttgccggtgtcactcaagcagcactcggattcttcagattgggtttcttgatcgatttcttgtcccacgcggcggtggtaggtttcatgggcggagcagccatcaccattgcgctgcaacagctcaaaggcttcctaggaatcaataagttcacaaagaaaaccgatatcatcgcggttctttcttccgtaatcagctcagcccatcacggatggaattggcagacaatactcattagtgcatcgttcttgatcttccttctcatctccaagtttatcgggaagagaaacaagaaactgttttggattccagctattgctccgttagtatctgtcatcatttcaaccttcttcgtctacataacccgagccgacaagaaaggagttcagatagtgaaacatcttgacaaaggtctgaacccttcttctttgcgtctaatatatttctcgggcgattaccttctcaagggcttccgcataggcgttgtctcaggcatggttgccttgacggaagctgtagcgataggaagaacatttgcagcaatgaaagactaccaaatcgatggtaacaaagagatggtagcattaggagcaatgaacgtaatcggttcaatgacctcttgctatgtatccaccggttctttctcaagatccgccgtcaactttatggccggatgtcaaacggcagtctccaacatcatcatgtccattgtcgtcctcttaacgcttctcttcctcactcctcttttcaaatacacacccaacgcaattcttgcagcgatcatcatcaacgctgtgattcctttggttgacgttaatgctaccattttgatcttcaagatcgataagctcgattttgttgcttgtatgggggctttttttggtgtcatctttgtatccgtagagattggccttctaatagccgtggggatatcttttgccaagatacttttgcaagttacgagacctaggacagcgattcttggaaagataccagggacttcggtttacaggaatatcaatcagtatcctgaagcgactaggattccgggagttttgacaattcgtgttgactccgcgatttacttctccaactccaattatgttagggaaaggattcaaagatggttgacagatgaagaagagatggtggaagctgcaagattgcctaggatccagtttcttatcatcgaaatgtcacctgttacggacatcgatactagtggtattcacgccttagaagacttgtataagtctctccaaaaacgagacattcagttggttctagcgaatccaggaccgccggtcataaataagctacatgtttctcactttgcggacttgataggacacgacaaaatctttctgacggtggctgaggccgtggattcttgctcccctaaactgtccgacgaggtctga

SEQ ID NO: 82499 - protein, 656 aa, Arabidopsis thaliana
  peptide (1)..(656): Ceres Seq. ID no. 12665991
MSARAHPVDDDGEISPVERSSPRQANTPYVHKVEVPPKQNLFNEFMYTFKETFFHDDPLRHFKDQSKSKKLMLGIQSVFPVIEWGRKYNLKLFRGDLIAGLTIASLCIPQDIGYAKLASLDPKYGLYSSFVPPLVYACMGSSKDIAIGPVAVVSLLLGTLLRAEIDPNTNPNEYLRLAFTSTFFAGVTQAALGFFRLGFLIDFLSHAAVVGFMGGAAITIALQQLKGFLGINKFTKKTDIIAVLSSVISSAHHGWNWQTILISASFLIFLLISKFIGKRNKKLFWIPAIAPLVSVIISTFFVYITRADKKGVQIVKHLDKGLNPSSLRLIYFSGDYLLKGFRIGVVSGMVALTEAVAIGRTFAAMKDYQIDGNKEMVALGAMNVIGSMTSCYVSTGSFSRSAVNFMAGCQTAVSNIIMSIVVLLTLLFLTPLFKYTPNAILAAIIINAVIPLVDVNATILIFKIDKLDFVACMGAFFGVIFVSVEIGLLIAVGISFAKILLQVTRPRTAILGKIPGTSVYRNINQYPEATRIPGVLTIRVDSAIYFSNSNYVRERIQRWLTDEEEMVEAARLPRIQFLIIEMSPVTDIDTSGIHALEDLYKSLQKRDIQLVLANPGPPVINKLHVSHFADLIGHDKIFLTVAEAVDSCSPKLSDEV

SEQ ID NO: 82500 - protein, 611 aa, Arabidopsis thaliana
  peptide (1)..(611): Ceres Seq. ID no. 12665992
MYTFKETFFHDDPLRHFKDQSKSKKLMLGIQSVFPVIEWGRKYNLKLFRGDLIAGLTIASLCIPQDIGYAKLASLDPKYGLYSSFVPPLVYACMGSSKDIAIGPVAVVSLLLGTLLRAEIDPNTNPNEYLRLAFTSTFFAGVTQAALGFFRLGFLIDFLSHAAVVGFMGGAAITIALQQLKGFLGINKFTKKTDIIAVLSSVISSAHHGWNWQTILISASFLIFLLISKFIGKRNKKLFWIPAIAPLVSVIISTFFVYITRADKKGVQIVKHLDKGLNPSSLRLIYFSGDYLLKGFRIGVVSGMVALTEAVAIGRTFAAMKDYQIDGNKEMVALGAMNVIGSMTSCYVSTGSFSRSAVNFMAGCQTAVSNIIMSIVVLLTLLFLTPLFKYTPNAILAAIIINAVIPLVDVNATILIFKIDKLDFVACMGAFFGVIFVSVEIGLLIAVGISFAKILLQVTRPRTAILGKIPGTSVYRNINQYPEATRIPGVLTIRVDSAIYFSNSNYVRERIQRWLTDEEEMVEAARLPRIQFLIIEMSPVTDIDTSGIHALEDLYKSLQKRDIQLVLANPGPPVINKLHVSHFADLIGHDKIFLTVAEAVDSCSPKLSDEV

SEQ ID NO: 82501 - protein, 585 aa, Arabidopsis thaliana
  peptide (1)..(585): Ceres Seq. ID no. 12665993
MLGIQSVFPVIEWGRKYNLKLFRGDLIAGLTIASLCIPQDIGYAKLASLDPKYGLYSSFVPPLVYACMGSSKDIAIGPVAVVSLLLGTLLRAEIDPNTNPNEYLRLAFTSTFFAGVTQAALGFFRLGFLIDFLSHAAVVGFMGGAAITIALQQLKGFLGINKFTKKTDIIAVLSSVISSAHHGWNWQTILISASFLIFLLISKFIGKRNKKLFWIPAIAPLVSVIISTFFVYITRADKKGVQIVKHLDKGLNPSSLRLIYFSGDYLLKGFRIGVVSGMVALTEAVAIGRTFAAMKDYQIDGNKEMVALGAMNVIGSMTSCYVSTGSFSRSAVNFMAGCQTAVSNIIMSIVVLLTLLFLTPLFKYTPNAILAAIIINAVIPLVDVNATILIFKIDKLDFVACMGAFFGVIFVSVEIGLLIAVGISFAKILLQVTRPRTAILGKIPGTSVYRNINQYPEATRIPGVLTIRVDSAIYFSNSNYVRERIQRWLTDEEEMVEAARLPRIQFLIIEMSPVTDIDTSGIHALEDLYKSLQKRDIQLVLANPGPPVINKLHVSHFADLIGHDKIFLTVAEAVDSCSPKLSDEV

SEQ ID NO: 82502 - DNA, 1477 bp, Arabidopsis thaliana
  misc_feature (1)..(1477): Ceres Seq. ID no. 12665994
  misc_feature (1)..(1477): Ortholog of  Ceres SEQ ID NO 15227289 as cited in SEQ ID NO 58851
  misc_feature (1)..(1477): Ortholog of  Ceres SEQ ID NO 13584416 as cited in SEQ ID NO 63441
gtatcggtgaggctgagagttattcacttacaaaaaaaaaaaaaaacttgagtgtaaccaaaaaaaaaagttgatatactttctggttttctccttaacttttattctttacaaatccatcccccttagatctgtttatttcccgctactttgattcatttctgttagtaatctgtctttcgtatagaagaaaactgatttcttggtttgtattttcttaaagagatcaatctttttttatttttgatcttcttgtgtttttttttctttgtagaattaatcgtttgtgagggtatttttttaattccctcctctcagaaatctacacagaggttttttattttataaacctctttttcgattttcttgaaaacaaaaaatcctgttctttactttttttacaagaacaagggaaaaaaatttctttttattagaaatgacaacttctatggatttttacagtaacaaaacgtttcaacaatctgatccattcggtggtgaattaatggaagcgcttttaccttttatcaaaagcccttccaacgattcatccgcgtttgcgttctctctacccgctccaatttcatacgggtcggatctccactcattttctcaccatcttagtcctaaaccggtctcaatgaaacaaaccggtacttccgcggctaaaccgacgaagctatacagaggagtgagacaacgtcactggggaaaatgggtggctgagattcgtttaccgaggaatcgaactcgactttggctcggaacattcgacacggcggaggaagctgctttagcttatgacaaggcggcgtataagctccgaggagattttgcgcggcttaatttccctgatctccgtcataacgacgagtatcaacctcttcaatcatcagtcgacgctaagcttgaagctatttgtcaaaacttagctgagacgacgcagaaacaggtgagatcaacgaagaagtcttcttctcggaaacgttcatcaaccgtcgcagtgaaactaccggaggaggactactctagcgccggatcttcgccgctgttaacggagagttatggatctggtggatcttcttcgccgttgtcggagctgacgtttggtgatacggaggaggagattcagccgccgtggaacgagaacgcgttggagaagtatccgtcgtacgagatcgattgggattcgattcttcagtgttcgagtcttgtaaattagatgttgccataggggtattttagggactttagagctctctgcgatggagtttttggtcattgcagagattttattattattaagggggtttgttatgttaatatcaaataagtttatctactttgatgttaattagtgttaatctctgcgtcggtccaagctgtttttttttggcatgcttcgaccgtgtgagatttcttatgtaatttttgtagttccttgattttcttagttcaagttaaattggcacaaaag

SEQ ID NO: 82503 - protein, 261 aa, Arabidopsis thaliana
  peptide (1)..(261): Ceres Seq. ID no. 12665995
MTTSMDFYSNKTFQQSDPFGGELMEALLPFIKSPSNDSSAFAFSLPAPISYGSDLHSFSHHLSPKPVSMKQTGTSAAKPTKLYRGVRQRHWGKWVAEIRLPRNRTRLWLGTFDTAEEAALAYDKAAYKLRGDFARLNFPDLRHNDEYQPLQSSVDAKLEAICQNLAETTQKQVRSTKKSSSRKRSSTVAVKLPEEDYSSAGSSPLLTESYGSGGSSSPLSELTFGDTEEEIQPPWNENALEKYPSYEIDWDSILQCSSLVN

SEQ ID NO: 82504 - protein, 257 aa, Arabidopsis thaliana
  peptide (1)..(257): Ceres Seq. ID no. 12665996
MDFYSNKTFQQSDPFGGELMEALLPFIKSPSNDSSAFAFSLPAPISYGSDLHSFSHHLSPKPVSMKQTGTSAAKPTKLYRGVRQRHWGKWVAEIRLPRNRTRLWLGTFDTAEEAALAYDKAAYKLRGDFARLNFPDLRHNDEYQPLQSSVDAKLEAICQNLAETTQKQVRSTKKSSSRKRSSTVAVKLPEEDYSSAGSSPLLTESYGSGGSSSPLSELTFGDTEEEIQPPWNENALEKYPSYEIDWDSILQCSSLVN

SEQ ID NO: 82505 - protein, 238 aa, Arabidopsis thaliana
  peptide (1)..(238): Ceres Seq. ID no. 12665997
MEALLPFIKSPSNDSSAFAFSLPAPISYGSDLHSFSHHLSPKPVSMKQTGTSAAKPTKLYRGVRQRHWGKWVAEIRLPRNRTRLWLGTFDTAEEAALAYDKAAYKLRGDFARLNFPDLRHNDEYQPLQSSVDAKLEAICQNLAETTQKQVRSTKKSSSRKRSSTVAVKLPEEDYSSAGSSPLLTESYGSGGSSSPLSELTFGDTEEEIQPPWNENALEKYPSYEIDWDSILQCSSLVN

SEQ ID NO: 82506 - DNA, 945 bp, Arabidopsis thaliana
  misc_feature (1)..(945): Ceres Seq. ID no. 12666002
  misc_feature (1)..(945): Ortholog of  Ceres SEQ ID NO 14313491 as cited in SEQ ID NO 0
atggacgtttttgatggacttcctgacccgatcatcgtcgacatcttgaacaaagtcggtgacgtcaaaaccttacttcgatgcagctctctttcaaaaagatttaactcgcttgtccctcagtctgagtcactcaccctccgactcgaccactcagtatccgattcacccgtcgtcacaagcattttccgatctttattcaacggtctagtttctcttttatccaaaccggctaaaccaatcacaataaccaccctctctccgagtctccccttcaagattctctcccggttcgaccggattcgaaatctggacgtagagcttcccggcggcgatgtaaagctcgagaaaggtgcagccgttaagtggaaagctgagtttgggaaaacactcaaaagctgcgtcatcgtcgcgttccgttccgccggtaccgtgtcttctcccgtcgccgtagaaggtgagtcagacgccgagttcgtgactggactgaagacgcgcgtggtgtggactataagcgcgttgatggctgcttcgtctcgtcattacttgatgagagaagtcgtgaaggagcatgaggagatagaaagtttagttatgcgtgacaaagaaagagaagggacggtggtgatgaacgaggaagggcttaaagagttaagaaatacggaggcgcgtgtggaagacgaggagcgcgtggtaaaaaataagaggagtgttgtcccgagcgtgaggatgagtatgagacacgcgccgtctcttaaacttaagagtggtatctgtttagaatctgctacgcttgtgattgttcgaccgagcggagcggattttgaagttggagatgatgctgagttggcgacggaggctttcgtcggagattgtatgtacggtgaagcggtcgtcgctttgttaaagtgcaagaagaacgctttagagatgaattcgttttaa

SEQ ID NO: 82507 - protein, 314 aa, Arabidopsis thaliana
  peptide (1)..(314): Ceres Seq. ID no. 12666003
MDVFDGLPDPIIVDILNKVGDVKTLLRCSSLSKRFNSLVPQSESLTLRLDHSVSDSPVVTSIFRSLFNGLVSLLSKPAKPITITTLSPSLPFKILSRFDRIRNLDVELPGGDVKLEKGAAVKWKAEFGKTLKSCVIVAFRSAGTVSSPVAVEGESDAEFVTGLKTRVVWTISALMAASSRHYLMREVVKEHEEIESLVMRDKEREGTVVMNEEGLKELRNTEARVEDEERVVKNKRSVVPSVRMSMRHAPSLKLKSGICLESATLVIVRPSGADFEVGDDAELATEAFVGDCMYGEAVVALLKCKKNALEMNSF

SEQ ID NO: 82508 - DNA, 429 bp, Arabidopsis thaliana
  misc_feature (1)..(429): Ceres Seq. ID no. 12666008
  misc_feature (1)..(429): Ortholog of  Ceres SEQ ID NO 14310243 as cited in SEQ ID NO 20666
atgttgataaagcctgatgttcagcttcacctagaggctaagacccaatcagagacatttgaagatcataggacagacctggaccttaatttgaacctttattcgtcatcaagttcctctgtcaaaaaaacaatcatggagaaagatgaatgttccaaaggcggaactgtgatcatcagcccaagtaagaaggtgagatcaggtgatatagggctaagtcgatccccgtcttggctagcgtttgaaggtgatgatgatgataatcagaagaagcaagagatgataacaacagtgtgcatgaagtgtcacatgctggttatgctctgcaaatctactcttgtctgtcctaactgcaaattcatgcaccatgatgatcatagctccactaaacagtttcagactttaaatttgtttaagctcttatgctag

SEQ ID NO: 82509 - protein, 142 aa, Arabidopsis thaliana
  peptide (1)..(142): Ceres Seq. ID no. 12666009
MLIKPDVQLHLEAKTQSETFEDHRTDLDLNLNLYSSSSSSVKKTIMEKDECSKGGTVIISPSKKVRSGDIGLSRSPSWLAFEGDDDDNQKKQEMITTVCMKCHMLVMLCKSTLVCPNCKFMHHDDHSSTKQFQTLNLFKLLC

SEQ ID NO: 82510 - protein, 97 aa, Arabidopsis thaliana
  peptide (1)..(97): Ceres Seq. ID no. 12666010
MEKDECSKGGTVIISPSKKVRSGDIGLSRSPSWLAFEGDDDDNQKKQEMITTVCMKCHMLVMLCKSTLVCPNCKFMHHDDHSSTKQFQTLNLFKLLC

SEQ ID NO: 82511 - DNA, 1464 bp, Arabidopsis thaliana
  misc_feature (1)..(1464): Ceres Seq. ID no. 12666026
  misc_feature (1)..(1464): Ortholog of  Ceres SEQ ID NO 14315063 as cited in SEQ ID NO 52256
  misc_feature (1)..(1464): Ortholog of  Ceres SEQ ID NO 14310736 as cited in SEQ ID NO 52901
  misc_feature (1)..(1464): Ortholog of  Ceres SEQ ID NO 15172325 as cited in SEQ ID NO 54668
  misc_feature (1)..(1464): Ortholog of  Ceres SEQ ID NO 13594345 as cited in SEQ ID NO 58043
  misc_feature (1)..(1464): Ortholog of  Ceres SEQ ID NO 12614112 as cited in SEQ ID NO 60891
  misc_feature (1)..(1464): Ortholog of  Ceres SEQ ID NO 13597678 as cited in SEQ ID NO 65375
  misc_feature (1)..(1464): Ortholog of  Ceres SEQ ID NO 13662880 as cited in SEQ ID NO 65422
  misc_feature (1)..(1464): Ortholog of  Ceres SEQ ID NO 12779098 as cited in SEQ ID NO 67698
  misc_feature (1)..(1464): Ortholog of  Ceres SEQ ID NO 13596180 as cited in SEQ ID NO 67941
  misc_feature (1)..(1464): Ortholog of  Ceres SEQ ID NO 13596089 as cited in SEQ ID NO 68373
atggaatctcatgttgttcataacgcacaaaagccacacgtagtttgcgtgccttacccggctcaaggccacatcaatccgatgctgaaagtggctaaactcctctacgctaaaggctttcacgtcaccttcgttaacactctctacaaccacaaccgtctcctccggtcccgtggtcccaacgcgctcgacgggtttccttcattccggttcgagtccatccctgacggtctaccggagactgatggcgataggacgcagcatactcctaccgtttgcatgtccattgagaaaaactgtctcgctccattcaaagagattctgcgccggatcaacgataaagatgatgttcctccagtgagttgtattgtatcggacggtgtgatgagttttactcttgacgcagccgaggaactaggtgtcccagaggttattttttggaccaatagtgcttgtggtttcatgactattctacacttttatcttttcatcgagaagggtctatctccttttaaagacgaaagttacatgtcaaaggagcatctagacacagttatagattggataccatcaatgaagaatcttaggttaaaggacatccctagctatatacgtaccacaaatcctgacaacataatgcttaatttcctcattcgagaagttgagcgatctaaacgcgctagtgctatcattctcaacacgtttgatgaactcgagcatgatgttatccagtctatgcaatctattttacctccggtttattctattgggccactccatctccttgtgaaggaagaaataaacgaggctagtgaaataggacagatgggattaaatttgtggagagaggagatggaatgtttggattggctcgatacaaaaactccaaacagtgttctttttgttaactttggatgcataacggtgatgagtgcaaaacagcttgaagaatttgcttggggtttggcggcaagtaggaaagagtttttatgggtgatccgtcctaatttagtggtgggagaggcgatggtggttcttccacaagagtttttagcggagacgatagaccggagaatgttagctagttggtgtcctcaggagaaagttctttctcatcccgcgataggagggttcttgacgcattgcgggtggaactcaacattggagagtctcgctggtggtgttccgatgatatgttggccatgtttttcggagcaaccgacgaattgtaagttttgttgtgatgagtggggagtgggtatagagattggtaaagatgtgaagagagaggaggtcgagacggtggttagagaacttatggatggagaaaaggggaaaaagctgagagaaaaggcggaagagtggcggcggttggccgaggaagcgacgaggtataaacatggttcgtcggtcatgaatcttgagacgcttatacataaagttttcttagaaaatcttagatga

SEQ ID NO: 82512 - protein, 487 aa, Arabidopsis thaliana
  peptide (1)..(487): Ceres Seq. ID no. 12666027
MESHVVHNAQKPHVVCVPYPAQGHINPMLKVAKLLYAKGFHVTFVNTLYNHNRLLRSRGPNALDGFPSFRFESIPDGLPETDGDRTQHTPTVCMSIEKNCLAPFKEILRRINDKDDVPPVSCIVSDGVMSFTLDAAEELGVPEVIFWTNSACGFMTILHFYLFIEKGLSPFKDESYMSKEHLDTVIDWIPSMKNLRLKDIPSYIRTTNPDNIMLNFLIREVERSKRASAIILNTFDELEHDVIQSMQSILPPVYSIGPLHLLVKEEINEASEIGQMGLNLWREEMECLDWLDTKTPNSVLFVNFGCITVMSAKQLEEFAWGLAASRKEFLWVIRPNLVVGEAMVVLPQEFLAETIDRRMLASWCPQEKVLSHPAIGGFLTHCGWNSTLESLAGGVPMICWPCFSEQPTNCKFCCDEWGVGIEIGKDVKREEVETVVRELMDGEKGKKLREKAEEWRRLAEEATRYKHGSSVMNLETLIHKVFLENLR

SEQ ID NO: 82513 - protein, 460 aa, Arabidopsis thaliana
  peptide (1)..(460): Ceres Seq. ID no. 12666028
MLKVAKLLYAKGFHVTFVNTLYNHNRLLRSRGPNALDGFPSFRFESIPDGLPETDGDRTQHTPTVCMSIEKNCLAPFKEILRRINDKDDVPPVSCIVSDGVMSFTLDAAEELGVPEVIFWTNSACGFMTILHFYLFIEKGLSPFKDESYMSKEHLDTVIDWIPSMKNLRLKDIPSYIRTTNPDNIMLNFLIREVERSKRASAIILNTFDELEHDVIQSMQSILPPVYSIGPLHLLVKEEINEASEIGQMGLNLWREEMECLDWLDTKTPNSVLFVNFGCITVMSAKQLEEFAWGLAASRKEFLWVIRPNLVVGEAMVVLPQEFLAETIDRRMLASWCPQEKVLSHPAIGGFLTHCGWNSTLESLAGGVPMICWPCFSEQPTNCKFCCDEWGVGIEIGKDVKREEVETVVRELMDGEKGKKLREKAEEWRRLAEEATRYKHGSSVMNLETLIHKVFLENLR

SEQ ID NO: 82514 - protein, 394 aa, Arabidopsis thaliana
  peptide (1)..(394): Ceres Seq. ID no. 12666029
MSIEKNCLAPFKEILRRINDKDDVPPVSCIVSDGVMSFTLDAAEELGVPEVIFWTNSACGFMTILHFYLFIEKGLSPFKDESYMSKEHLDTVIDWIPSMKNLRLKDIPSYIRTTNPDNIMLNFLIREVERSKRASAIILNTFDELEHDVIQSMQSILPPVYSIGPLHLLVKEEINEASEIGQMGLNLWREEMECLDWLDTKTPNSVLFVNFGCITVMSAKQLEEFAWGLAASRKEFLWVIRPNLVVGEAMVVLPQEFLAETIDRRMLASWCPQEKVLSHPAIGGFLTHCGWNSTLESLAGGVPMICWPCFSEQPTNCKFCCDEWGVGIEIGKDVKREEVETVVRELMDGEKGKKLREKAEEWRRLAEEATRYKHGSSVMNLETLIHKVFLENLR

SEQ ID NO: 82515 - DNA, 1249 bp, Arabidopsis thaliana
  misc_feature (1)..(1249): Ceres Seq. ID no. 12666030
  misc_feature (1)..(1249): Ortholog of  Ceres SEQ ID NO 13594345 as cited in SEQ ID NO 58043
  misc_feature (1)..(1249): Ortholog of  Ceres SEQ ID NO 13662880 as cited in SEQ ID NO 65422
  misc_feature (1)..(1249): Ortholog of  Ceres SEQ ID NO 12779098 as cited in SEQ ID NO 67698
  misc_feature (1)..(1249): Ortholog of  Ceres SEQ ID NO 13591190 as cited in SEQ ID NO 68044
tacctataatacagatacgtaagaagtaccgtcgtctaggcctttttctgtcattgttagggcgaccaagaataactcatccttactctgaaattaatctatagtattaattgatcaaaattaaatgcatcaaaaatttgcatataatacggtgcttgaatgtttttatagtaaatattgagatataaaattatacttataaaatggaagtggattatggcagatgaaagttctttggacacaaaaataaattggataccatcgatgaaaaacctaggacttaaagacatcccaagctttatccgtgcaactaatactgaagacataatgcttaacttttttgtccatgaggctgaccgagccaaacgcgcttccgctatcattctcaacacattcgatagtcttgagcatgatgtcgtccgttctattcaatctatcatacctcaagtgtacactattggaccgcttcatctatttgtgaatcgggatatcgacgaggaaagtgacatcggacagataggaacgaatatgtggagagaggagatggagtgtttggattggcttgatactaagtctccaaacagtgtcgtttatgttaatttcggtagcataacagtgatgagtgcgaaacaactcgtggagtttgcttggggtttagcagcgaccaaaaaagattttttgtgggtgattaggccggatttagtagccggtgatgtgccaatgcttccgccggactttctaatagagacggctaaccgaaggatgctagcgagttggtgtcctcaagaaaaagttctttctcatccggcagttggagggttcttaacgcatagtggatggaattcgactttggagagtctctccggtggagttccaatggtgtgttggccgttctttgcggaacagcaaacaaattgtaaatattgttgtgatgaatgggaagtggggatggagatcggtggagatgtgaggagggaggaggttgaggagttggttagagaactcatggacggagacaaaggaaagaaaatgaggcaaaaggccgaagagtggcagcgcttggctgaggaagcgacgaagcctatttatggttcgtcggaactaaattttcagatggtcgttgacaaggttcttttaggggagtagagagactacaatttattttagatatgatcgttacaaaattatgttatgtattgaaatttaataaagtgttatcatatatataatgatgaacaagtatctgttt

SEQ ID NO: 82516 - protein, 309 aa, Arabidopsis thaliana
  peptide (1)..(309): Ceres Seq. ID no. 12666031
MADESSLDTKINWIPSMKNLGLKDIPSFIRATNTEDIMLNFFVHEADRAKRASAIILNTFDSLEHDVVRSIQSIIPQVYTIGPLHLFVNRDIDEESDIGQIGTNMWREEMECLDWLDTKSPNSVVYVNFGSITVMSAKQLVEFAWGLAATKKDFLWVIRPDLVAGDVPMLPPDFLIETANRRMLASWCPQEKVLSHPAVGGFLTHSGWNSTLESLSGGVPMVCWPFFAEQQTNCKYCCDEWEVGMEIGGDVRREEVEELVRELMDGDKGKKMRQKAEEWQRLAEEATKPIYGSSELNFQMVVDKVLLGE

SEQ ID NO: 82517 - protein, 293 aa, Arabidopsis thaliana
  peptide (1)..(293): Ceres Seq. ID no. 12666032
MKNLGLKDIPSFIRATNTEDIMLNFFVHEADRAKRASAIILNTFDSLEHDVVRSIQSIIPQVYTIGPLHLFVNRDIDEESDIGQIGTNMWREEMECLDWLDTKSPNSVVYVNFGSITVMSAKQLVEFAWGLAATKKDFLWVIRPDLVAGDVPMLPPDFLIETANRRMLASWCPQEKVLSHPAVGGFLTHSGWNSTLESLSGGVPMVCWPFFAEQQTNCKYCCDEWEVGMEIGGDVRREEVEELVRELMDGDKGKKMRQKAEEWQRLAEEATKPIYGSSELNFQMVVDKVLLGE

SEQ ID NO: 82518 - protein, 272 aa, Arabidopsis thaliana
  peptide (1)..(272): Ceres Seq. ID no. 12666033
MLNFFVHEADRAKRASAIILNTFDSLEHDVVRSIQSIIPQVYTIGPLHLFVNRDIDEESDIGQIGTNMWREEMECLDWLDTKSPNSVVYVNFGSITVMSAKQLVEFAWGLAATKKDFLWVIRPDLVAGDVPMLPPDFLIETANRRMLASWCPQEKVLSHPAVGGFLTHSGWNSTLESLSGGVPMVCWPFFAEQQTNCKYCCDEWEVGMEIGGDVRREEVEELVRELMDGDKGKKMRQKAEEWQRLAEEATKPIYGSSELNFQMVVDKVLLGE

SEQ ID NO: 82519 - DNA, 525 bp, Arabidopsis thaliana
  misc_feature (1)..(525): Ceres Seq. ID no. 12666042
  misc_feature (1)..(525): Ortholog of  Ceres SEQ ID NO 13594720 as cited in SEQ ID NO 52147
atgagcacacttcttggttgtcttgtcctcatattctctatggtcgcacaggcctcatccgccagtcttacggtgaactggtcccttggcaccgactacactccgctcaccactggaaagaccttctctgtcggcgataccatagtgttcaattatggtgcgggtcacacggtggatgaagtgagcgagaacgactacaagagttgcactctagggaactccattacgtccgacagcagcggaaccacgaccatagctctcacgaccactggtcctcgctacttcatctgtggaatccccggccattgcgctgccggtatgaagctcgcagtcaccgtcgcgtcgaactcttcaaacggtgtagctggtggcaccactacaccaaccccattcaccggaggtggtggtggttacaatcccacgaccacacaggccattccttgtgcggcttgggccgtgtcctgtccattacgggctttggttgctacttgggccgttgttttttatgctttggctttgtcttag

SEQ ID NO: 82520 - protein, 174 aa, Arabidopsis thaliana
  peptide (1)..(174): Ceres Seq. ID no. 12666043
MSTLLGCLVLIFSMVAQASSASLTVNWSLGTDYTPLTTGKTFSVGDTIVFNYGAGHTVDEVSENDYKSCTLGNSITSDSSGTTTIALTTTGPRYFICGIPGHCAAGMKLAVTVASNSSNGVAGGTTTPTPFTGGGGGYNPTTTQAIPCAAWAVSCPLRALVATWAVVFYALALS

SEQ ID NO: 82521 - protein, 161 aa, Arabidopsis thaliana
  peptide (1)..(161): Ceres Seq. ID no. 12666044
MVAQASSASLTVNWSLGTDYTPLTTGKTFSVGDTIVFNYGAGHTVDEVSENDYKSCTLGNSITSDSSGTTTIALTTTGPRYFICGIPGHCAAGMKLAVTVASNSSNGVAGGTTTPTPFTGGGGGYNPTTTQAIPCAAWAVSCPLRALVATWAVVFYALALS

SEQ ID NO: 82522 - DNA, 1695 bp, Arabidopsis thaliana
  misc_feature (1)..(1695): Ceres Seq. ID no. 12666045
  misc_feature (1)..(1695): Ortholog of  Ceres SEQ ID NO 12613725 as cited in SEQ ID NO 68196
atggcgatagccgaagaagaagctgcacttatagaagattccgtcagcgactccgttgaccaccgtggacttcctgccggaaaatcttccaccggcggatggagatccgcctggtacattataggtgtggaagttggagaaagatttgcttactttgggattggttccaacttaattacttacctcaccggacctctcggacaatcaacagccaccgccgccgtgaacgtgaacacatggtcaggaaccgcctcgatacttcctgttttaggagctttcattgcagatgcttatcttggtcgttaccgtaccattgttgttgcttccctcatctacatacttggactaggactattgaccttatcctctatcttaatcctaatgggattatcggagcaacgtcaacataaccgcaacgcttctgctaaaccgtttttttgggtgaatatattattcttttgttctctgtatttggtggcgatcggacaaggcggacacaagccatgtgttcaagcttttggtgctgaccagtttgatgtgggagatccaaaggagagaataagtagaggatcgtttttcaattggtggttcttgagtttatccgcgggaataactttgtcgattattgtggtggtttacgttcaagacaatgttaattgggctcttgggtttggtatcccttgtttgttcatggtcatggctcttgctctcttcttgtttggaagaaaaacttatagatatccaagaggagatcgcgaggggaagaataacgcttttgcgaggatcggtagagttttcttggtggcgttcaagaatcggaaactgaagttaacacattcaggtcagttggaagttggttcgtacaagaaatgtaaaggacaacttgagttcctagcaaaagcgttgctaccaggagaaggaggtgtagagccatgtagtagtagggacgtggaagacgcgatggctttggttaggcttattccgatatggatcacatcagtagtgagcacgattccttacgctcaatatgctactttcttcacaaaacaaggcgttacggtggacagaaaaatcttgccgggtttcgagatccctccggcttcttttcaagcactcatcggtttatcgattttcatctcagttccaacttatgagcgtgttttccttccgttagctagattgattaccaaaaagccttcagggatcacaatgctacaaagaataggagctggaatggtgctctccagcttaaatatggtggttgcagcgttagtagaaatgaaacggctcgagacggctaaagaacatgggcttgtggatagaccggacgcaaccatcccaatgtccatatggtggttcgttcctcagtatttactacttgggatgatcgatgtattctcactagtggggacacaagaattcttctacgaccaggtccccacggagctaaggagtattggtcttgcactttctttgagtgcgatgggtcttgcgagcttcttgagcggttttctaatcactgtgattaattgggctaccgggaaaaatggcggcgatagctggttcaatactaacctgaacagagcccatgtcgattatttttactggttgcttgctgctttcactgccattgggttcttggcgtttttgttattatccaggctgtatgtgtatcgccgtgtagatcaagtctaa

SEQ ID NO: 82523 - protein, 564 aa, Arabidopsis thaliana
  peptide (1)..(564): Ceres Seq. ID no. 12666046
MAIAEEEAALIEDSVSDSVDHRGLPAGKSSTGGWRSAWYIIGVEVGERFAYFGIGSNLITYLTGPLGQSTATAAVNVNTWSGTASILPVLGAFIADAYLGRYRTIVVASLIYILGLGLLTLSSILILMGLSEQRQHNRNASAKPFFWVNILFFCSLYLVAIGQGGHKPCVQAFGADQFDVGDPKERISRGSFFNWWFLSLSAGITLSIIVVVYVQDNVNWALGFGIPCLFMVMALALFLFGRKTYRYPRGDREGKNNAFARIGRVFLVAFKNRKLKLTHSGQLEVGSYKKCKGQLEFLAKALLPGEGGVEPCSSRDVEDAMALVRLIPIWITSVVSTIPYAQYATFFTKQGVTVDRKILPGFEIPPASFQALIGLSIFISVPTYERVFLPLARLITKKPSGITMLQRIGAGMVLSSLNMVVAALVEMKRLETAKEHGLVDRPDATIPMSIWWFVPQYLLLGMIDVFSLVGTQEFFYDQVPTELRSIGLALSLSAMGLASFLSGFLITVINWATGKNGGDSWFNTNLNRAHVDYFYWLLAAFTAIGFLAFLLLSRLYVYRRVDQV

SEQ ID NO: 82524 - protein, 437 aa, Arabidopsis thaliana
  peptide (1)..(437): Ceres Seq. ID no. 12666047
MGLSEQRQHNRNASAKPFFWVNILFFCSLYLVAIGQGGHKPCVQAFGADQFDVGDPKERISRGSFFNWWFLSLSAGITLSIIVVVYVQDNVNWALGFGIPCLFMVMALALFLFGRKTYRYPRGDREGKNNAFARIGRVFLVAFKNRKLKLTHSGQLEVGSYKKCKGQLEFLAKALLPGEGGVEPCSSRDVEDAMALVRLIPIWITSVVSTIPYAQYATFFTKQGVTVDRKILPGFEIPPASFQALIGLSIFISVPTYERVFLPLARLITKKPSGITMLQRIGAGMVLSSLNMVVAALVEMKRLETAKEHGLVDRPDATIPMSIWWFVPQYLLLGMIDVFSLVGTQEFFYDQVPTELRSIGLALSLSAMGLASFLSGFLITVINWATGKNGGDSWFNTNLNRAHVDYFYWLLAAFTAIGFLAFLLLSRLYVYRRVDQV

SEQ ID NO: 82525 - protein, 334 aa, Arabidopsis thaliana
  peptide (1)..(334): Ceres Seq. ID no. 12666048
MVMALALFLFGRKTYRYPRGDREGKNNAFARIGRVFLVAFKNRKLKLTHSGQLEVGSYKKCKGQLEFLAKALLPGEGGVEPCSSRDVEDAMALVRLIPIWITSVVSTIPYAQYATFFTKQGVTVDRKILPGFEIPPASFQALIGLSIFISVPTYERVFLPLARLITKKPSGITMLQRIGAGMVLSSLNMVVAALVEMKRLETAKEHGLVDRPDATIPMSIWWFVPQYLLLGMIDVFSLVGTQEFFYDQVPTELRSIGLALSLSAMGLASFLSGFLITVINWATGKNGGDSWFNTNLNRAHVDYFYWLLAAFTAIGFLAFLLLSRLYVYRRVDQV

SEQ ID NO: 82526 - DNA, 1698 bp, Arabidopsis thaliana
  misc_feature (1)..(1698): Ceres Seq. ID no. 12666049
  misc_feature (1)..(1698): Ortholog of  Ceres SEQ ID NO 12613725 as cited in SEQ ID NO 68196
atgaagataccagaggaagaagttgcactcttagaagattacgttagcgattccgtcgaccaccgtggatttcccgccggaaaatcttccaccggcggatggagatcggcctggttcattataggtgtggaagttgcagagaggtttgcttactttgggattgcctgcaatttgattacttacctcaccggacctctcggacaatcgacggcgaaagctgccgtgaacgtgaacacgtggtcgggaactgcctctatacttcctattttaggagctttcgtagctgacgcttatcttggtcgttaccgtactattgtcgtagcttccctcatctacatattggggctaggactattgacgttatcagcttctttaatcataatgggattatctaagcaacgtaacgacgcttctgctaaaccatctatttgggttaatacacttttcttctgttctctgtatttggtggcgatcggacaaggtggacacaaaccgtgtgttcaagcgtttggtgcggaccagtttgatgctgaagatccgaaggaggtaatagcgagagggtcgtttttcaattggtggttcttgagtttatctgcgggaataagcatatcgattattgtggtcgcttatgttcaagaaaatgttaattgggcgtttgggtttgggattccttgtttgtttatggttatggctcttgctatcttcttgctcgggaggaagatatatagatacccaaagggacatcatgaggaggttaatagtagtaacacttttgcaagaatcggtagagtttttgttattgcgttcaagaatcggaaactgaggttagaacattctagtttggaattggatcaaggtctattggaggatggtcagtccgagaaacgtaaagatcggctcaatttcctagcaaaagcaatgatctcaagagaaggtgttgagccatgtagtggtagggacgtggatgacgcgaaggctttggtaaggcttattccgatatggatcacatacgtggtgagcacgattccgtacgctcagtacataactttcttcacgaagcaaggggtcacggtggacagaagaatcttaccgggagtagaaattccagcggcttctttattgtcattcgttggtgtatctattctcatctcagtgcccctatatgagcgtgtatttctcccgatagctaggaagattaccaaaaagccttttgggatcacaatgctccaaaggataggagctggaatggtgctttcagtcttcaatatgatgctcgctgcattagtagaatcaaaacggctaaaaatcgctagggaacacgggctagtggacaagccggacgtgaccgttccaatgtccatatggtggttcgtccctcagtatttgctactcgggatgatcgatctgttctctatggtgggaacacaagaattcttctacgaccaagtcccaacggagctaaggagcattggtctctcgctttctctgagtgcgatgggtctttcaagcttcttgagtggttttctcatcagtttgattgattgggctacgggaaaagacggctggttcaactctaacttgaaccgagcccatgtggattacttttattggttgctcgctgctttcacggccattgctttctttgcgttcttgttcatctccaagatgtatgtgtatcgtcggctagaccaagtctaa

SEQ ID NO: 82527 - protein, 565 aa, Arabidopsis thaliana
  peptide (1)..(565): Ceres Seq. ID no. 12666050
MKIPEEEVALLEDYVSDSVDHRGFPAGKSSTGGWRSAWFIIGVEVAERFAYFGIACNLITYLTGPLGQSTAKAAVNVNTWSGTASILPILGAFVADAYLGRYRTIVVASLIYILGLGLLTLSASLIIMGLSKQRNDASAKPSIWVNTLFFCSLYLVAIGQGGHKPCVQAFGADQFDAEDPKEVIARGSFFNWWFLSLSAGISISIIVVAYVQENVNWAFGFGIPCLFMVMALAIFLLGRKIYRYPKGHHEEVNSSNTFARIGRVFVIAFKNRKLRLEHSSLELDQGLLEDGQSEKRKDRLNFLAKAMISREGVEPCSGRDVDDAKALVRLIPIWITYVVSTIPYAQYITFFTKQGVTVDRRILPGVEIPAASLLSFVGVSILISVPLYERVFLPIARKITKKPFGITMLQRIGAGMVLSVFNMMLAALVESKRLKIAREHGLVDKPDVTVPMSIWWFVPQYLLLGMIDLFSMVGTQEFFYDQVPTELRSIGLSLSLSAMGLSSFLSGFLISLIDWATGKDGWFNSNLNRAHVDYFYWLLAAFTAIAFFAFLFISKMYVYRRLDQV

SEQ ID NO: 82528 - protein, 438 aa, Arabidopsis thaliana
  peptide (1)..(438): Ceres Seq. ID no. 12666051
MGLSKQRNDASAKPSIWVNTLFFCSLYLVAIGQGGHKPCVQAFGADQFDAEDPKEVIARGSFFNWWFLSLSAGISISIIVVAYVQENVNWAFGFGIPCLFMVMALAIFLLGRKIYRYPKGHHEEVNSSNTFARIGRVFVIAFKNRKLRLEHSSLELDQGLLEDGQSEKRKDRLNFLAKAMISREGVEPCSGRDVDDAKALVRLIPIWITYVVSTIPYAQYITFFTKQGVTVDRRILPGVEIPAASLLSFVGVSILISVPLYERVFLPIARKITKKPFGITMLQRIGAGMVLSVFNMMLAALVESKRLKIAREHGLVDKPDVTVPMSIWWFVPQYLLLGMIDLFSMVGTQEFFYDQVPTELRSIGLSLSLSAMGLSSFLSGFLISLIDWATGKDGWFNSNLNRAHVDYFYWLLAAFTAIAFFAFLFISKMYVYRRLDQV

SEQ ID NO: 82529 - protein, 338 aa, Arabidopsis thaliana
  peptide (1)..(338): Ceres Seq. ID no. 12666052
MVMALAIFLLGRKIYRYPKGHHEEVNSSNTFARIGRVFVIAFKNRKLRLEHSSLELDQGLLEDGQSEKRKDRLNFLAKAMISREGVEPCSGRDVDDAKALVRLIPIWITYVVSTIPYAQYITFFTKQGVTVDRRILPGVEIPAASLLSFVGVSILISVPLYERVFLPIARKITKKPFGITMLQRIGAGMVLSVFNMMLAALVESKRLKIAREHGLVDKPDVTVPMSIWWFVPQYLLLGMIDLFSMVGTQEFFYDQVPTELRSIGLSLSLSAMGLSSFLSGFLISLIDWATGKDGWFNSNLNRAHVDYFYWLLAAFTAIAFFAFLFISKMYVYRRLDQV

SEQ ID NO: 82530 - DNA, 3081 bp, Arabidopsis thaliana
  misc_feature (1)..(3081): Ceres Seq. ID no. 12666060
  misc_feature (1)..(3081): Ortholog of  Ceres SEQ ID NO 13597957 as cited in SEQ ID NO 60744
aaaggataattaattcaatgaacacgatcctaaaatagaaaagtacgaaaacaccccttatcttccgaacacttttccgatcgcaaaatgatcgcctgaaaccatcgccggcttcagagtgtttgatcgtttctccagatagatagattgatccaatatggcgaaatcggaaaactcaacgacttcgactttctcttctttcgccaacaagattcaaccgtccaacgatgcagagtccgatcccgattcgtatgccctcgagaaattcaaactctacgaaaccagagcgaggttttatctagtagggagtgataggaataaaagattcttcagagtgttgaagattgatcgttcagagccatctgagcttaatattagtgaagatcctgttgtatattcgcctcaagagatcaagagtctgcttcagcgtatcgctgaaggcaatcgtgccacgggaggattggcttttgtggccaaagtctatggaattgctggttgtgctaagtttatggagtcatactatttagttttggttacaaaacggcgacagattggatgtatatgcgggcatgcgatatatgctattgatgaaagtcaaatgatcagtgttccacatgcaactattcaatctgatgttgcgaattccaaaactgaactaaggtacaagaagcttctgtcaagtgtagatttgacaaaagatttcttctacagttacacttaccctataatgcaaagcttgcaaaagaatgttctatcatctggtgaggaagggatgccttatgataacatattcgtatggaattcgtatctgacgcagcctattcgatcaaggtgcaacaacactatttggacactggcattagttcatgggcactttaagcagataagactatcaatatatggaagagacttcagtgttactttagtctccagacgttctcgacattttgcaggcacacgttacttgaaaaggggagtgaatgatcgtggaagggttgcaaatgatgttgaaacagaacaacttgttcttgatgatgaagctggatcatgcaaaggaaaaatgagctcagtggtgcagatgcgagggtcaattccactcttttggtcacaagaggcctccagatttagtcctaagcctgatatcttcttacagaggtatgaccctacatatgagtcaaccaaaatgcattttgaagacctggtgaatcgatatgggaatccgatcattgtgctcaacttaattaagacagttgagaaaaggccaagggaaatggtgctaagacgtgagtttgcgaatgctgtgggttatctaaattcaatttttcgtgaagaaaatcatctcaaattcatccactgggatttccataaatttgcgaagagcaagtcggcgaatgtattggctgttttgggtgctgtagcaagcgaagcccttgatttgactggattatatttcagcggcaagcctaaaattgttaagaagaaggctagccaacttagtcatgctaacactgcaagggaaccttctctgcgtgatctaagagcttactctgcggaactttcaaggggtgagagtgcaaatgatatacttagtgctcttgctaatcgagagaaagagatgaagctaacccaacaaaaaaaagacgagggaactaattcttcagctcctcgttaccaaagtggtgttctgcgtactaactgtatcgattgcttggatcgaacaaatgtagcacagtatgcatatggtttggctgctttaggccggcagctgcatgcaatgggtttgagcgatacacctaagatcgaccctgacagtagcatagctgctgcacttatggatatgtaccagagcatgggagatgcccttgcacaacaatatggcggctcagctgctcataacactgttttcccagaaaggcaggggaaatggaaggccacgacacagtctagagagtttctcaagtctatcaaacgatactacagcaatacctacactgatggcgaaaagcaagacgccataaacttattcttgggctactttcaacctcaggaagggaaacctgcgctctgggagctggattctgattactatctccatgtttcagggattggagatgatattttcccagatatcggggtccagtccattgctaaacctatgagtggtattggagtcaatcttgcaccagtgccagctttcagagacgacttctcgcggaagaagctgacatcgtttgacaaactgatagagcagacatgcagttcaataaagaacgtgaggctttgtagtgagacagaccaaaggccaggtggcaacactggaagcactggtgtggctcctgatgcagctgagattcaactcaagagccccaattggctgtttggttcaagaaagcccgaagagagtagctctgccacaaaatctggtgcagacgatagtgagaaaggagtaacctcgactgagagagtcaacgatttctgcaacttggactggctttctaagtccgaccgtcatcaaggagatatcttccaaaggtatctatcgattacatcaaccaatgaagccaatggttggtatggtggcactctcctcggtgaccaagatgaaaacagcgaaatttacagacattacgcccaattctgtcagtgtccagcgatggaaccatttgagaacgatcatgagtttgaacagaactttgcggaagttctccgcatgaacacaatcgatgtaatggacattgaagaagaagaaacggagatggaaagcgatttcaatgaatacactcagatcggtagcgatctcgggatcattccaatgcaatgcaaacactttgctagtgatccttgttggctagccagatggcttgtcggagatgataaggtcccgaaggtcatttaatcacgaaaccaatgattttgctccccaagaacgtcacggagacacttcttttttggttgcatgtttgtgaatgtgttcgagtgtgcattttgtgtagatatatgtaagaagggacaaacccaaagcaatattttgtaccccaaaaaatatttgttggtttatgattaagctcacgtataatacag

SEQ ID NO: 82531 - protein, 912 aa, Arabidopsis thaliana
  peptide (1)..(912): Ceres Seq. ID no. 12666061
MAKSENSTTSTFSSFANKIQPSNDAESDPDSYALEKFKLYETRARFYLVGSDRNKRFFRVLKIDRSEPSELNISEDPVVYSPQEIKSLLQRIAEGNRATGGLAFVAKVYGIAGCAKFMESYYLVLVTKRRQIGCICGHAIYAIDESQMISVPHATIQSDVANSKTELRYKKLLSSVDLTKDFFYSYTYPIMQSLQKNVLSSGEEGMPYDNIFVWNSYLTQPIRSRCNNTIWTLALVHGHFKQIRLSIYGRDFSVTLVSRRSRHFAGTRYLKRGVNDRGRVANDVETEQLVLDDEAGSCKGKMSSVVQMRGSIPLFWSQEASRFSPKPDIFLQRYDPTYESTKMHFEDLVNRYGNPIIVLNLIKTVEKRPREMVLRREFANAVGYLNSIFREENHLKFIHWDFHKFAKSKSANVLAVLGAVASEALDLTGLYFSGKPKIVKKKASQLSHANTAREPSLRDLRAYSAELSRGESANDILSALANREKEMKLTQQKKDEGTNSSAPRYQSGVLRTNCIDCLDRTNVAQYAYGLAALGRQLHAMGLSDTPKIDPDSSIAAALMDMYQSMGDALAQQYGGSAAHNTVFPERQGKWKATTQSREFLKSIKRYYSNTYTDGEKQDAINLFLGYFQPQEGKPALWELDSDYYLHVSGIGDDIFPDIGVQSIAKPMSGIGVNLAPVPAFRDDFSRKKLTSFDKLIEQTCSSIKNVRLCSETDQRPGGNTGSTGVAPDAAEIQLKSPNWLFGSRKPEESSSATKSGADDSEKGVTSTERVNDFCNLDWLSKSDRHQGDIFQRYLSITSTNEANGWYGGTLLGDQDENSEIYRHYAQFCQCPAMEPFENDHEFEQNFAEVLRMNTIDVMDIEEEETEMESDFNEYTQIGSDLGIIPMQCKHFASDPCWLARWLVGDDKVPKVI

SEQ ID NO: 82532 - protein, 795 aa, Arabidopsis thaliana
  peptide (1)..(795): Ceres Seq. ID no. 12666062
MESYYLVLVTKRRQIGCICGHAIYAIDESQMISVPHATIQSDVANSKTELRYKKLLSSVDLTKDFFYSYTYPIMQSLQKNVLSSGEEGMPYDNIFVWNSYLTQPIRSRCNNTIWTLALVHGHFKQIRLSIYGRDFSVTLVSRRSRHFAGTRYLKRGVNDRGRVANDVETEQLVLDDEAGSCKGKMSSVVQMRGSIPLFWSQEASRFSPKPDIFLQRYDPTYESTKMHFEDLVNRYGNPIIVLNLIKTVEKRPREMVLRREFANAVGYLNSIFREENHLKFIHWDFHKFAKSKSANVLAVLGAVASEALDLTGLYFSGKPKIVKKKASQLSHANTAREPSLRDLRAYSAELSRGESANDILSALANREKEMKLTQQKKDEGTNSSAPRYQSGVLRTNCIDCLDRTNVAQYAYGLAALGRQLHAMGLSDTPKIDPDSSIAAALMDMYQSMGDALAQQYGGSAAHNTVFPERQGKWKATTQSREFLKSIKRYYSNTYTDGEKQDAINLFLGYFQPQEGKPALWELDSDYYLHVSGIGDDIFPDIGVQSIAKPMSGIGVNLAPVPAFRDDFSRKKLTSFDKLIEQTCSSIKNVRLCSETDQRPGGNTGSTGVAPDAAEIQLKSPNWLFGSRKPEESSSATKSGADDSEKGVTSTERVNDFCNLDWLSKSDRHQGDIFQRYLSITSTNEANGWYGGTLLGDQDENSEIYRHYAQFCQCPAMEPFENDHEFEQNFAEVLRMNTIDVMDIEEEETEMESDFNEYTQIGSDLGIIPMQCKHFASDPCWLARWLVGDDKVPKVI

SEQ ID NO: 82533 - protein, 765 aa, Arabidopsis thaliana
  peptide (1)..(765): Ceres Seq. ID no. 12666063
MISVPHATIQSDVANSKTELRYKKLLSSVDLTKDFFYSYTYPIMQSLQKNVLSSGEEGMPYDNIFVWNSYLTQPIRSRCNNTIWTLALVHGHFKQIRLSIYGRDFSVTLVSRRSRHFAGTRYLKRGVNDRGRVANDVETEQLVLDDEAGSCKGKMSSVVQMRGSIPLFWSQEASRFSPKPDIFLQRYDPTYESTKMHFEDLVNRYGNPIIVLNLIKTVEKRPREMVLRREFANAVGYLNSIFREENHLKFIHWDFHKFAKSKSANVLAVLGAVASEALDLTGLYFSGKPKIVKKKASQLSHANTAREPSLRDLRAYSAELSRGESANDILSALANREKEMKLTQQKKDEGTNSSAPRYQSGVLRTNCIDCLDRTNVAQYAYGLAALGRQLHAMGLSDTPKIDPDSSIAAALMDMYQSMGDALAQQYGGSAAHNTVFPERQGKWKATTQSREFLKSIKRYYSNTYTDGEKQDAINLFLGYFQPQEGKPALWELDSDYYLHVSGIGDDIFPDIGVQSIAKPMSGIGVNLAPVPAFRDDFSRKKLTSFDKLIEQTCSSIKNVRLCSETDQRPGGNTGSTGVAPDAAEIQLKSPNWLFGSRKPEESSSATKSGADDSEKGVTSTERVNDFCNLDWLSKSDRHQGDIFQRYLSITSTNEANGWYGGTLLGDQDENSEIYRHYAQFCQCPAMEPFENDHEFEQNFAEVLRMNTIDVMDIEEEETEMESDFNEYTQIGSDLGIIPMQCKHFASDPCWLARWLVGDDKVPKVI

SEQ ID NO: 82534 - DNA, 1959 bp, Arabidopsis thaliana
  misc_feature (1)..(1959): Ceres Seq. ID no. 12666067
  misc_feature (1)..(1959): Ortholog of  Ceres SEQ ID NO 13598286 as cited in SEQ ID NO 68326
gatactaaaaaccatgagactgtcttctcttccgatcaacactctcataaatctcccaaaatctctctttctaatttctccttttcgcttccgtaaccttaatcgttcccttaccgtcgcgtctcgcatttcatcaacgcttcttcgcgtttccggtgtctcgtctcgtccgtgtggttactggttctcgacgaacgcggcgatgacgaatgttggagaggaagataagcaatcgattccttcaatcgaattgaaggagaatattgagctcactgacaaagaacggaaaattttcgatcggcttcttagtactctccgttactgtaaccttgacacacagcttcgtgtcgccggtggttgggtccgtgataagctgctagggaaagagagtgatgatattgatatagctattgataatatgtctggaagtgaatttcttgataagtttaaggaatatttatcttcgagagatgaagaagtacaaggcgacactgttattgaaaggaaccctgaccaatctaaacacttggagacagcaaagttgcggatttatgaccagtggatagattttgttaacttgagaagtgaagaatacacagagaatagtcgtattcctacaatgaaatttggcaccgcaaaagatgatgcttttcgtagagatttaaccataaatagtttattctacaatatcaactctggcgcagtagaagaccttacagaaagaggcatcgatgacctcaagtccggaaaaattgttacacccttgcctgcaaaagccacatttttggatgatcctttgcgagttctccgggctgttcgctttggtgcaaggtttggttttactttggatgaagaactaaaagaagctgcttcaagtgaggaagtaagggtagctcttggagaaaaaattagcagagagcggattgggaatgagattgacttgatgatatctgggaatggaccagtttcagcggttacctatctttctgacctgaaactatttagtgttgtctttgcccttccctcttcagctgagccttcaccaccagaaaattgtggcagcctctcccaatcctacttggaagctatgtggagcttacttaaaacacctcggccaggaaagttcagtggtgaacaaagacggcttgctctctatgctgctatgtttctcccttttaggaaaactgtatacaaggacactaagggcaaatcgattcctgttgtcaaccacatttttaaattctccatgaagaggaagaccagtgacgctgaaacagttatgaatatacatcagaccacggagagatttcgttcgttgattccttcccttgaagtgaagaaagatgtagaactggacgagctaacttgggccgctgatattcttgagcattggaaatccatcacccttaatgatccagtgatcccagcaacttcaaaaataagagtactcacagggtttctacttagagatattaaagacttctggcgtgtttctctgttaacatctttgttattgtctgctacggttgacggtagcaacgatcatcaagatatcgggcagctggacttccaactggaaaggatgcgagaaacttatctgacagttgaggccaccattcatgaactgggtcttgataagatctgggatgcaaagcctctagtcaatggcagggagataatgcaaattgctgagctgaagggaggatcccggctcatccgtgaatggcaacagaagctgctcacttggcagctggcttaccccaacggcaccgcagaggagtgcaaggagtggatgagagatatcaaagctaaacgacaaaggatagagtgacttaagaatctagtggctagttgtgctgtgtagtcttataaaaatccactaacattgtagattaatttaaactcagttttgacaaattttatcgattctaggctcattccctggcaagtttctgatgt

SEQ ID NO: 82535 - protein, 609 aa, Arabidopsis thaliana
  peptide (1)..(609): Ceres Seq. ID no. 12666068
ILKTMRLSSLPINTLINLPKSLFLISPFRFRNLNRSLTVASRISSTLLRVSGVSSRPCGYWFSTNAAMTNVGEEDKQSIPSIELKENIELTDKERKIFDRLLSTLRYCNLDTQLRVAGGWVRDKLLGKESDDIDIAIDNMSGSEFLDKFKEYLSSRDEEVQGDTVIERNPDQSKHLETAKLRIYDQWIDFVNLRSEEYTENSRIPTMKFGTAKDDAFRRDLTINSLFYNINSGAVEDLTERGIDDLKSGKIVTPLPAKATFLDDPLRVLRAVRFGARFGFTLDEELKEAASSEEVRVALGEKISRERIGNEIDLMISGNGPVSAVTYLSDLKLFSVVFALPSSAEPSPPENCGSLSQSYLEAMWSLLKTPRPGKFSGEQRRLALYAAMFLPFRKTVYKDTKGKSIPVVNHIFKFSMKRKTSDAETVMNIHQTTERFRSLIPSLEVKKDVELDELTWAADILEHWKSITLNDPVIPATSKIRVLTGFLLRDIKDFWRVSLLTSLLLSATVDGSNDHQDIGQLDFQLERMRETYLTVEATIHELGLDKIWDAKPLVNGREIMQIAELKGGSRLIREWQQKLLTWQLAYPNGTAEECKEWMRDIKAKRQRIE

SEQ ID NO: 82536 - protein, 605 aa, Arabidopsis thaliana
  peptide (1)..(605): Ceres Seq. ID no. 12666069
MRLSSLPINTLINLPKSLFLISPFRFRNLNRSLTVASRISSTLLRVSGVSSRPCGYWFSTNAAMTNVGEEDKQSIPSIELKENIELTDKERKIFDRLLSTLRYCNLDTQLRVAGGWVRDKLLGKESDDIDIAIDNMSGSEFLDKFKEYLSSRDEEVQGDTVIERNPDQSKHLETAKLRIYDQWIDFVNLRSEEYTENSRIPTMKFGTAKDDAFRRDLTINSLFYNINSGAVEDLTERGIDDLKSGKIVTPLPAKATFLDDPLRVLRAVRFGARFGFTLDEELKEAASSEEVRVALGEKISRERIGNEIDLMISGNGPVSAVTYLSDLKLFSVVFALPSSAEPSPPENCGSLSQSYLEAMWSLLKTPRPGKFSGEQRRLALYAAMFLPFRKTVYKDTKGKSIPVVNHIFKFSMKRKTSDAETVMNIHQTTERFRSLIPSLEVKKDVELDELTWAADILEHWKSITLNDPVIPATSKIRVLTGFLLRDIKDFWRVSLLTSLLLSATVDGSNDHQDIGQLDFQLERMRETYLTVEATIHELGLDKIWDAKPLVNGREIMQIAELKGGSRLIREWQQKLLTWQLAYPNGTAEECKEWMRDIKAKRQRIE

SEQ ID NO: 82537 - protein, 542 aa, Arabidopsis thaliana
  peptide (1)..(542): Ceres Seq. ID no. 12666070
MTNVGEEDKQSIPSIELKENIELTDKERKIFDRLLSTLRYCNLDTQLRVAGGWVRDKLLGKESDDIDIAIDNMSGSEFLDKFKEYLSSRDEEVQGDTVIERNPDQSKHLETAKLRIYDQWIDFVNLRSEEYTENSRIPTMKFGTAKDDAFRRDLTINSLFYNINSGAVEDLTERGIDDLKSGKIVTPLPAKATFLDDPLRVLRAVRFGARFGFTLDEELKEAASSEEVRVALGEKISRERIGNEIDLMISGNGPVSAVTYLSDLKLFSVVFALPSSAEPSPPENCGSLSQSYLEAMWSLLKTPRPGKFSGEQRRLALYAAMFLPFRKTVYKDTKGKSIPVVNHIFKFSMKRKTSDAETVMNIHQTTERFRSLIPSLEVKKDVELDELTWAADILEHWKSITLNDPVIPATSKIRVLTGFLLRDIKDFWRVSLLTSLLLSATVDGSNDHQDIGQLDFQLERMRETYLTVEATIHELGLDKIWDAKPLVNGREIMQIAELKGGSRLIREWQQKLLTWQLAYPNGTAEECKEWMRDIKAKRQRIE

SEQ ID NO: 82538 - DNA, 1188 bp, Arabidopsis thaliana
  misc_feature (1)..(1188): Ceres Seq. ID no. 12666081
  misc_feature (1)..(1188): Ortholog of  Ceres SEQ ID NO 14316144 as cited in SEQ ID NO 52397
atgagatttgctactctgttttcggttttgctgcttcttcttcgattcggtttaatcgtggaatcgatcatcgtcccagttgatttcttggctctgcaagcgattcgtaaatcactcgatgatttgccaggttccaatttcttcgattcatgggatttcacctctgatccttgtaacttcgcaggagtttactgtgacgatgataaagtaaccgcgcttaacctcggtgatccaagagccggttcacccggtttatctggtcggattgacccggctattggaaaactctctgctttaacggagctctctatcgtcccgggtcggatcatgggttcgttaccgcatacaatctcacagtcaaagaatcttcgatttctcgcaatcagtcggaatttcatctccggtgagattccagcgagtctaagcgagcttcggggactcaaaacgcttgatttgagctataatcagctaaccgggtcgatccctccgtcaatcggatccttaccggagctatccaatctgattctatgtcacaatcacttgaacggatcaattcctcaattcctctcacaatccttaacccgaatcgatctcaagcgcaacaatctcaccggtataatttctctgacgtctcttccgccgtcgttacaatatctctcgctcgcttggaaccagctaaccggtccagtataccgggttttactcagattaaaccagctcaattaccttgatctcagcttaaaccggttcaccggtgcaatccccggtcagatcttcaccttcccgatcaccaatcttcaattacaacgcaatttcttctacggcgtgatccaaccgccgaatcaggtaacaataccaaccgtcgatttaagctacaacagattctccggcgagctttctccgcttctctccaacgtacagaacctatatttgaacaataaccggttcaccggtcaagttccggttagcttcgtggatcggttattggcatcgaatattcaaacactgtacctccaacacaacttcttgacgggaatacaaattagcccggcggcagatattccggtgagcagctcgctgtgtctgcaatacaactgtatggtgctaccggtacagacgccgtgtccggttaaagccggtttgcagaaaactagacccacaacgcagtgcagcgagtggcgagggtaa

SEQ ID NO: 82539 - protein, 395 aa, Arabidopsis thaliana
  peptide (1)..(395): Ceres Seq. ID no. 12666082
MRFATLFSVLLLLLRFGLIVESIIVPVDFLALQAIRKSLDDLPGSNFFDSWDFTSDPCNFAGVYCDDDKVTALNLGDPRAGSPGLSGRIDPAIGKLSALTELSIVPGRIMGSLPHTISQSKNLRFLAISRNFISGEIPASLSELRGLKTLDLSYNQLTGSIPPSIGSLPELSNLILCHNHLNGSIPQFLSQSLTRIDLKRNNLTGIISLTSLPPSLQYLSLAWNQLTGPVYRVLLRLNQLNYLDLSLNRFTGAIPGQIFTFPITNLQLQRNFFYGVIQPPNQVTIPTVDLSYNRFSGELSPLLSNVQNLYLNNNRFTGQVPVSFVDRLLASNIQTLYLQHNFLTGIQISPAADIPVSSSLCLQYNCMVLPVQTPCPVKAGLQKTRPTTQCSEWRG

SEQ ID NO: 82540 - protein, 286 aa, Arabidopsis thaliana
  peptide (1)..(286): Ceres Seq. ID no. 12666083
MGSLPHTISQSKNLRFLAISRNFISGEIPASLSELRGLKTLDLSYNQLTGSIPPSIGSLPELSNLILCHNHLNGSIPQFLSQSLTRIDLKRNNLTGIISLTSLPPSLQYLSLAWNQLTGPVYRVLLRLNQLNYLDLSLNRFTGAIPGQIFTFPITNLQLQRNFFYGVIQPPNQVTIPTVDLSYNRFSGELSPLLSNVQNLYLNNNRFTGQVPVSFVDRLLASNIQTLYLQHNFLTGIQISPAADIPVSSSLCLQYNCMVLPVQTPCPVKAGLQKTRPTTQCSEWRG

SEQ ID NO: 82541 - DNA, 840 bp, Arabidopsis thaliana
  misc_feature (1)..(840): Ceres Seq. ID no. 12666101
  misc_feature (1)..(840): Ortholog of  Ceres SEQ ID NO 13594163 as cited in SEQ ID NO 60426
atgacagggatatacaaagtaatttgctattacaagaagctagaaggtaaagtagcactcatcactggaggagcaagtgggattggcaaagcaacagccggaaaattcatcagtcatggagccaaagttatcattgccgatatccaaccgcagattgggcgagaaaccgagcaagaactcggtcccagttgtgcttacttcccatgcgatgtgaccaaagaatcagacattgctaacgcagttgacttcgctgtctcgctccatacaaagctcgacattatgtacaacaatgctggtattccctgcaaaacgcctcctagtatcgttgatcttgatctcaatgttttcgacaaggtaatcaacacaaatgtccgtggagtcatggcaggaatcaaacatgctgctcgtgtgatgatcccgcgtaactctggatccatcatttgtgcagggagtgtcacggggatgatgggcggtttagcccaacatacttacagcgtctcaaaatccgctgttatcggaattgtaagatcaacagcttcagaactatgcaagcacaggatccgggtcaactgcatttctccttttgcgatcacaacatcattcgtgatggatgagatgcgacagatttaccccggtgttgatgactcaaggctgatccagatagtgcagagtacaggagtgttaaatggagaggtttgtgaaccaaccgatgtagctaatgcagcggtgtatctcgcttccgatgattcaaagtatgtaaatgggcataatctggtggtagatggaggattcacaactgtaaagacgttagatttccctgcacctgaccaagtgaagtaa

SEQ ID NO: 82542 - protein, 279 aa, Arabidopsis thaliana
  peptide (1)..(279): Ceres Seq. ID no. 12666102
MTGIYKVICYYKKLEGKVALITGGASGIGKATAGKFISHGAKVIIADIQPQIGRETEQELGPSCAYFPCDVTKESDIANAVDFAVSLHTKLDIMYNNAGIPCKTPPSIVDLDLNVFDKVINTNVRGVMAGIKHAARVMIPRNSGSIICAGSVTGMMGGLAQHTYSVSKSAVIGIVRSTASELCKHRIRVNCISPFAITTSFVMDEMRQIYPGVDDSRLIQIVQSTGVLNGEVCEPTDVANAAVYLASDDSKYVNGHNLVVDGGFTTVKTLDFPAPDQVK

SEQ ID NO: 82543 - protein, 186 aa, Arabidopsis thaliana; identical to SEQ ID NO: 29806
  peptide (1)..(186): Ceres Seq. ID no. 12666103

SEQ ID NO: 82544 - protein, 152 aa, Arabidopsis thaliana
  peptide (1)..(152): Ceres Seq. ID no. 12666104
MAGIKHAARVMIPRNSGSIICAGSVTGMMGGLAQHTYSVSKSAVIGIVRSTASELCKHRIRVNCISPFAITTSFVMDEMRQIYPGVDDSRLIQIVQSTGVLNGEVCEPTDVANAAVYLASDDSKYVNGHNLVVDGGFTTVKTLDFPAPDQVK

SEQ ID NO: 82545 - DNA, 909 bp, Arabidopsis thaliana
  misc_feature (1)..(909): Ceres Seq. ID no. 12666133
  misc_feature (1)..(909): Ortholog of  Ceres SEQ ID NO 15180578 as cited in SEQ ID NO 1178
atggagtttcatcttgaacatcctctctcacattcttcactccacaataacttcaacgacgacacagactatgaaactttaccacactctctcttcctcgtcgagtttcaacacatgccttcttctcattacttccatagcctcaagtcctctgcttttcttctctctaatcgaaaccaagccatttcttcaatcactcagtattcaagaaaattcgacgacccatctctgacgtatcttgctgtgaattatctagacaggttcttgtctagcgaagatatgccgcagtcaaagccctggattcttaagctcatatctctctcttgtgtctctttgtctgcaaaaatgaggaaaccagacatgtctgtttctgatcttccggtggaaggtgagttttttgatgctcagatgatagagagaatggagaatgtgattctaggagctcttaaatggaggatgcgctctgttactcctttctcctttttggcctttttcattagtctctttgagctcaaagaagaagatcctttactactaaaacattccctcaaatctcaaaccagtgatcttactttcagtcttcaacatgatatcagtttcctcgagtttaaaccatcggtgattgcaggcgcggcacttctctttgcttctttcgagctctgtcctctacagtttccatgtttcagtaacagaatcaaccaatgcacatatgtaaataaggatgagttaatggagtgttacaaagcaatacaagagagagatattatagttggagaaaacgaaggaagcactgaaacagcagtaaatgtgcttgatcagcaattctcgagttgtgaaagcgataagagcatcacaatcacagcttcttcttcacctaagaggaggaaaactagtactcgtcgttactaa

SEQ ID NO: 82546 - protein, 302 aa, Arabidopsis thaliana
  peptide (1)..(302): Ceres Seq. ID no. 12666134
MEFHLEHPLSHSSLHNNFNDDTDYETLPHSLFLVEFQHMPSSHYFHSLKSSAFLLSNRNQAISSITQYSRKFDDPSLTYLAVNYLDRFLSSEDMPQSKPWILKLISLSCVSLSAKMRKPDMSVSDLPVEGEFFDAQMIERMENVILGALKWRMRSVTPFSFLAFFISLFELKEEDPLLLKHSLKSQTSDLTFSLQHDISFLEFKPSVIAGAALLFASFELCPLQFPCFSNRINQCTYVNKDELMECYKAIQERDIIVGENEGSTETAVNVLDQQFSSCESDKSITITASSSPKRRKTSTRRY

SEQ ID NO: 82547 - protein, 264 aa, Arabidopsis thaliana
  peptide (1)..(264): Ceres Seq. ID no. 12666135
MPSSHYFHSLKSSAFLLSNRNQAISSITQYSRKFDDPSLTYLAVNYLDRFLSSEDMPQSKPWILKLISLSCVSLSAKMRKPDMSVSDLPVEGEFFDAQMIERMENVILGALKWRMRSVTPFSFLAFFISLFELKEEDPLLLKHSLKSQTSDLTFSLQHDISFLEFKPSVIAGAALLFASFELCPLQFPCFSNRINQCTYVNKDELMECYKAIQERDIIVGENEGSTETAVNVLDQQFSSCESDKSITITASSSPKRRKTSTRRY

SEQ ID NO: 82548 - protein, 209 aa, Arabidopsis thaliana
  peptide (1)..(209): Ceres Seq. ID no. 12666136
MPQSKPWILKLISLSCVSLSAKMRKPDMSVSDLPVEGEFFDAQMIERMENVILGALKWRMRSVTPFSFLAFFISLFELKEEDPLLLKHSLKSQTSDLTFSLQHDISFLEFKPSVIAGAALLFASFELCPLQFPCFSNRINQCTYVNKDELMECYKAIQERDIIVGENEGSTETAVNVLDQQFSSCESDKSITITASSSPKRRKTSTRRY

SEQ ID NO: 82549 - DNA, 1486 bp, Arabidopsis thaliana
  misc_feature (1)..(1486): Ceres Seq. ID no. 12666154
  misc_feature (1)..(1486): Ortholog of  Ceres SEQ ID NO 15227026 as cited in SEQ ID NO 52193
  misc_feature (1)..(1486): Ortholog of  Ceres SEQ ID NO 15177903 as cited in SEQ ID NO 54993
  misc_feature (1)..(1486): Ortholog of  Ceres SEQ ID NO 15177994 as cited in SEQ ID NO 55641
  misc_feature (1)..(1486): Ortholog of  Ceres SEQ ID NO 13595454 as cited in SEQ ID NO 56502
agacactcgcttgcgtgtctccctctcttaaactctctctttctctttctcttttggtttctgggttatttcaaagaaaagaatcaagaaacccctctttctctcttacaagaatcccatcatggtgtttggaaaagggtcaaaccttgacagattccttcattgcacaacacctgtagtgccaccccaatctctatccaaggcggagattaggagtttgaataggatttggcatccatgggagagacaaaaggttgagtttttcagattgagtgatctatgggattgttatgatgaatggagtgcttatggagctggtgttccaattcgtctctctaatggagaatctcttgttcaatattatgttccctatctctctgctattcagattttcacctctcgttcttccttgatccgcttaagggatgattctgaagatggggaaagcagagattcgtttagtgattcatatagtgatgagagtgaaagtgataaactttcgagatgtgcttctgatgaaggacttgaacatgacgctctcttgcatcctaatgatcggttgggatatctttatctgcaatactttgagagatcagctccttatgctcgagttcctctcatggataagatcaatgaattggctcaaaggtacccgggactaatgtcgttgcgaagcgtagatctttccccggcaagttggatggcggtagcgtggtaccctatttaccatattccaatgggaaggaccatcaaagatttgtccacttgtttcctcacttatcacactctttcatcttctttccaagatatggagccagaagaaaatggcggggaaaaggagaggatccggaaggaaggagaaggtgtaactttgcttccttttgggttagccacttataagatgcaaggcaatgtttggctctcggaagacgatcaaggtcaagatcaagagcgagttctttcgcttctaagtgttgcggattcttggctaaaacagctaagagtccaacaccatgacttcaactacttctcaagaatggctcaccgtggctgaaacaaatccgttgctatatactgatgagttcaaatgtagattttgtatctctttttgtttttcttgttggtctcaagtggcaaggagattacttttttccctggtcgcaatataccgtgtttgtccagtggttggagtagcagtggcagccgtgaagaggactgagcgtttccttaacacacaagtacagcggtttcaacgttttgggtgtagaatagctttaaagtagcatcaatgggagatgtcatatattataagtgctgatttgttgaaaagagtggtttcttgtttcttgataaacattgattgagagggtcttgttcttgtacctcagtaatactttaaaggagtagcaagtgtaacaatctcatcatatttgtaactgtttttacccaaatacataaatcaaagctgatgatttttgtgtgtttt

SEQ ID NO: 82550 - protein, 310 aa, Arabidopsis thaliana
  peptide (1)..(310): Ceres Seq. ID no. 12666155
MVFGKGSNLDRFLHCTTPVVPPQSLSKAEIRSLNRIWHPWERQKVEFFRLSDLWDCYDEWSAYGAGVPIRLSNGESLVQYYVPYLSAIQIFTSRSSLIRLRDDSEDGESRDSFSDSYSDESESDKLSRCASDEGLEHDALLHPNDRLGYLYLQYFERSAPYARVPLMDKINELAQRYPGLMSLRSVDLSPASWMAVAWYPIYHIPMGRTIKDLSTCFLTYHTLSSSFQDMEPEENGGEKERIRKEGEGVTLLPFGLATYKMQGNVWLSEDDQGQDQERVLSLLSVADSWLKQLRVQHHDFNYFSRMAHRG

SEQ ID NO: 82551 - DNA, 1608 bp, Arabidopsis thaliana
  misc_feature (1)..(1608): Ceres Seq. ID no. 12666226
  misc_feature (1)..(1608): Ortholog of  Ceres SEQ ID NO 13594037 as cited in SEQ ID NO 55666
  misc_feature (1)..(1608): Ortholog of  Ceres SEQ ID NO 13657707 as cited in SEQ ID NO 66407
atgttggttaaagttttctcttttttcatccttatgataacaatggtggttattggtgttagcaaagaatattgtgatgacaaacactcatgtcaaaactttttgttggagcttaagacagcttcctcgtcactctcggagattagacgtcgtgacttattgatcatcgttttgaagaattccgtgcggaagatcgacatggctatgattggtgtgatggaagatacaaaacaacatgaggagatggagaatgataagctatgtttgaaggaggacacaaatctatttgaggagatgatggagtcggcaaaagataggatgatccgttcagtggaggaactcttaggaggagaattcccttatcttggatcttacgaaaacatccacacttggctcagtggcgttcttactagctacatcacatgtatcgacgaaattggtgacggtgcctataaacgtcgggtcgagccacagcttcaagacctcatttctaaggcaaaggtagctttggctctttttatctccatttcgccgagagacaacaccgaacttaactcggtggttcccaatagcccgtcttggttatctcatgttgacaagaaagatctatatctcaatgctgaggctctaaaaaagattgccgatgttgtggtcgcgaaagatgggaccggaaagtacaacacagtgaatgcggccattgcagcagcacctcaacacagccacaagagattcatcatctatataaagacaggcatttatgatgaaatcgtcgccattgagaatacgaaacccaatttaactcttataggtgatggtcaagattcaaccatcatcacgggcaatttaagcgctagcaatgttagaagaacgttctacactgcaacttttgacaattctaattatactaaaaatatgtttgaagcttctaatggtaaaggattcatcggagtagacatgtgcttccgaaacacggtcgggccggcaaaaggaccagctgttgccctccgtgtgagtggtgatatgtccgtcatttacagatgtcgtgtcgagggatatcaggatgccttgtatcctcacatagaccgccagttttatagggagtgctttattaccggtactgtagatttcatttgtggaaacgcagcggcggtatttcaattctgccagattgtagcaagacagcctaatatggggcaaagcaatttcataaccgctcaatcacgcgagactaaggacgacaaatcgggcttctcaattcaaaactgcaacatcacagcaagttcggatctagatacagcaaccgtaaaaacgtatcttggaaggccttggaggatattttcaacagtcgcggttctgcagtctttcatcggtgatttagttgatcccgcaggctggactccttgggaaggagaaactggtctgtcaactctccactaccgcgaatatcaaaataggggtccgggagctgtgactagcagaagggtgaagtggtcgggctttaaagttatgaaagatcctaaacaggctacagaattcactgtagccaagctcttagatggagaaacttggctaaaagaaagtcgaattccatataaaagtggattgtaa

SEQ ID NO: 82552 - protein, 535 aa, Arabidopsis thaliana
  peptide (1)..(535): Ceres Seq. ID no. 12666227
MLVKVFSFFILMITMVVIGVSKEYCDDKHSCQNFLLELKTASSSLSEIRRRDLLIIVLKNSVRKIDMAMIGVMEDTKQHEEMENDKLCLKEDTNLFEEMMESAKDRMIRSVEELLGGEFPYLGSYENIHTWLSGVLTSYITCIDEIGDGAYKRRVEPQLQDLISKAKVALALFISISPRDNTELNSVVPNSPSWLSHVDKKDLYLNAEALKKIADVVVAKDGTGKYNTVNAAIAAAPQHSHKRFIIYIKTGIYDEIVAIENTKPNLTLIGDGQDSTIITGNLSASNVRRTFYTATFDNSNYTKNMFEASNGKGFIGVDMCFRNTVGPAKGPAVALRVSGDMSVIYRCRVEGYQDALYPHIDRQFYRECFITGTVDFICGNAAAVFQFCQIVARQPNMGQSNFITAQSRETKDDKSGFSIQNCNITASSDLDTATVKTYLGRPWRIFSTVAVLQSFIGDLVDPAGWTPWEGETGLSTLHYREYQNRGPGAVTSRRVKWSGFKVMKDPKQATEFTVAKLLDGETWLKESRIPYKSGL

SEQ ID NO: 82553 - protein, 524 aa, Arabidopsis thaliana
  peptide (1)..(524): Ceres Seq. ID no. 12666228
MITMVVIGVSKEYCDDKHSCQNFLLELKTASSSLSEIRRRDLLIIVLKNSVRKIDMAMIGVMEDTKQHEEMENDKLCLKEDTNLFEEMMESAKDRMIRSVEELLGGEFPYLGSYENIHTWLSGVLTSYITCIDEIGDGAYKRRVEPQLQDLISKAKVALALFISISPRDNTELNSVVPNSPSWLSHVDKKDLYLNAEALKKIADVVVAKDGTGKYNTVNAAIAAAPQHSHKRFIIYIKTGIYDEIVAIENTKPNLTLIGDGQDSTIITGNLSASNVRRTFYTATFDNSNYTKNMFEASNGKGFIGVDMCFRNTVGPAKGPAVALRVSGDMSVIYRCRVEGYQDALYPHIDRQFYRECFITGTVDFICGNAAAVFQFCQIVARQPNMGQSNFITAQSRETKDDKSGFSIQNCNITASSDLDTATVKTYLGRPWRIFSTVAVLQSFIGDLVDPAGWTPWEGETGLSTLHYREYQNRGPGAVTSRRVKWSGFKVMKDPKQATEFTVAKLLDGETWLKESRIPYKSGL

SEQ ID NO: 82554 - protein, 521 aa, Arabidopsis thaliana
  peptide (1)..(521): Ceres Seq. ID no. 12666229
MVVIGVSKEYCDDKHSCQNFLLELKTASSSLSEIRRRDLLIIVLKNSVRKIDMAMIGVMEDTKQHEEMENDKLCLKEDTNLFEEMMESAKDRMIRSVEELLGGEFPYLGSYENIHTWLSGVLTSYITCIDEIGDGAYKRRVEPQLQDLISKAKVALALFISISPRDNTELNSVVPNSPSWLSHVDKKDLYLNAEALKKIADVVVAKDGTGKYNTVNAAIAAAPQHSHKRFIIYIKTGIYDEIVAIENTKPNLTLIGDGQDSTIITGNLSASNVRRTFYTATFDNSNYTKNMFEASNGKGFIGVDMCFRNTVGPAKGPAVALRVSGDMSVIYRCRVEGYQDALYPHIDRQFYRECFITGTVDFICGNAAAVFQFCQIVARQPNMGQSNFITAQSRETKDDKSGFSIQNCNITASSDLDTATVKTYLGRPWRIFSTVAVLQSFIGDLVDPAGWTPWEGETGLSTLHYREYQNRGPGAVTSRRVKWSGFKVMKDPKQATEFTVAKLLDGETWLKESRIPYKSGL

SEQ ID NO: 82555 - DNA, 1752 bp, Arabidopsis thaliana
  misc_feature (1)..(1752): Ceres Seq. ID no. 12666237
  misc_feature (1)..(1752): Ortholog of  Ceres SEQ ID NO 14307940 as cited in SEQ ID NO 0
  misc_feature (1)..(1752): Ortholog of  Ceres SEQ ID NO 14308560 as cited in SEQ ID NO 0
atggcatcacaattagatttgatcggaggagactacatcgccggaatttcgatcaatcctccgacgaatagccgtgtgacttctgtatacagcgaagtccaagctagtcgtatcgaccacacacttcctcttccttccgtctttaaaacccctttcaagatcatcgatggtcctccaagctcctccgccggacatccagaggaaattgagaaattattccctaatttatttggacaaccatcagctttattggttcctaaccaatctaatgaagtttcatcggatcaaaagcttaagattggtgttgtgttgtctggtggtcaagcacctggaggacacaatgttatttgtggaatctttggctttaaaaacttgatttgtgattgtatttttgttgttggtttgatagattacttgcaagaatatgcaagaggaagtagtctgtttggttttcgtggcggtccagctggaatcatgaaggggaaatatattgagcttacttctgagtttgtgtacccttatagaaaccagggtggatttgatatgatatgtagtggaagagacaagattgaaactccagagcagtttaagcaagctgaagagactgttacaaagatggatttagatggtcttgtggtaattggtggagatgactccaatactaatgcttgtctccttgctgaacactttagagctaaaaacatgaaaactctggttattggatgccctaagacaatcgatggtgatttaaagagcaaagaagtccccacgagtttcgggtttgatactgcttgcaaggtaaaaatgattggaaatgttatgatcgatgcgcgttccacgggaaaatactatcactttgtgcgtcttatgggtcgtgctgcttctcacattacacttgaatgcgctttgcaaacccatccaaacattaccattattggagaagaggtttttgagaagaagcttacgttgaaaaatgttacagataacattgttgatgtgatctataaacgagcagaaaatggttataactacggtgtcattcttgttcctgaaggtctaattgattttatccctgaggtccaacagcttatttccgaactgaatgaagtcttagccgaaggaaacgtcgatgaagaaggccaatggaagaagaatcttaaaaaagagactttagagatttttgagtttcttcctcaaactattcaagaacaactaatgcttgagagagatccacatggaaatgtgcaggttgctaaaatagagacagagaaaatgttgattcaaatggttgaaaccgagctagagaaaaagaagacagagggtacatatgaacgcgagttcatggggaaatcacacttctttgggtatgaaggaagatgcggcttacctacaaatttcgatgcaacttactgctacgcattaggttacggtgctggatcacttctccagagcggaaagaccggattaatttcatcggttggaaacttggctgctcctgttgaagagtggacagttggtggtactgcactgacttcgttgatggatgttgagagaagacatggtaaattcaagcctgttatcaagaaagctatggttgaacttgaaggtgcaccgtttaagaaatttgcatcacagcgagaagaatgggctttgaagaatcgatacattagtcctggtccaattcagtttaagggaccgggatctgatgcgagaaatcacacattaatgctcgaactcggggctcaagcctaa

SEQ ID NO: 82556 - protein, 583 aa, Arabidopsis thaliana
  peptide (1)..(583): Ceres Seq. ID no. 12666238
MASQLDLIGGDYIAGISINPPTNSRVTSVYSEVQASRIDHTLPLPSVFKTPFKIIDGPPSSSAGHPEEIEKLFPNLFGQPSALLVPNQSNEVSSDQKLKIGVVLSGGQAPGGHNVICGIFGFKNLICDCIFVVGLIDYLQEYARGSSLFGFRGGPAGIMKGKYIELTSEFVYPYRNQGGFDMICSGRDKIETPEQFKQAEETVTKMDLDGLVVIGGDDSNTNACLLAEHFRAKNMKTLVIGCPKTIDGDLKSKEVPTSFGFDTACKVKMIGNVMIDARSTGKYYHFVRLMGRAASHITLECALQTHPNITIIGEEVFEKKLTLKNVTDNIVDVIYKRAENGYNYGVILVPEGLIDFIPEVQQLISELNEVLAEGNVDEEGQWKKNLKKETLEIFEFLPQTIQEQLMLERDPHGNVQVAKIETEKMLIQMVETELEKKKTEGTYEREFMGKSHFFGYEGRCGLPTNFDATYCYALGYGAGSLLQSGKTGLISSVGNLAAPVEEWTVGGTALTSLMDVERRHGKFKPVIKKAMVELEGAPFKKFASQREEWALKNRYISPGPIQFKGPGSDARNHTLMLELGAQA

SEQ ID NO: 82557 - protein, 425 aa, Arabidopsis thaliana
  peptide (1)..(425): Ceres Seq. ID no. 12666239
MKGKYIELTSEFVYPYRNQGGFDMICSGRDKIETPEQFKQAEETVTKMDLDGLVVIGGDDSNTNACLLAEHFRAKNMKTLVIGCPKTIDGDLKSKEVPTSFGFDTACKVKMIGNVMIDARSTGKYYHFVRLMGRAASHITLECALQTHPNITIIGEEVFEKKLTLKNVTDNIVDVIYKRAENGYNYGVILVPEGLIDFIPEVQQLISELNEVLAEGNVDEEGQWKKNLKKETLEIFEFLPQTIQEQLMLERDPHGNVQVAKIETEKMLIQMVETELEKKKTEGTYEREFMGKSHFFGYEGRCGLPTNFDATYCYALGYGAGSLLQSGKTGLISSVGNLAAPVEEWTVGGTALTSLMDVERRHGKFKPVIKKAMVELEGAPFKKFASQREEWALKNRYISPGPIQFKGPGSDARNHTLMLELGAQA

SEQ ID NO: 82558 - protein, 402 aa, Arabidopsis thaliana
  peptide (1)..(402): Ceres Seq. ID no. 12666240
MICSGRDKIETPEQFKQAEETVTKMDLDGLVVIGGDDSNTNACLLAEHFRAKNMKTLVIGCPKTIDGDLKSKEVPTSFGFDTACKVKMIGNVMIDARSTGKYYHFVRLMGRAASHITLECALQTHPNITIIGEEVFEKKLTLKNVTDNIVDVIYKRAENGYNYGVILVPEGLIDFIPEVQQLISELNEVLAEGNVDEEGQWKKNLKKETLEIFEFLPQTIQEQLMLERDPHGNVQVAKIETEKMLIQMVETELEKKKTEGTYEREFMGKSHFFGYEGRCGLPTNFDATYCYALGYGAGSLLQSGKTGLISSVGNLAAPVEEWTVGGTALTSLMDVERRHGKFKPVIKKAMVELEGAPFKKFASQREEWALKNRYISPGPIQFKGPGSDARNHTLMLELGAQA

SEQ ID NO: 82559 - DNA, 516 bp, Arabidopsis thaliana
  misc_feature (1)..(516): Ceres Seq. ID no. 12666241
  misc_feature (1)..(516): Ortholog of  Ceres SEQ ID NO 13580026 as cited in SEQ ID NO 62641
atgttaaggcaaacaactaaaagagcctttttagggctcgcttctcaaaatcccacaccgttccctgtcgtgtctcgattataccatccaaatgtcatcgaccattatgacaatccccgtaacgttggatcatttgataagaatgatcctaacgttggtacgggattggtcggagctcctcaatgtggagatgttatgaagcttcaggttaagtttgatggttctggtcaaatcattgatgctaaattcaagacctttggttgtggttctgccatagcagcttcttccgtcgctactgaatgggtcaagggaaaatccgtggaggaagtcttgaccataaagaactcgcaaattgcgaagcatctatcgttgccaccagtaaagctacattgcagtatgcttgcagaagacgctatcaaggcagcaattaaaaactacaaggagaagcaagacaaggctaatggcgaaaccgttgaaaccatcgattccacttatttacacggtattggatcgtga

SEQ ID NO: 82560 - protein, 171 aa, Arabidopsis thaliana
  peptide (1)..(171): Ceres Seq. ID no. 12666242
MLRQTTKRAFLGLASQNPTPFPVVSRLYHPNVIDHYDNPRNVGSFDKNDPNVGTGLVGAPQCGDVMKLQVKFDGSGQIIDAKFKTFGCGSAIAASSVATEWVKGKSVEEVLTIKNSQIAKHLSLPPVKLHCSMLAEDAIKAAIKNYKEKQDKANGETVETIDSTYLHGIGS

SEQ ID NO: 82561 - protein, 106 aa, Arabidopsis thaliana
  peptide (1)..(106): Ceres Seq. ID no. 12666243
MKLQVKFDGSGQIIDAKFKTFGCGSAIAASSVATEWVKGKSVEEVLTIKNSQIAKHLSLPPVKLHCSMLAEDAIKAAIKNYKEKQDKANGETVETIDSTYLHGIGS

SEQ ID NO: 82562 - DNA, 1977 bp, Arabidopsis thaliana
  misc_feature (1)..(1977): Ceres Seq. ID no. 12666312
  misc_feature (1)..(1977): Ortholog of  Ceres SEQ ID NO 13655237 as cited in SEQ ID NO 62892
  misc_feature (1)..(1977): Ortholog of  Ceres SEQ ID NO 13660544 as cited in SEQ ID NO 67401
atggaaagatccaatcttttccacatcccttgttttcttctcttatttcttctcttcaacatcaatggcgttcacactaccttcgtctgcggcgacgaagacttctctccaaacacaagctacgttgaaaacctcgaatctctcttgccttctcttgcttcaaacgtcatacgagaacgtggtttctacaacgtttcgctagacggagtttacgctcttgccctatgtcgaaaacactacgaagttcaagcttgtcgtcgctgcgtcgatagagcaagtaggactctgttaacacaatgccgaggcaaaacagaagcatatcactgggattccgaaaacgatgcaaacgtttcttgtctagtacgctactcaaatatccatagatttggcaaactaaagcttgagccaatagggaatgttcctcactcgagtcttgacccctcttccaatctaacccgaatcagccaagagtttgccgccagggctaatcgaacagttgaggttgcgtccacagctgatgagtcttcggtattgaagtattatggagtctcaagtgcagagtttacagacactcctgaggttaatatgttgatgcaatgcacacctgatttatcttccagtgactgtaatcattgtctgagagaaaatgttaggtataatcaagaacataactgggacagagttggaggaacagttgcccgtcctagttgttatttccgatgggatgattacagattcgcaggagctttcgataacctagagagagttcccgcgcctcctcgatctcctcaaactcgacaagattatcgggtcaagaaaggaagaatgtttcaaccatggagcgttgtggttgttgttttccctacgggcataaatcttgccgtgtttgtcgctttcgtgcttgcttatcgccggatgcggaggaggatttatactgaaatcaataagaattctgattctgatggtcaagctacgttaagatttgatcttggcatgatcttaattgcaaccaatgagttctcccttgaaaataagcttggacaaggtgggtttggatctgtctacaaggggatattaccgagcgggcaagagatagcggtaaagagattagctggaggctcaggacaaggagaactagagtttaagaatgaagtcttactcttgacaagactccaacataggaatctagttaagcttcttggattctgtaatgaaggaaatgaagagattcttgtctacgagcatgtccctaattcaagtcttgatcactttatctttgacgaagacaaacgttggcttcttacatgggatgtgaggtacagaatcatagaaggagttgcaagaggacttctttatctccatgaagattctcagttgaggattattcacagagatttgaaggcaagcaatatccttttagacgcggagatgaaccctaaagttgcagactttgggatggcgaggttgtttaacatggatgagactcgaggagagacaagcagagtagttggaacctacggatatatggctccggagtacgtgagacatggacaattctcagctaaatctgatgtttatagcttcggtgttatgcttttggagatgataagtggtgaaaaaaataagaactttgaaacagaaggacttcctgcttttgcatggaagagatggatagaaggagagcttgagagtataatcgatccttacttaaacgagaatccaagaaacgagatcataaagttgattcagattggtttgttgtgtgttcaagagaatgcagcaaagagaccaaccatgaactctgtaataacttggcttgcaagagacggtacttttacaatacctaaacctacagaagctgctttcgtcactctgcctctctcggtgaaacctgaaaataggtccatgagtgagcgtaaagacaaagatccgttttcagtggatgaggtctcgattacagtcttgtatcctcggtga

SEQ ID NO: 82563 - protein, 658 aa, Arabidopsis thaliana
  peptide (1)..(658): Ceres Seq. ID no. 12666313
MERSNLFHIPCFLLLFLLFNINGVHTTFVCGDEDFSPNTSYVENLESLLPSLASNVIRERGFYNVSLDGVYALALCRKHYEVQACRRCVDRASRTLLTQCRGKTEAYHWDSENDANVSCLVRYSNIHRFGKLKLEPIGNVPHSSLDPSSNLTRISQEFAARANRTVEVASTADESSVLKYYGVSSAEFTDTPEVNMLMQCTPDLSSSDCNHCLRENVRYNQEHNWDRVGGTVARPSCYFRWDDYRFAGAFDNLERVPAPPRSPQTRQDYRVKKGRMFQPWSVVVVVFPTGINLAVFVAFVLAYRRMRRRIYTEINKNSDSDGQATLRFDLGMILIATNEFSLENKLGQGGFGSVYKGILPSGQEIAVKRLAGGSGQGELEFKNEVLLLTRLQHRNLVKLLGFCNEGNEEILVYEHVPNSSLDHFIFDEDKRWLLTWDVRYRIIEGVARGLLYLHEDSQLRIIHRDLKASNILLDAEMNPKVADFGMARLFNMDETRGETSRVVGTYGYMAPEYVRHGQFSAKSDVYSFGVMLLEMISGEKNKNFETEGLPAFAWKRWIEGELESIIDPYLNENPRNEIIKLIQIGLLCVQENAAKRPTMNSVITWLARDGTFTIPKPTEAAFVTLPLSVKPENRSMSERKDKDPFSVDEVSITVLYPR

SEQ ID NO: 82564 - protein, 463 aa, Arabidopsis thaliana
  peptide (1)..(463): Ceres Seq. ID no. 12666314
MLMQCTPDLSSSDCNHCLRENVRYNQEHNWDRVGGTVARPSCYFRWDDYRFAGAFDNLERVPAPPRSPQTRQDYRVKKGRMFQPWSVVVVVFPTGINLAVFVAFVLAYRRMRRRIYTEINKNSDSDGQATLRFDLGMILIATNEFSLENKLGQGGFGSVYKGILPSGQEIAVKRLAGGSGQGELEFKNEVLLLTRLQHRNLVKLLGFCNEGNEEILVYEHVPNSSLDHFIFDEDKRWLLTWDVRYRIIEGVARGLLYLHEDSQLRIIHRDLKASNILLDAEMNPKVADFGMARLFNMDETRGETSRVVGTYGYMAPEYVRHGQFSAKSDVYSFGVMLLEMISGEKNKNFETEGLPAFAWKRWIEGELESIIDPYLNENPRNEIIKLIQIGLLCVQENAAKRPTMNSVITWLARDGTFTIPKPTEAAFVTLPLSVKPENRSMSERKDKDPFSVDEVSITVLYPR

SEQ ID NO: 82565 - protein, 461 aa, Arabidopsis thaliana
  peptide (1)..(461): Ceres Seq. ID no. 12666315
MQCTPDLSSSDCNHCLRENVRYNQEHNWDRVGGTVARPSCYFRWDDYRFAGAFDNLERVPAPPRSPQTRQDYRVKKGRMFQPWSVVVVVFPTGINLAVFVAFVLAYRRMRRRIYTEINKNSDSDGQATLRFDLGMILIATNEFSLENKLGQGGFGSVYKGILPSGQEIAVKRLAGGSGQGELEFKNEVLLLTRLQHRNLVKLLGFCNEGNEEILVYEHVPNSSLDHFIFDEDKRWLLTWDVRYRIIEGVARGLLYLHEDSQLRIIHRDLKASNILLDAEMNPKVADFGMARLFNMDETRGETSRVVGTYGYMAPEYVRHGQFSAKSDVYSFGVMLLEMISGEKNKNFETEGLPAFAWKRWIEGELESIIDPYLNENPRNEIIKLIQIGLLCVQENAAKRPTMNSVITWLARDGTFTIPKPTEAAFVTLPLSVKPENRSMSERKDKDPFSVDEVSITVLYPR

SEQ ID NO: 82566 - DNA, 1941 bp, Arabidopsis thaliana
  misc_feature (1)..(1941): Ceres Seq. ID no. 12666316
  misc_feature (1)..(1941): Ortholog of  Ceres SEQ ID NO 13655237 as cited in SEQ ID NO 62892
  misc_feature (1)..(1941): Ortholog of  Ceres SEQ ID NO 13655640 as cited in SEQ ID NO 63844
  misc_feature (1)..(1941): Ortholog of  Ceres SEQ ID NO 13584744 as cited in SEQ ID NO 69137
atgggaaagagttgtgttgtgactagttccttctcgcttctccttctcttccttcaaaccctaaaatatgttcatgccggtttcatttgctacggcgactttttcaatgttaactacggcgtcagtcgaacgtatctcttctcttctcttccttctaacgtcgtttctaacggcggtttctacaacgcatcgtttggcagagattccaaaaacaacagagtccacgttgttgccttatgcagacgaggctacgagaagcaagcttgtaagacatgtctcgaacatgtgattgaagacacaaaatccaagtgtcctcgccaaaaagagtctttctcgtgggtcactgatgaattcgacgacgtttcttgctctctacgttacaccaaccactcaactcttggcaaactcgagctcttaccaaatactattaaccctaaccctaacagtatagattccaaattcaacaacatggccatgttcagccaagaatggattgcaatggttaaccggacactcgaggctgcttccaccgctgagaattcctcagtccttaagtactacagcgcaacaagaacagagttcacacaaatttcagatgtttacgcgttgatgcagtgcgtgcctgatctatcgccaggcaactgcaagagatgtcttagagagtgtgtgaatgactttcagaagcagttttggggaagacaaggaggtggggttagtcggcctagctgttatttccggtgggatctttatccgtactacagagcttttgacaatgttgtaagagttcctgctcctcctcctcaagcttcttctactattatcgattacgggagagacgagaaaagttttcaaggaagcaacatagcaattattgtggtcccttcagtcatcaatctcatcatatttgtggttctaatattctcttggaagagaaagcagtcacacaccataatcaatgatgtttttgattcaaataatggtcaatctatgttacgttttgatcttcgaatgattgtaactgcaaccaataacttctctcttgaaaataagcttggccaaggtggatttggatctgtctacaagggaatattaccaagcgggcaagagatagcggtaaagagattaagaaaaggttcaggacaaggaggtatggagttcaagaacgaggtcttactcttgacaagactccaacataggaatctggttaagcttcttgggttttgtaatgaaaaagatgaagagattcttgtctacgagtttgtccccaattcaagccttgaccacttcatattcgatgaagaaaaacgccgagttctgacatgggatgtgaggtatacaatcatagaaggagttgcaagagggcttctttatctccatgaagattctcagttgaggattatacacagagatttgaaggcaagcaatatccttttagacgcggagatgaaccctaaggttgcagattttgggatggcaaggctgttcgatatggacgagactcgaggacagacaagcagagtagttggaacatatggatatatggctccagaatacgcgacatacggacaattctcgacaaaatctgatgtttatagctttggtgtcatgcttctagagatgataagtggtaaaagcaacaaaaagttggaaaaagaagaagaggaagaagaagaagagcttccagcttttgtgtggaagaggtggattgaaggaagatttgcagagatcattgatcctttggctgctccgagtaacaatatctcaataaacgaagtaatgaagctcattcacataggtttgttgtgtgttcaagaggatatttccaaaagacctagcattaattcaatcctcttttggcttgagagacacgctactatcacaatgcctgtgcccacgcctgttgcttatcttacgcgaccatcgttatcacttggtcattaa

SEQ ID NO: 82567 - protein, 646 aa, Arabidopsis thaliana
  peptide (1)..(646): Ceres Seq. ID no. 12666317
MGKSCVVTSSFSLLLLFLQTLKYVHAGFICYGDFFNVNYGVSRTYLFSSLPSNVVSNGGFYNASFGRDSKNNRVHVVALCRRGYEKQACKTCLEHVIEDTKSKCPRQKESFSWVTDEFDDVSCSLRYTNHSTLGKLELLPNTINPNPNSIDSKFNNMAMFSQEWIAMVNRTLEAASTAENSSVLKYYSATRTEFTQISDVYALMQCVPDLSPGNCKRCLRECVNDFQKQFWGRQGGGVSRPSCYFRWDLYPYYRAFDNVVRVPAPPPQASSTIIDYGRDEKSFQGSNIAIIVVPSVINLIIFVVLIFSWKRKQSHTIINDVFDSNNGQSMLRFDLRMIVTATNNFSLENKLGQGGFGSVYKGILPSGQEIAVKRLRKGSGQGGMEFKNEVLLLTRLQHRNLVKLLGFCNEKDEEILVYEFVPNSSLDHFIFDEEKRRVLTWDVRYTIIEGVARGLLYLHEDSQLRIIHRDLKASNILLDAEMNPKVADFGMARLFDMDETRGQTSRVVGTYGYMAPEYATYGQFSTKSDVYSFGVMLLEMISGKSNKKLEKEEEEEEEELPAFVWKRWIEGRFAEIIDPLAAPSNNISINEVMKLIHIGLLCVQEDISKRPSINSILFWLERHATITMPVPTPVAYLTRPSLSLGH

SEQ ID NO: 82568 - protein, 490 aa, Arabidopsis thaliana
  peptide (1)..(490): Ceres Seq. ID no. 12666318
MAMFSQEWIAMVNRTLEAASTAENSSVLKYYSATRTEFTQISDVYALMQCVPDLSPGNCKRCLRECVNDFQKQFWGRQGGGVSRPSCYFRWDLYPYYRAFDNVVRVPAPPPQASSTIIDYGRDEKSFQGSNIAIIVVPSVINLIIFVVLIFSWKRKQSHTIINDVFDSNNGQSMLRFDLRMIVTATNNFSLENKLGQGGFGSVYKGILPSGQEIAVKRLRKGSGQGGMEFKNEVLLLTRLQHRNLVKLLGFCNEKDEEILVYEFVPNSSLDHFIFDEEKRRVLTWDVRYTIIEGVARGLLYLHEDSQLRIIHRDLKASNILLDAEMNPKVADFGMARLFDMDETRGQTSRVVGTYGYMAPEYATYGQFSTKSDVYSFGVMLLEMISGKSNKKLEKEEEEEEEELPAFVWKRWIEGRFAEIIDPLAAPSNNISINEVMKLIHIGLLCVQEDISKRPSINSILFWLERHATITMPVPTPVAYLTRPSLSLGH

SEQ ID NO: 82569 - protein, 488 aa, Arabidopsis thaliana
  peptide (1)..(488): Ceres Seq. ID no. 12666319
MFSQEWIAMVNRTLEAASTAENSSVLKYYSATRTEFTQISDVYALMQCVPDLSPGNCKRCLRECVNDFQKQFWGRQGGGVSRPSCYFRWDLYPYYRAFDNVVRVPAPPPQASSTIIDYGRDEKSFQGSNIAIIVVPSVINLIIFVVLIFSWKRKQSHTIINDVFDSNNGQSMLRFDLRMIVTATNNFSLENKLGQGGFGSVYKGILPSGQEIAVKRLRKGSGQGGMEFKNEVLLLTRLQHRNLVKLLGFCNEKDEEILVYEFVPNSSLDHFIFDEEKRRVLTWDVRYTIIEGVARGLLYLHEDSQLRIIHRDLKASNILLDAEMNPKVADFGMARLFDMDETRGQTSRVVGTYGYMAPEYATYGQFSTKSDVYSFGVMLLEMISGKSNKKLEKEEEEEEEELPAFVWKRWIEGRFAEIIDPLAAPSNNISINEVMKLIHIGLLCVQEDISKRPSINSILFWLERHATITMPVPTPVAYLTRPSLSLGH

SEQ ID NO: 82570 - DNA, 1980 bp, Arabidopsis thaliana
  misc_feature (1)..(1980): Ceres Seq. ID no. 12666330
  misc_feature (1)..(1980): Ortholog of  Ceres SEQ ID NO 15180683 as cited in SEQ ID NO 0
atggggaaatactctgttttgatgatctttatcgcttcttctcttcttattgtccttcaaaacgtggaaatcgttaacgccgtcggatgtaccggaagcttcttcaacggtaatagcagctacgctcagaatcgccgcgatctcttctctactcttcctaataaagtcgtcaccaacggtggattctacaactcttcactcggcaaaagtcccaacatagttcatgctgttgctctctgcggaagaggatacgagcaacaagcttgtatcaggtgtgtcgacagtgcgatacagggtatactaacgacaacgagttgtctaaaccgcgtggattcattcacgtgggacaaagacgaggaagacaatgtttcttgtcttgtaagtacctcaaaccactcaacttttgggaacctcgagcttagaccttctgttagataccaaagtccgaatagtatcgagccatcgaaaaacatgactcttttcgaacaagaatggaatgcaatggctaatcggaccgtcgagtctgccacagaagctgaaacttcctcggtacttaagtactatagtgccgaaaaagccgagttcacagagtttccaaatgtttacatgctgatgcaatgcacacccgacataacttcccaagattgcaaaacatgtctgggagaatgcgtgacgcttttcaaagaacaggtttggggaagacaaggaggcgaggtttatcgtccgagctgttttttcaggtgggatctatatgctttccatggtgcttttgataatgtaacaagagttcctgcgcctcctcgacctcaagctcagggaaacgagagctctataacaaaaaagaaaggaagaagcattggatatggtggaattattgcaatagttgtggttcttactttcattaatattttggtgtttattggctatatcaaagtctatggacgtaggaaagaatcatacaacaaaatcaatgttggaagtgcagagtactctgattctgatggtcaattcatgttacggtttgatcttggtatggtcttagcggctaccgatgaattctcatcggaaaatacgcttggccaaggtggatttggtacggtctataaggggacattactaaacgggcaagaggtagcggtgaagaggttaacaaaaggttcaggacaaggagatatagagttcaagaatgaggtttcgctattgacaagactccagcataggaatctagttaagcttcttggattttgtaatgaaggagatgaacagattcttgtttacgagttcgttcccaattcaagtcttgatcactttatcttcgatgatgagaagcgttcacttcttacatgggagatgagatacagaattatagaaggcattgctcgaggtcttctttatcttcatgaagactcgcagctaaagattattcaccgagacttgaaggcaagcaacatacttttagacgcagagatgaaccctaaagttgcagatttcgggacagcgaggttgttcgactccgatgagactcgagctgaaacaaaaagaatagctggaacccgtggatatatggctcctgaatacttgaatcatggacaaatctcagctaaatctgacgtttatagcttcggtgttatgcttctagagatgattagtggtgaaagaaacaatagcttcgaaggagaaggacttgcagcttttgcatggaaaagatgggttgaaggaaagcctgagattataattgatccgttcttaatagagaaaccaagaaatgagatcataaagttgatccaaattggtttgttgtgtgttcaagagaatccaacaaagagaccaacaatgagctctgtaataatttggcttggtagtgagacaaatatcattcctttacctaaagctcctgctttcactggaagtcgatcccaatctgaaattggtgcaatgtcaatgagcgacgatgtcttcacggagttaagttgtcgttga

SEQ ID NO: 82571 - protein, 659 aa, Arabidopsis thaliana
  peptide (1)..(659): Ceres Seq. ID no. 12666331
MGKYSVLMIFIASSLLIVLQNVEIVNAVGCTGSFFNGNSSYAQNRRDLFSTLPNKVVTNGGFYNSSLGKSPNIVHAVALCGRGYEQQACIRCVDSAIQGILTTTSCLNRVDSFTWDKDEEDNVSCLVSTSNHSTFGNLELRPSVRYQSPNSIEPSKNMTLFEQEWNAMANRTVESATEAETSSVLKYYSAEKAEFTEFPNVYMLMQCTPDITSQDCKTCLGECVTLFKEQVWGRQGGEVYRPSCFFRWDLYAFHGAFDNVTRVPAPPRPQAQGNESSITKKKGRSIGYGGIIAIVVVLTFINILVFIGYIKVYGRRKESYNKINVGSAEYSDSDGQFMLRFDLGMVLAATDEFSSENTLGQGGFGTVYKGTLLNGQEVAVKRLTKGSGQGDIEFKNEVSLLTRLQHRNLVKLLGFCNEGDEQILVYEFVPNSSLDHFIFDDEKRSLLTWEMRYRIIEGIARGLLYLHEDSQLKIIHRDLKASNILLDAEMNPKVADFGTARLFDSDETRAETKRIAGTRGYMAPEYLNHGQISAKSDVYSFGVMLLEMISGERNNSFEGEGLAAFAWKRWVEGKPEIIIDPFLIEKPRNEIIKLIQIGLLCVQENPTKRPTMSSVIIWLGSETNIIPLPKAPAFTGSRSQSEIGAMSMSDDVFTELSCR

SEQ ID NO: 82572 - protein, 652 aa, Arabidopsis thaliana
  peptide (1)..(652): Ceres Seq. ID no. 12666332
MIFIASSLLIVLQNVEIVNAVGCTGSFFNGNSSYAQNRRDLFSTLPNKVVTNGGFYNSSLGKSPNIVHAVALCGRGYEQQACIRCVDSAIQGILTTTSCLNRVDSFTWDKDEEDNVSCLVSTSNHSTFGNLELRPSVRYQSPNSIEPSKNMTLFEQEWNAMANRTVESATEAETSSVLKYYSAEKAEFTEFPNVYMLMQCTPDITSQDCKTCLGECVTLFKEQVWGRQGGEVYRPSCFFRWDLYAFHGAFDNVTRVPAPPRPQAQGNESSITKKKGRSIGYGGIIAIVVVLTFINILVFIGYIKVYGRRKESYNKINVGSAEYSDSDGQFMLRFDLGMVLAATDEFSSENTLGQGGFGTVYKGTLLNGQEVAVKRLTKGSGQGDIEFKNEVSLLTRLQHRNLVKLLGFCNEGDEQILVYEFVPNSSLDHFIFDDEKRSLLTWEMRYRIIEGIARGLLYLHEDSQLKIIHRDLKASNILLDAEMNPKVADFGTARLFDSDETRAETKRIAGTRGYMAPEYLNHGQISAKSDVYSFGVMLLEMISGERNNSFEGEGLAAFAWKRWVEGKPEIIIDPFLIEKPRNEIIKLIQIGLLCVQENPTKRPTMSSVIIWLGSETNIIPLPKAPAFTGSRSQSEIGAMSMSDDVFTELSCR

SEQ ID NO: 82573 - protein, 502 aa, Arabidopsis thaliana
  peptide (1)..(502): Ceres Seq. ID no. 12666333
MTLFEQEWNAMANRTVESATEAETSSVLKYYSAEKAEFTEFPNVYMLMQCTPDITSQDCKTCLGECVTLFKEQVWGRQGGEVYRPSCFFRWDLYAFHGAFDNVTRVPAPPRPQAQGNESSITKKKGRSIGYGGIIAIVVVLTFINILVFIGYIKVYGRRKESYNKINVGSAEYSDSDGQFMLRFDLGMVLAATDEFSSENTLGQGGFGTVYKGTLLNGQEVAVKRLTKGSGQGDIEFKNEVSLLTRLQHRNLVKLLGFCNEGDEQILVYEFVPNSSLDHFIFDDEKRSLLTWEMRYRIIEGIARGLLYLHEDSQLKIIHRDLKASNILLDAEMNPKVADFGTARLFDSDETRAETKRIAGTRGYMAPEYLNHGQISAKSDVYSFGVMLLEMISGERNNSFEGEGLAAFAWKRWVEGKPEIIIDPFLIEKPRNEIIKLIQIGLLCVQENPTKRPTMSSVIIWLGSETNIIPLPKAPAFTGSRSQSEIGAMSMSDDVFTELSCR

SEQ ID NO: 82574 - DNA, 1044 bp, Arabidopsis thaliana
  misc_feature (1)..(1044): Ceres Seq. ID no. 12666356
  misc_feature (1)..(1044): Ortholog of  Ceres SEQ ID NO 13500385 as cited in SEQ ID NO 67583
atgggttgcttcagcagtaaggagctacaacaatcgaaaagaaccattcttgagaaacctttagttgacatcacaaagatttatatcctcggggaggaattgggtagaggtaatttcggtctaacccgaaagtgcgttgagaaatctacaggtaagacattcgcctgcaaaaccattctcaagacaaagctaaaggacgaagaatgtgaagaagacgtgaagagagagattcggattatgaagcaattgtctggagaaccaaacattgtcgagttcaagaatgcttacgaggacaaagattctgtacatattgttatggaatattgtggtggtggagagttatacgacaagatcctagctttgtacgatgttgggaagtcttactcggagaaagaagctgctggaatcattaggtcgattgtgaatgttgtgaagaattgccattacatgggtgtgatgcatcgtgatctaaagcctgagaatttcttgcttacgagtaacgatgacaatgctacggtcaaagttattgactttgggtgttctgtgttcattgaagaaggaaaagtataccaggatttagctgggagtgattactacattgctcctgaagtgttacagggaaattacggtaaagaagcggacatttggagtgcagggattatattatacatcctactctgtggcaaatctccctttgtgaaagaacctgagggacagatgttcaatgagattaagagtttggaaatcgactacagcgaggaaccatggcctcttagagattcaagggcaatacatcttgtcaagaggatgcttgatagaaaccccaaggaacgaatctctgctgcagaggttcttggtaagttcctttctttctcttttcaagattgttctagagccaacacaaatatatatatctggatccaaaagaagcttcaaggatccagaattgtgctcactatgtttgtggagggcttgtttcctcaaaagaaattccattgtttagactatgtgaatattgaaatcttgttcttgttttgtctgtaa

SEQ ID NO: 82575 - protein, 347 aa, Arabidopsis thaliana
  peptide (1)..(347): Ceres Seq. ID no. 12666357
MGCFSSKELQQSKRTILEKPLVDITKIYILGEELGRGNFGLTRKCVEKSTGKTFACKTILKTKLKDEECEEDVKREIRIMKQLSGEPNIVEFKNAYEDKDSVHIVMEYCGGGELYDKILALYDVGKSYSEKEAAGIIRSIVNVVKNCHYMGVMHRDLKPENFLLTSNDDNATVKVIDFGCSVFIEEGKVYQDLAGSDYYIAPEVLQGNYGKEADIWSAGIILYILLCGKSPFVKEPEGQMFNEIKSLEIDYSEEPWPLRDSRAIHLVKRMLDRNPKERISAAEVLGKFLSFSFQDCSRANTNIYIWIQKKLQGSRIVLTMFVEGLFPQKKFHCLDYVNIEILFLFCL

SEQ ID NO: 82576 - protein, 268 aa, Arabidopsis thaliana
  peptide (1)..(268): Ceres Seq. ID no. 12666358
MKQLSGEPNIVEFKNAYEDKDSVHIVMEYCGGGELYDKILALYDVGKSYSEKEAAGIIRSIVNVVKNCHYMGVMHRDLKPENFLLTSNDDNATVKVIDFGCSVFIEEGKVYQDLAGSDYYIAPEVLQGNYGKEADIWSAGIILYILLCGKSPFVKEPEGQMFNEIKSLEIDYSEEPWPLRDSRAIHLVKRMLDRNPKERISAAEVLGKFLSFSFQDCSRANTNIYIWIQKKLQGSRIVLTMFVEGLFPQKKFHCLDYVNIEILFLFCL

SEQ ID NO: 82577 - protein, 242 aa, Arabidopsis thaliana
  peptide (1)..(242): Ceres Seq. ID no. 12666359
MEYCGGGELYDKILALYDVGKSYSEKEAAGIIRSIVNVVKNCHYMGVMHRDLKPENFLLTSNDDNATVKVIDFGCSVFIEEGKVYQDLAGSDYYIAPEVLQGNYGKEADIWSAGIILYILLCGKSPFVKEPEGQMFNEIKSLEIDYSEEPWPLRDSRAIHLVKRMLDRNPKERISAAEVLGKFLSFSFQDCSRANTNIYIWIQKKLQGSRIVLTMFVEGLFPQKKFHCLDYVNIEILFLFCL

SEQ ID NO: 82578 - DNA, 1374 bp, Arabidopsis thaliana
  misc_feature (1)..(1374): Ceres Seq. ID no. 12666370
  misc_feature (1)..(1374): Ortholog of  Ceres SEQ ID NO 13597407 as cited in SEQ ID NO 64106
atggcagaagaaggtttattattaccagcttcttctacttcttcttcttcttcacttttgtctgaaatatcaaatgcatgcacgagaccttttgttcttgctttcattgtcggttcttgcggcgcctttgcctttggatgcatttattcactatttggatcgatattgacggtggggttaatccttggagcattaatctgtgggaagttaacagatttagttggtcgtgtcaaaactatatggatcacaaacatcctctttgtaatcggatggttcgctattgcatttgccaagggtgtttggctgcttgatctcggaaggttactacaagggatctcgatcggaattagcgtatatttgggaccagtttacatcaccgagatagcaccaagaaacttgcgaggagctgcttcttccttcgcgcagttattcgccggtgttggtatatcggtcttttatgcacttggaaccatcgttgcctggcgcaatttagccattttgggatgtataccttctctaatggttctgcctcttcttttcttcatccccgaatctcctagatggctagctaaagtaggaagagaaatggaagttgaagcagttttgttaagcctgcgaggagaaaaatctgatgtatcagatgaagcagcagagatattagaatatacagaacatgttaaacaacaacaagacatcgatgaccgcggtttcttcaagctatttcagcgaaaatatgcattctcacttactattggagttgttcttatagctttgcctcagcttggaggtcttaacggttattctttttacactgactccattttcatctctaccggtgtatcgagtgactttggattcatatctacatcagttgttcagatgtttggaggcattttaggtactgtgcttgttgatgtatctggaagacgtacactcctattggtttctcaagctggaatgttcttgggttgtcttaccacagccatttcattcttcttgaaggagaatcattgctgggaaacaggaactcctgtcttggctctctttagtgttatggtgtattttggatcatacggttctggtatgggatcaataccatggatcatagcatcagagatttatccagtagatgttaagggagcagcgggaacaatgtgtaacttggtcagctctataagcgcatggcttgttgcttattccttcagttacttgcttcaatggagctccacaggaacatttctgatgtttgccacagtggctggccttggatttgtgttcatagccaagcttgttccagagaccaaaggcaaatctctagaagagattcaatctcttttcactgattctcctcctcaagattctacaattttctaa

SEQ ID NO: 82579 - protein, 457 aa, Arabidopsis thaliana
  peptide (1)..(457): Ceres Seq. ID no. 12666371
MAEEGLLLPASSTSSSSSLLSEISNACTRPFVLAFIVGSCGAFAFGCIYSLFGSILTVGLILGALICGKLTDLVGRVKTIWITNILFVIGWFAIAFAKGVWLLDLGRLLQGISIGISVYLGPVYITEIAPRNLRGAASSFAQLFAGVGISVFYALGTIVAWRNLAILGCIPSLMVLPLLFFIPESPRWLAKVGREMEVEAVLLSLRGEKSDVSDEAAEILEYTEHVKQQQDIDDRGFFKLFQRKYAFSLTIGVVLIALPQLGGLNGYSFYTDSIFISTGVSSDFGFISTSVVQMFGGILGTVLVDVSGRRTLLLVSQAGMFLGCLTTAISFFLKENHCWETGTPVLALFSVMVYFGSYGSGMGSIPWIIASEIYPVDVKGAAGTMCNLVSSISAWLVAYSFSYLLQWSSTGTFLMFATVAGLGFVFIAKLVPETKGKSLEEIQSLFTDSPPQDSTIF

SEQ ID NO: 82580 - protein, 284 aa, Arabidopsis thaliana
  peptide (1)..(284): Ceres Seq. ID no. 12666372
MVLPLLFFIPESPRWLAKVGREMEVEAVLLSLRGEKSDVSDEAAEILEYTEHVKQQQDIDDRGFFKLFQRKYAFSLTIGVVLIALPQLGGLNGYSFYTDSIFISTGVSSDFGFISTSVVQMFGGILGTVLVDVSGRRTLLLVSQAGMFLGCLTTAISFFLKENHCWETGTPVLALFSVMVYFGSYGSGMGSIPWIIASEIYPVDVKGAAGTMCNLVSSISAWLVAYSFSYLLQWSSTGTFLMFATVAGLGFVFIAKLVPETKGKSLEEIQSLFTDSPPQDSTIF

SEQ ID NO: 82581 - protein, 262 aa, Arabidopsis thaliana
  peptide (1)..(262): Ceres Seq. ID no. 12666373
MEVEAVLLSLRGEKSDVSDEAAEILEYTEHVKQQQDIDDRGFFKLFQRKYAFSLTIGVVLIALPQLGGLNGYSFYTDSIFISTGVSSDFGFISTSVVQMFGGILGTVLVDVSGRRTLLLVSQAGMFLGCLTTAISFFLKENHCWETGTPVLALFSVMVYFGSYGSGMGSIPWIIASEIYPVDVKGAAGTMCNLVSSISAWLVAYSFSYLLQWSSTGTFLMFATVAGLGFVFIAKLVPETKGKSLEEIQSLFTDSPPQDSTIF

SEQ ID NO: 82582 - DNA, 2496 bp, Arabidopsis thaliana
  misc_feature (1)..(2496): Ceres Seq. ID no. 12666378
  misc_feature (1)..(2496): Ortholog of  Ceres SEQ ID NO 13593987 as cited in SEQ ID NO 54961
atggactcagagaaaatcctcaatccaagacttgtttcgattaatagcaccagccgcaaaggtatgtccgttgagttgccgcagaaaccgccgccaccgccgtcgttgttagaccggtttaaagctttgcttaatcagcgtgaagatgagttcggtggtggtgaagaggttttgcctccgagtatggatgagattgttcagctttatgaggttgttttgggtgagcttactttcaattctaagcctattatcactgatctcactattatcgctggtgaacaacgggaacatggtgaaggaatcgctaatgctatttgcactcgaatccttgagagattagtgtttggtttgtggtttagtgaaatggctgcttctgagttacctgtgggtgtatatatgcaggctcctgttgagcaaaagttgccatctctgtatcttttagacagcattgttaagaacattgggcgggattatggtcgctatttctcatcccgtctacccgaggtcttctgccttgcatataggcaagcacatccgagtttacatccgtcaatgcgtcacctgtttgggacttggtcgagtgtttttccaccacctgtactacgcaagattgatatgcaattgcaactttcatctgcagcaaaccaatcttccgtaggggcttctgagcctagtcaaccaacgagaggtatacatgttaatccaaaatatcttcgcaggctggagccctcagccgccgaaaataatttgagaggaattaattccagtgcaagagtttatggccaaaattcactcggtgggtataatgatttcgaagatcagttagagagcccatcttcactgtctagtacaccagatggttttaccaggaggtctaatgatggagctaatccttctaatcaagcttttaactatggaatgggtcgagctactagcagagatgatgaacatatggaatggcgaagaaaggaaaacttaggccaaggaaatgatcacgaaagacctagagcgttgatagatgcatatggagttgacaccagcaaacacgtaacgatcaataaaccaattcgcgatatgaatggcatgcacagtaagatggttacaccatggcagaacactgaggaagaagagtttgattgggaagatatgagccctaccctagatcgtagcagagctggtgaatttttgcgatcatctgtaccagcattaggaagtgtaagggcaagacccagagtaggaaacacaagtgattttcatttagattctgacattaagaatggtgtaagtcatcagctacgagaaaattggagtttgtcacaaaattatccacatacatccaaccgtgttgatacaagagcaggaaaagacttgaaagtattggcttcatctgtagggttagtttcatcaaacagtgaattcggggctcctccatttgatagcattcaagatgttaactcacgttttggccgggctcttcctgatgggacatggccccatttgagtgctagaggacccaactctctccctgtaccttctgctcatttgcatcatttggcaaatcccggtaatgcgatgtcaaatcgcttgcaaggtaagcctttatataggcccgaaaaccaggtctctcagagtcatcttaatgatatgactcaacagaatcagatgctagttaattatttgccatcctcatctgctatggctccaaggccaatgcaatcgttgttaacccacgtaagtcatgggtaccctccacatgggtcaaccattagaccatctttatcaatccaaggtggggaagccatgcatcctctttcttcaggagttttatctcagataggagcctctaatcaaccaccaggtggcgcattctctggtctgattggctctctcatggctcaaggtttgatctcattgaacaatcagcctgctggtcagggaccattggggttggagtttgatgcagacatgctcaagatacgtaatgagtctgcaatcagtgctttatatggggatctcccgaggcaatgcacaacctgtggtctacgcttcaagtgccaagaagagcacagtaagcacatggattggcatgtaaccaagaacaggatgtccaagaaccataagcagaacccttctcggaaatggtttgtaagtgctagcatgtggctcagtggtgcagaagcacttggagctgaagcagtaccagggttcttgcccacggagccaacaacagaaaagaaggatgacgaagatatggcagttcctgcagatgaagaccaaacttcatgtgcattatgtggtgagccatttgaagacttttatagtgatgaaaccgaggaatggatgtacaaaggtgcggtatacatgaatgctcctgaagaatcaacaacagatatggacaagtctcagttaggtcctatagtgcatgcaaagtgcaggccagagtccaatgggggtgatatggaagagggtagtcagaggaaaaagatgcggagttag

SEQ ID NO: 82583 - protein, 831 aa, Arabidopsis thaliana
  peptide (1)..(831): Ceres Seq. ID no. 12666379
MDSEKILNPRLVSINSTSRKGMSVELPQKPPPPPSLLDRFKALLNQREDEFGGGEEVLPPSMDEIVQLYEVVLGELTFNSKPIITDLTIIAGEQREHGEGIANAICTRILERLVFGLWFSEMAASELPVGVYMQAPVEQKLPSLYLLDSIVKNIGRDYGRYFSSRLPEVFCLAYRQAHPSLHPSMRHLFGTWSSVFPPPVLRKIDMQLQLSSAANQSSVGASEPSQPTRGIHVNPKYLRRLEPSAAENNLRGINSSARVYGQNSLGGYNDFEDQLESPSSLSSTPDGFTRRSNDGANPSNQAFNYGMGRATSRDDEHMEWRRKENLGQGNDHERPRALIDAYGVDTSKHVTINKPIRDMNGMHSKMVTPWQNTEEEEFDWEDMSPTLDRSRAGEFLRSSVPALGSVRARPRVGNTSDFHLDSDIKNGVSHQLRENWSLSQNYPHTSNRVDTRAGKDLKVLASSVGLVSSNSEFGAPPFDSIQDVNSRFGRALPDGTWPHLSARGPNSLPVPSAHLHHLANPGNAMSNRLQGKPLYRPENQVSQSHLNDMTQQNQMLVNYLPSSSAMAPRPMQSLLTHVSHGYPPHGSTIRPSLSIQGGEAMHPLSSGVLSQIGASNQPPGGAFSGLIGSLMAQGLISLNNQPAGQGPLGLEFDADMLKIRNESAISALYGDLPRQCTTCGLRFKCQEEHSKHMDWHVTKNRMSKNHKQNPSRKWFVSASMWLSGAEALGAEAVPGFLPTEPTTEKKDDEDMAVPADEDQTSCALCGEPFEDFYSDETEEWMYKGAVYMNAPEESTTDMDKSQLGPIVHAKCRPESNGGDMEEGSQRKKMRS

SEQ ID NO: 82584 - protein, 810 aa, Arabidopsis thaliana
  peptide (1)..(810): Ceres Seq. ID no. 12666380
MSVELPQKPPPPPSLLDRFKALLNQREDEFGGGEEVLPPSMDEIVQLYEVVLGELTFNSKPIITDLTIIAGEQREHGEGIANAICTRILERLVFGLWFSEMAASELPVGVYMQAPVEQKLPSLYLLDSIVKNIGRDYGRYFSSRLPEVFCLAYRQAHPSLHPSMRHLFGTWSSVFPPPVLRKIDMQLQLSSAANQSSVGASEPSQPTRGIHVNPKYLRRLEPSAAENNLRGINSSARVYGQNSLGGYNDFEDQLESPSSLSSTPDGFTRRSNDGANPSNQAFNYGMGRATSRDDEHMEWRRKENLGQGNDHERPRALIDAYGVDTSKHVTINKPIRDMNGMHSKMVTPWQNTEEEEFDWEDMSPTLDRSRAGEFLRSSVPALGSVRARPRVGNTSDFHLDSDIKNGVSHQLRENWSLSQNYPHTSNRVDTRAGKDLKVLASSVGLVSSNSEFGAPPFDSIQDVNSRFGRALPDGTWPHLSARGPNSLPVPSAHLHHLANPGNAMSNRLQGKPLYRPENQVSQSHLNDMTQQNQMLVNYLPSSSAMAPRPMQSLLTHVSHGYPPHGSTIRPSLSIQGGEAMHPLSSGVLSQIGASNQPPGGAFSGLIGSLMAQGLISLNNQPAGQGPLGLEFDADMLKIRNESAISALYGDLPRQCTTCGLRFKCQEEHSKHMDWHVTKNRMSKNHKQNPSRKWFVSASMWLSGAEALGAEAVPGFLPTEPTTEKKDDEDMAVPADEDQTSCALCGEPFEDFYSDETEEWMYKGAVYMNAPEESTTDMDKSQLGPIVHAKCRPESNGGDMEEGSQRKKMRS

SEQ ID NO: 82585 - protein, 770 aa, Arabidopsis thaliana
  peptide (1)..(770): Ceres Seq. ID no. 12666381
MDEIVQLYEVVLGELTFNSKPIITDLTIIAGEQREHGEGIANAICTRILERLVFGLWFSEMAASELPVGVYMQAPVEQKLPSLYLLDSIVKNIGRDYGRYFSSRLPEVFCLAYRQAHPSLHPSMRHLFGTWSSVFPPPVLRKIDMQLQLSSAANQSSVGASEPSQPTRGIHVNPKYLRRLEPSAAENNLRGINSSARVYGQNSLGGYNDFEDQLESPSSLSSTPDGFTRRSNDGANPSNQAFNYGMGRATSRDDEHMEWRRKENLGQGNDHERPRALIDAYGVDTSKHVTINKPIRDMNGMHSKMVTPWQNTEEEEFDWEDMSPTLDRSRAGEFLRSSVPALGSVRARPRVGNTSDFHLDSDIKNGVSHQLRENWSLSQNYPHTSNRVDTRAGKDLKVLASSVGLVSSNSEFGAPPFDSIQDVNSRFGRALPDGTWPHLSARGPNSLPVPSAHLHHLANPGNAMSNRLQGKPLYRPENQVSQSHLNDMTQQNQMLVNYLPSSSAMAPRPMQSLLTHVSHGYPPHGSTIRPSLSIQGGEAMHPLSSGVLSQIGASNQPPGGAFSGLIGSLMAQGLISLNNQPAGQGPLGLEFDADMLKIRNESAISALYGDLPRQCTTCGLRFKCQEEHSKHMDWHVTKNRMSKNHKQNPSRKWFVSASMWLSGAEALGAEAVPGFLPTEPTTEKKDDEDMAVPADEDQTSCALCGEPFEDFYSDETEEWMYKGAVYMNAPEESTTDMDKSQLGPIVHAKCRPESNGGDMEEGSQRKKMRS

SEQ ID NO: 82586 - DNA, 1175 bp, Arabidopsis thaliana
  misc_feature (1)..(1175): Ceres Seq. ID no. 12666405
  misc_feature (1)..(1175): Ortholog of  Ceres SEQ ID NO 13595569 as cited in SEQ ID NO 56778
acgtctctctctttctctctactctctgtttcctcataattcaatcactatatttttttaaaaacatttgacttcatcgatcggttaacaattaatcaaaaagatgggacgatcaccatgttgtgagaagaagaatggtctcaagaaaggaccatggactcctgaggaggatcaaaagctcattgattatatcaatatacatggttatggaaattggagaactcttcccaagaatgctgggttacaaagatgtggtaagagttgtcgtctccggtggaccaactatctccgaccagatattaagcgtggaagattctcttttgaagaagaagaaaccattattcaacttcacagcatcatgggaaacaagtggtctgcgattgcggctcgtttgcctggaagaacagacaacgagatcaaaaactattggaacactcacatcagaaaaagacttctaaagatgggaatcgacccggttacacacactccacgtcttgatcttctcgatatctcctccattctcagctcatctatctacaactcttcgcatcatcatcatcatcatcatcaacaacatatgaacatgtcgaggctcatgatgagtgatggtaatcatcaaccattggttaaccccgagatactcaaactcgcaacctctctcttttcaaaccaaaaccaccccaacaacacacacgagaacaacacggttaaccaaaccgaagtaaaccaataccaaaccggttacaacatgcctggtaatgaagaattacaatcttggttccctatcatggatcaattcacgaatttccaagacctcatgccaatgaagacgacggtccaaaattcattgtcatacgatgatgattgttcgaagtccaattttgtattagaaccttattactccgactttgcttcagtcttgaccacaccttcttcaagcccgactccgttaaactcaagttcctcaacttacatcaatagtagcacttgcagcaccgaggatgaaaaagagagttattacagtgataatatcactaattattcgtttgatgttaatggttttctccaattccaataaacaaaacgccattggaatagagttatgtaaacatgcaatcattgtatttgttatatagattttgttacatatccaaaatccaaaatactatagtttt

SEQ ID NO: 82587 - protein, 324 aa, Arabidopsis thaliana
  peptide (1)..(324): Ceres Seq. ID no. 12666406
MGRSPCCEKKNGLKKGPWTPEEDQKLIDYINIHGYGNWRTLPKNAGLQRCGKSCRLRWTNYLRPDIKRGRFSFEEEETIIQLHSIMGNKWSAIAARLPGRTDNEIKNYWNTHIRKRLLKMGIDPVTHTPRLDLLDISSILSSSIYNSSHHHHHHHQQHMNMSRLMMSDGNHQPLVNPEILKLATSLFSNQNHPNNTHENNTVNQTEVNQYQTGYNMPGNEELQSWFPIMDQFTNFQDLMPMKTTVQNSLSYDDDCSKSNFVLEPYYSDFASVLTTPSSSPTPLNSSSSTYINSSTCSTEDEKESYYSDNITNYSFDVNGFLQFQ

SEQ ID NO: 82588 - protein, 239 aa, Arabidopsis thaliana
  peptide (1)..(239): Ceres Seq. ID no. 12666407
MGNKWSAIAARLPGRTDNEIKNYWNTHIRKRLLKMGIDPVTHTPRLDLLDISSILSSSIYNSSHHHHHHHQQHMNMSRLMMSDGNHQPLVNPEILKLATSLFSNQNHPNNTHENNTVNQTEVNQYQTGYNMPGNEELQSWFPIMDQFTNFQDLMPMKTTVQNSLSYDDDCSKSNFVLEPYYSDFASVLTTPSSSPTPLNSSSSTYINSSTCSTEDEKESYYSDNITNYSFDVNGFLQFQ

SEQ ID NO: 82589 - protein, 205 aa, Arabidopsis thaliana
  peptide (1)..(205): Ceres Seq. ID no. 12666408
MGIDPVTHTPRLDLLDISSILSSSIYNSSHHHHHHHQQHMNMSRLMMSDGNHQPLVNPEILKLATSLFSNQNHPNNTHENNTVNQTEVNQYQTGYNMPGNEELQSWFPIMDQFTNFQDLMPMKTTVQNSLSYDDDCSKSNFVLEPYYSDFASVLTTPSSSPTPLNSSSSTYINSSTCSTEDEKESYYSDNITNYSFDVNGFLQFQ

SEQ ID NO: 82590 - DNA, 891 bp, Arabidopsis thaliana
  misc_feature (1)..(891): Ceres Seq. ID no. 12666412
  misc_feature (1)..(891): Ortholog of  Ceres SEQ ID NO 15172274 as cited in SEQ ID NO 59703
atgacggaagagtttgagatcgcaggaatctccaccggagcttggtggagctcgccaacaaacaccgccgcagtattctctggctactcgctgccatgttccactgagattagccctgatgtcacaaatttcggatggcaaaacttcgataacaagattaacgatcataatgatggttgtatgaacatgcataatagtttcttcgaaggactattaatcgatcctaacgatcaattactaccggatccatggtccaaaagtacaattcctaacgctaaatctgagctccttgaaaacttcccattcttagataacatgttcttggtcgattcagaagctgaatctttgttggatcatgaaatcagaaaccataagtcgtctaaggagcaaattacacaagactacaagaatcttacttcaaaggcacaattagaagagaacagcgatgagtattcaccgcgattactaaaaagaccgagactcgagacactatctccattgccaagcttcaaagttcgtaaagaaaaactcggagatagaatcactgcgcttcagcaactggtttctccatttggcaagacagatacagcttctgttctcaacgaagctgtagagtacataaagtttcttcaagaacaagtcactgtattgagtaatccagaacagaacaccataggatctgttcaacaacagcagtgttcaaacaagaaatctatcaatactcaaggagaagtagaagaagacgaatgtagtccaagaagatatgtagatctttcgagccgtggactatgtctaatgccgatctcagcttcatatcccgtggctgcagctgcggcttcggctgcagagatgaacgtacatctggtttctggcatcttccattctttgtaa

SEQ ID NO: 82591 - protein, 296 aa, Arabidopsis thaliana
  peptide (1)..(296): Ceres Seq. ID no. 12666413
MTEEFEIAGISTGAWWSSPTNTAAVFSGYSLPCSTEISPDVTNFGWQNFDNKINDHNDGCMNMHNSFFEGLLIDPNDQLLPDPWSKSTIPNAKSELLENFPFLDNMFLVDSEAESLLDHEIRNHKSSKEQITQDYKNLTSKAQLEENSDEYSPRLLKRPRLETLSPLPSFKVRKEKLGDRITALQQLVSPFGKTDTASVLNEAVEYIKFLQEQVTVLSNPEQNTIGSVQQQQCSNKKSINTQGEVEEDECSPRRYVDLSSRGLCLMPISASYPVAAAAASAAEMNVHLVSGIFHSL

SEQ ID NO: 82592 - protein, 236 aa, Arabidopsis thaliana
  peptide (1)..(236): Ceres Seq. ID no. 12666414
MNMHNSFFEGLLIDPNDQLLPDPWSKSTIPNAKSELLENFPFLDNMFLVDSEAESLLDHEIRNHKSSKEQITQDYKNLTSKAQLEENSDEYSPRLLKRPRLETLSPLPSFKVRKEKLGDRITALQQLVSPFGKTDTASVLNEAVEYIKFLQEQVTVLSNPEQNTIGSVQQQQCSNKKSINTQGEVEEDECSPRRYVDLSSRGLCLMPISASYPVAAAAASAAEMNVHLVSGIFHSL

SEQ ID NO: 82593 - protein, 234 aa, Arabidopsis thaliana
  peptide (1)..(234): Ceres Seq. ID no. 12666415
MHNSFFEGLLIDPNDQLLPDPWSKSTIPNAKSELLENFPFLDNMFLVDSEAESLLDHEIRNHKSSKEQITQDYKNLTSKAQLEENSDEYSPRLLKRPRLETLSPLPSFKVRKEKLGDRITALQQLVSPFGKTDTASVLNEAVEYIKFLQEQVTVLSNPEQNTIGSVQQQQCSNKKSINTQGEVEEDECSPRRYVDLSSRGLCLMPISASYPVAAAAASAAEMNVHLVSGIFHSL

SEQ ID NO: 82594 - DNA, 2865 bp, Arabidopsis thaliana
  misc_feature (1)..(2865): Ceres Seq. ID no. 12666435
  misc_feature (1)..(2865): Ortholog of  Ceres SEQ ID NO 14303113 as cited in SEQ ID NO 53536
atgggttttgtaggttttgttaccagaacctctgcaggtgtttctccttctatcttacttcccagatcaactcagtctcctcagattattgctaagagctcatcagtatcagtacagccagtgtctgaggatgctaaggaggattatcagtccaaagatgttagtggagattcaatacggcggcgttttcttgaattctttgcttctcgtggtcataaggtgcttccaagttcgtctcttgtaccagaagatcctaccgtcttgctaacaattgcaggaatgcttcagtttaagcctattttccttggaaaggtacctagagaggttccttgtgcaaccactgcgcaaaggtgtatacgtacgaatgatttggagaatgttgggaaaacggctaggcaccatactttctttgagatgcttgggaactttagctttggtgattacttcaagaaagaagcgataaaatgggcatgggagctttcaactattgagtttgggctaccagctaatagagtttgggttagtatatatgaagacgatgatgaagcttttgaaatctggaagaatgaagttggtgtttctgttgagcggataaagagaatgggtgaagctgacaacttttggactagtggaccaactggtccttgtggtccatgctctgagttgtactatgacttctatcctgagagaggttatgatgaagatgttgatcttggggatgataccagatttattgagttctataatttggttttcatgcagtataacaagacggaagatggattgcttgagcccttgaaacagaagaatatagatactggtcttggtttggaacgtatagctcaaatccttcagaaggttccaaacaactacgagacagatttgatatatccaatcattgcaaagatctcagagttggcgaatatctcatatgactctgcaaatgacaaggcaaagacaagtttaaaagtgattgcagatcacatgcgggcagttgtctatctcatatcagatggtgtttctccttcaaatattggcagaggttatgtggttaggaggctaataagaagagcagttcggaaggggaagtctctcggaataaatggggatatgaatggtaatctaaagggagcgtttttgccagcggttgctgaaaaggtgatagagttgagcacttatattgattcagatgtaaaactaaaggcctcacgcatcattgaggagattaggcaagaagaacttcactttaagaaaactctggaaagaggagaaaagttacttgaccaaaagcttaacgatgcattgtcaattgctgataaaactaaggatacgccttatctggatggaaaagatgcgtttcttctttatgacacatttggctttcctgtggagataactgcagaagttgctgaagaacgtggagtcagtatagatatgaatggttttgaagtggaaatggagaatcaaagacgtcaatctcaagctgctcacaatgttgtaaaactgacagttgaagacgatgctgacatgacgaaaaatattgcagacactgagttccttggatatgacagtctctctgctcgtgctgttgtgaaaagtcttttggtgaatgggaagcctgtgataagggtttctgaaggcagtgaagtagaggttctgctggacagaactccgttctatgctgaatcaggaggtcaaattgcagatcatggttttctttatgttagcagtgatgggaaccaagagaaagctgttgttgaggtaagtgatgtgcagaagtctcttaaaatttttgttcacaagggcactgtaaaaagtggagctctagaagttggcaaggaggtggaagcagcagtagatgcagacttgaggcaacgagcgaaggttcaccataccgccactcatttgctccaatcggcacttaaaaaagtagtaggacaagaaacatcacaggctggttcattagtagcttttgaccgcctcagattcgatttcaattttaatcggtccctgcatgataatgagcttgaggaaatcgaatgcctgatcaataggtggattggggatgctacacgtcttgaaacaaaagtccttcctcttgctgatgcaaaacgtgctggagccatcgcaatgtttggggaaaaatatgatgaaaacgaggttcgtgtagtagaagttcctggtgtctccatggaactttgtggtggcactcatgttggcaatactgcagaaatacgagccttcaagattatctcagaacagggcattgcatctggaatccggcgtatagaagcggttgcaggtgaagcattcattgaatacataaactcacgggattctcaaatgacacgtctatgctcgactctcaaggtgaaagcagaggatgttacaaacagagtggagaatcttctagaggaactacgtgctgctagaaaagaagcctccgacttgcgttcaaaagcagctgtctataaagcatctgtcatatcgaacaaagcatttactgtaggaacttcacagactataagagtgctcgttgagtcgatggatgacaccgatgctgactcattaaagagtgcagctgagcatttgataagcacattggaagatccagtcgctgtggtactaggatcatctccagaaaaagacaaggttagtttagttgctgcatttagtcctggagtagtctccctaggtgttcaagcagggaaattcattggccccatagctaagctgtgtggcggaggaggtggtggaaagcccaattttgctcaggcaggcggcagaaagcctgaaaatctcccaagtgccttagagaaagctcgggaagatctcgtggcaactctatccgaaaagctagggtga

SEQ ID NO: 82595 - protein, 954 aa, Arabidopsis thaliana
  peptide (1)..(954): Ceres Seq. ID no. 12666436
MGFVGFVTRTSAGVSPSILLPRSTQSPQIIAKSSSVSVQPVSEDAKEDYQSKDVSGDSIRRRFLEFFASRGHKVLPSSSLVPEDPTVLLTIAGMLQFKPIFLGKVPREVPCATTAQRCIRTNDLENVGKTARHHTFFEMLGNFSFGDYFKKEAIKWAWELSTIEFGLPANRVWVSIYEDDDEAFEIWKNEVGVSVERIKRMGEADNFWTSGPTGPCGPCSELYYDFYPERGYDEDVDLGDDTRFIEFYNLVFMQYNKTEDGLLEPLKQKNIDTGLGLERIAQILQKVPNNYETDLIYPIIAKISELANISYDSANDKAKTSLKVIADHMRAVVYLISDGVSPSNIGRGYVVRRLIRRAVRKGKSLGINGDMNGNLKGAFLPAVAEKVIELSTYIDSDVKLKASRIIEEIRQEELHFKKTLERGEKLLDQKLNDALSIADKTKDTPYLDGKDAFLLYDTFGFPVEITAEVAEERGVSIDMNGFEVEMENQRRQSQAAHNVVKLTVEDDADMTKNIADTEFLGYDSLSARAVVKSLLVNGKPVIRVSEGSEVEVLLDRTPFYAESGGQIADHGFLYVSSDGNQEKAVVEVSDVQKSLKIFVHKGTVKSGALEVGKEVEAAVDADLRQRAKVHHTATHLLQSALKKVVGQETSQAGSLVAFDRLRFDFNFNRSLHDNELEEIECLINRWIGDATRLETKVLPLADAKRAGAIAMFGEKYDENEVRVVEVPGVSMELCGGTHVGNTAEIRAFKIISEQGIASGIRRIEAVAGEAFIEYINSRDSQMTRLCSTLKVKAEDVTNRVENLLEELRAARKEASDLRSKAAVYKASVISNKAFTVGTSQTIRVLVESMDDTDADSLKSAAEHLISTLEDPVAVVLGSSPEKDKVSLVAAFSPGVVSLGVQAGKFIGPIAKLCGGGGGGKPNFAQAGGRKPENLPSALEKAREDLVATLSEKLG

SEQ ID NO: 82596 - protein, 861 aa, Arabidopsis thaliana
  peptide (1)..(861): Ceres Seq. ID no. 12666437
MLQFKPIFLGKVPREVPCATTAQRCIRTNDLENVGKTARHHTFFEMLGNFSFGDYFKKEAIKWAWELSTIEFGLPANRVWVSIYEDDDEAFEIWKNEVGVSVERIKRMGEADNFWTSGPTGPCGPCSELYYDFYPERGYDEDVDLGDDTRFIEFYNLVFMQYNKTEDGLLEPLKQKNIDTGLGLERIAQILQKVPNNYETDLIYPIIAKISELANISYDSANDKAKTSLKVIADHMRAVVYLISDGVSPSNIGRGYVVRRLIRRAVRKGKSLGINGDMNGNLKGAFLPAVAEKVIELSTYIDSDVKLKASRIIEEIRQEELHFKKTLERGEKLLDQKLNDALSIADKTKDTPYLDGKDAFLLYDTFGFPVEITAEVAEERGVSIDMNGFEVEMENQRRQSQAAHNVVKLTVEDDADMTKNIADTEFLGYDSLSARAVVKSLLVNGKPVIRVSEGSEVEVLLDRTPFYAESGGQIADHGFLYVSSDGNQEKAVVEVSDVQKSLKIFVHKGTVKSGALEVGKEVEAAVDADLRQRAKVHHTATHLLQSALKKVVGQETSQAGSLVAFDRLRFDFNFNRSLHDNELEEIECLINRWIGDATRLETKVLPLADAKRAGAIAMFGEKYDENEVRVVEVPGVSMELCGGTHVGNTAEIRAFKIISEQGIASGIRRIEAVAGEAFIEYINSRDSQMTRLCSTLKVKAEDVTNRVENLLEELRAARKEASDLRSKAAVYKASVISNKAFTVGTSQTIRVLVESMDDTDADSLKSAAEHLISTLEDPVAVVLGSSPEKDKVSLVAAFSPGVVSLGVQAGKFIGPIAKLCGGGGGGKPNFAQAGGRKPENLPSALEKAREDLVATLSEKLG

SEQ ID NO: 82597 - protein, 816 aa, Arabidopsis thaliana
  peptide (1)..(816): Ceres Seq. ID no. 12666438
MLGNFSFGDYFKKEAIKWAWELSTIEFGLPANRVWVSIYEDDDEAFEIWKNEVGVSVERIKRMGEADNFWTSGPTGPCGPCSELYYDFYPERGYDEDVDLGDDTRFIEFYNLVFMQYNKTEDGLLEPLKQKNIDTGLGLERIAQILQKVPNNYETDLIYPIIAKISELANISYDSANDKAKTSLKVIADHMRAVVYLISDGVSPSNIGRGYVVRRLIRRAVRKGKSLGINGDMNGNLKGAFLPAVAEKVIELSTYIDSDVKLKASRIIEEIRQEELHFKKTLERGEKLLDQKLNDALSIADKTKDTPYLDGKDAFLLYDTFGFPVEITAEVAEERGVSIDMNGFEVEMENQRRQSQAAHNVVKLTVEDDADMTKNIADTEFLGYDSLSARAVVKSLLVNGKPVIRVSEGSEVEVLLDRTPFYAESGGQIADHGFLYVSSDGNQEKAVVEVSDVQKSLKIFVHKGTVKSGALEVGKEVEAAVDADLRQRAKVHHTATHLLQSALKKVVGQETSQAGSLVAFDRLRFDFNFNRSLHDNELEEIECLINRWIGDATRLETKVLPLADAKRAGAIAMFGEKYDENEVRVVEVPGVSMELCGGTHVGNTAEIRAFKIISEQGIASGIRRIEAVAGEAFIEYINSRDSQMTRLCSTLKVKAEDVTNRVENLLEELRAARKEASDLRSKAAVYKASVISNKAFTVGTSQTIRVLVESMDDTDADSLKSAAEHLISTLEDPVAVVLGSSPEKDKVSLVAAFSPGVVSLGVQAGKFIGPIAKLCGGGGGGKPNFAQAGGRKPENLPSALEKAREDLVATLSEKLG

SEQ ID NO: 82598 - DNA, 1014 bp, Arabidopsis thaliana
  misc_feature (1)..(1014): Ceres Seq. ID no. 12666439
  misc_feature (1)..(1014): Ortholog of  Ceres SEQ ID NO 14314092 as cited in SEQ ID NO 62788
  misc_feature (1)..(1014): Ortholog of  Ceres SEQ ID NO 13655302 as cited in SEQ ID NO 63307
  misc_feature (1)..(1014): Ortholog of  Ceres SEQ ID NO 13597380 as cited in SEQ ID NO 64054
  misc_feature (1)..(1014): Ortholog of  Ceres SEQ ID NO 12625474 as cited in SEQ ID NO 64169
  misc_feature (1)..(1014): Ortholog of  Ceres SEQ ID NO 13597502 as cited in SEQ ID NO 64681
atggtggtgatgaaggcacagccactggttccagcaattttcatatttggtgattcggtggttgatgtgggaaacaacaatgatatctacacaatcgtcaaagctaatttccctccttatggaagagatttcacaacccatacacccaccggacgcttctgcaatggaaagttagctactgacttcaccgctgagaatcttgggttcaaatcatacccacaagcttatctaagcaaaaaggcaaaaggcaagaaccttttgattggagctaatttcgcctctgcagcctctggttattacgatggcacagccaagctctacagtgcaatatcgttgccgcaacagctagaacattacaaagactacattagtcgaatccaagaaatcgcaacctcaaacaacaattcaaacgccagtgccataatctccaatggcatctatatcgtcagcgcagggagcagcgacttcatacaaaactactatatcaaccctctcctctacagagaccaatcacctgatgagttctctgatctccttatcctctcctactccagttttattcagaatttatattcgttaggagcaagaaggatcggagtgactacacttccgcccctcggttgtttaccggcggccataactgtagtgggtccacatgagggtggatgctcggagaagcttaacaacgacgcaatctccttcaacaacaaactcaatacgacgtcacaggatctcaagagaaacctcattggactcaatttagtcgtctttgatatctatcagcctctctatgatcttgccaccaggccatcagaatttggatttgcagaggcaagaagagcttgttgtggaacagggttactagagacatcaatactgtgcaacccaaaatcagtaggaacatgtaacaatgcaactgagtatgtcttttgggacggatttcatccaacggaagctgctaacaagattctcgctgacaatctcttggtctctggcatctctctcatctcctga

SEQ ID NO: 82599 - protein, 337 aa, Arabidopsis thaliana
  peptide (1)..(337): Ceres Seq. ID no. 12666440
MVVMKAQPLVPAIFIFGDSVVDVGNNNDIYTIVKANFPPYGRDFTTHTPTGRFCNGKLATDFTAENLGFKSYPQAYLSKKAKGKNLLIGANFASAASGYYDGTAKLYSAISLPQQLEHYKDYISRIQEIATSNNNSNASAIISNGIYIVSAGSSDFIQNYYINPLLYRDQSPDEFSDLLILSYSSFIQNLYSLGARRIGVTTLPPLGCLPAAITVVGPHEGGCSEKLNNDAISFNNKLNTTSQDLKRNLIGLNLVVFDIYQPLYDLATRPSEFGFAEARRACCGTGLLETSILCNPKSVGTCNNATEYVFWDGFHPTEAANKILADNLLVSGISLIS

SEQ ID NO: 82600 - protein, 334 aa, Arabidopsis thaliana
  peptide (1)..(334): Ceres Seq. ID no. 12666441
MKAQPLVPAIFIFGDSVVDVGNNNDIYTIVKANFPPYGRDFTTHTPTGRFCNGKLATDFTAENLGFKSYPQAYLSKKAKGKNLLIGANFASAASGYYDGTAKLYSAISLPQQLEHYKDYISRIQEIATSNNNSNASAIISNGIYIVSAGSSDFIQNYYINPLLYRDQSPDEFSDLLILSYSSFIQNLYSLGARRIGVTTLPPLGCLPAAITVVGPHEGGCSEKLNNDAISFNNKLNTTSQDLKRNLIGLNLVVFDIYQPLYDLATRPSEFGFAEARRACCGTGLLETSILCNPKSVGTCNNATEYVFWDGFHPTEAANKILADNLLVSGISLIS

SEQ ID NO: 82601 - DNA, 1518 bp, Arabidopsis thaliana
  misc_feature (1)..(1518): Ceres Seq. ID no. 12666468
  misc_feature (1)..(1518): Ortholog of  Ceres SEQ ID NO 13663419 as cited in SEQ ID NO 66561
atggaggccaaaacattttttctcttcatgcttttcatcttttctcagtcttggctctcaacttctaaaaggatcctaaacaatccctctgttttctcatcgtctttgaatttttcgagtggtaatgcagagagacttataaaatcattcaatctaatgcctaagtatgacgttaatgtcatcccaaaaggaagccttgatgctccaagactcattgagagacaaattgattttctggcgacagccggttccaaaaacgcttccgttggtccttctgttcaagagtttggccactacgctggttattacagccttcctcattcaaaatcagccaagatgttctatttcttttttgaatcacggaacaaaacaaccgatccggttgtgatctggttaaccggtggaccgggctgcagtagtagtgtggctatgttttatgaaaacggtccgttcaagatctcaaaggatttgtctctctattggaacgattttggctgggacaaggtatccaatataatctacgtggatcagccagtcgggactggtttcagttacacatctgacgaaagcgatatccggaatgacgaggatggtgtcagtaatgacctttatgatttcttacaggctttctttaaagagcatccaaaattcgtaaagaatgatttctttattaccggtgaatcttacgctggtcactacattccggctttggcttcacgtgttcatagtggcaacaaaaagaaagaagggattccaatcaaccttaagggttttgcgattggtaacggtttaaccaacccggagatccaatatggtgcgtatggggattatgcactgcaaatgaagttgatttcagagtctgaccacgagagcctcaagcaagattacgttgagtgtcaaaatataaccaaaaaatgcagtcttggtggtggtttagtttgtgattctgctgttgaagtttgcaccagtatcttcaacaagatagtggcaaaaaaaagtggcctaaattattatgacattaggaagaaatgtgtggggagcttgtgttatgacttttcgaggatggaaatattcttgaacaaagaaaatgtacggaaagccttaggagttggagatatcaagtttgtgtcttgtagtagtacagtttatgatgcaatgatagaggactggatgcagaatcttgaggtcaagatcccgtctcttgtcaatgatggaatcaatcttctagtttatgctggagaatatgatctcatttgcaattggcttggaaactcgaggtgggtagaccaaatgaattggtcaggccaaaagggttttggatcagcaaaaaacgtatcattcttagtagatggtaaagaagccggtttactgaaaaatcacggtcctctcacttttcttaaggtttataacgctggacacatggttccgatggatcaaccaaaggcttctttgcaaatgcttcagaattggatgcaaggaaagcttaggactactcctgtactaggatttagtcaatga

SEQ ID NO: 82602 - protein, 505 aa, Arabidopsis thaliana
  peptide (1)..(505): Ceres Seq. ID no. 12666469
MEAKTFFLFMLFIFSQSWLSTSKRILNNPSVFSSSLNFSSGNAERLIKSFNLMPKYDVNVIPKGSLDAPRLIERQIDFLATAGSKNASVGPSVQEFGHYAGYYSLPHSKSAKMFYFFFESRNKTTDPVVIWLTGGPGCSSSVAMFYENGPFKISKDLSLYWNDFGWDKVSNIIYVDQPVGTGFSYTSDESDIRNDEDGVSNDLYDFLQAFFKEHPKFVKNDFFITGESYAGHYIPALASRVHSGNKKKEGIPINLKGFAIGNGLTNPEIQYGAYGDYALQMKLISESDHESLKQDYVECQNITKKCSLGGGLVCDSAVEVCTSIFNKIVAKKSGLNYYDIRKKCVGSLCYDFSRMEIFLNKENVRKALGVGDIKFVSCSSTVYDAMIEDWMQNLEVKIPSLVNDGINLLVYAGEYDLICNWLGNSRWVDQMNWSGQKGFGSAKNVSFLVDGKEAGLLKNHGPLTFLKVYNAGHMVPMDQPKASLQMLQNWMQGKLRTTPVLGFSQ

SEQ ID NO: 82603 - protein, 496 aa, Arabidopsis thaliana
  peptide (1)..(496): Ceres Seq. ID no. 12666470
MLFIFSQSWLSTSKRILNNPSVFSSSLNFSSGNAERLIKSFNLMPKYDVNVIPKGSLDAPRLIERQIDFLATAGSKNASVGPSVQEFGHYAGYYSLPHSKSAKMFYFFFESRNKTTDPVVIWLTGGPGCSSSVAMFYENGPFKISKDLSLYWNDFGWDKVSNIIYVDQPVGTGFSYTSDESDIRNDEDGVSNDLYDFLQAFFKEHPKFVKNDFFITGESYAGHYIPALASRVHSGNKKKEGIPINLKGFAIGNGLTNPEIQYGAYGDYALQMKLISESDHESLKQDYVECQNITKKCSLGGGLVCDSAVEVCTSIFNKIVAKKSGLNYYDIRKKCVGSLCYDFSRMEIFLNKENVRKALGVGDIKFVSCSSTVYDAMIEDWMQNLEVKIPSLVNDGINLLVYAGEYDLICNWLGNSRWVDQMNWSGQKGFGSAKNVSFLVDGKEAGLLKNHGPLTFLKVYNAGHMVPMDQPKASLQMLQNWMQGKLRTTPVLGFSQ

SEQ ID NO: 82604 - protein, 453 aa, Arabidopsis thaliana
  peptide (1)..(453): Ceres Seq. ID no. 12666471
MPKYDVNVIPKGSLDAPRLIERQIDFLATAGSKNASVGPSVQEFGHYAGYYSLPHSKSAKMFYFFFESRNKTTDPVVIWLTGGPGCSSSVAMFYENGPFKISKDLSLYWNDFGWDKVSNIIYVDQPVGTGFSYTSDESDIRNDEDGVSNDLYDFLQAFFKEHPKFVKNDFFITGESYAGHYIPALASRVHSGNKKKEGIPINLKGFAIGNGLTNPEIQYGAYGDYALQMKLISESDHESLKQDYVECQNITKKCSLGGGLVCDSAVEVCTSIFNKIVAKKSGLNYYDIRKKCVGSLCYDFSRMEIFLNKENVRKALGVGDIKFVSCSSTVYDAMIEDWMQNLEVKIPSLVNDGINLLVYAGEYDLICNWLGNSRWVDQMNWSGQKGFGSAKNVSFLVDGKEAGLLKNHGPLTFLKVYNAGHMVPMDQPKASLQMLQNWMQGKLRTTPVLGFSQ

SEQ ID NO: 82605 - DNA, 834 bp, Arabidopsis thaliana
  misc_feature (1)..(834): Ceres Seq. ID no. 12666488
  misc_feature (1)..(834): Ortholog of  Ceres SEQ ID NO 15225507 as cited in SEQ ID NO 55551
  misc_feature (1)..(834): Ortholog of  Ceres SEQ ID NO 15225677 as cited in SEQ ID NO 0
atggctaaagactttgcctccaagagacacaatagtttccactggacaagaaaagtcggatcagacgaaaacgacgacgtttcttctcataaacctcttcctcatcacaacaacactaaaccttcttcttcttcatcttcatcttcctctaatgtaatcactcacaaaaaaaagcttcaatctttcgccgtttctcgtctccggtcagttatcgctactctaagcagagcacgacccggtaaccaaaactccgggctcgggtcacgggtcgtgggtacacttttcgggtctcgtcgtggtcacgtgcatttctctatccagaaagatcctaattctccaccggcgtttttaatcgaactcgctactccgattagtgggttagtcaaagaaatggcttcaggactcgttagaatcgctttggagtgtgataaggggaaagaggaagaagaaggagaagaaaaaaacggaactttacgtcacggcggaggagacaagacgaagacgacgacgacggcggcggtttcacggcggttggtggaggagccgatgtggagaacttattgtaacgggaaaaagtgtggatttgctacgaggagagagtgtggtgagaaggagaaaaaggttttgaaagctcttgagatggtttcaatgggcgccggagtcttaccagagacggaggagataggcggtggtggcggcggcggaggagatataatgtatatgagggcgaaattcgagagaattgttgggtcgcgtgattcagaagccttctacatgatgaatcctgatagtaatggagctcctgagcttagtatctatctactcagaatctga

SEQ ID NO: 82606 - protein, 277 aa, Arabidopsis thaliana
  peptide (1)..(277): Ceres Seq. ID no. 12666489
MAKDFASKRHNSFHWTRKVGSDENDDVSSHKPLPHHNNTKPSSSSSSSSSNVITHKKKLQSFAVSRLRSVIATLSRARPGNQNSGLGSRVVGTLFGSRRGHVHFSIQKDPNSPPAFLIELATPISGLVKEMASGLVRIALECDKGKEEEEGEEKNGTLRHGGGDKTKTTTTAAVSRRLVEEPMWRTYCNGKKCGFATRRECGEKEKKVLKALEMVSMGAGVLPETEEIGGGGGGGGDIMYMRAKFERIVGSRDSEAFYMMNPDSNGAPELSIYLLRI

SEQ ID NO: 82607 - protein, 147 aa, Arabidopsis thaliana
  peptide (1)..(147): Ceres Seq. ID no. 12666490
MASGLVRIALECDKGKEEEEGEEKNGTLRHGGGDKTKTTTTAAVSRRLVEEPMWRTYCNGKKCGFATRRECGEKEKKVLKALEMVSMGAGVLPETEEIGGGGGGGGDIMYMRAKFERIVGSRDSEAFYMMNPDSNGAPELSIYLLRI

SEQ ID NO: 82608 - DNA, 2092 bp, Arabidopsis thaliana
  misc_feature (1)..(2092): Ceres Seq. ID no. 12666501
  misc_feature (1)..(2092): Ortholog of  Ceres SEQ ID NO 15169603 as cited in SEQ ID NO 65772
  misc_feature (1)..(2092): Ortholog of  Ceres SEQ ID NO 14308003 as cited in SEQ ID NO 65919
  misc_feature (1)..(2092): Ortholog of  Ceres SEQ ID NO 14303087 as cited in SEQ ID NO 66569
tttttgtctgctcaccaaatcaaaccaatttctcctgatagccaaagtttttgtccccaacaagaaactcatgcaacattcttcacccactagctaactaacgacttccattcttattaatctctctcaattcttcatttctgagattcatcgctctctcttctctttgtcacaatgaatttcaattcttcttacaatctcactttcaatgacgttttcttctcttcttcttcctccagtgaccctctggtttcacggaggctgtttctcttgagagatgttcagattcttgagctccttattgcaattttcgtctttgtcgcaatacatgccttgcgtcagaagaaataccaaggtcttcccgtgtggccgtttcttgggatgcttccttctctagcttttggcctcagaggaaacatatacgagtggctatccgatgttctatgtctccagaacggaactttccaattcagaggtccctggtttagcagcctcaacagcactatcacttgtgacccaagaaacgttgagcatctccttaagaaccggttttctgtcttccctaaaggttcttactttcgagacaatctccgagacctcctaggagatggaatattcaacgcggatgatgaaacttggcagaggcagaggaaaacagcgagcattgagtttcattcagccaaattcagacaattaaccactcaatctttgtttgagctcgtgcacaagaggctcttacctgttcttgagacatcggttaagagctcatctcctatcgatctacaagacgtcttgttgaggctaacgtttgataacgtatgtatgattgcttttggagtcgatccaggatgtctcggtccagatcaaccagtgattccttttgcgaaagcctttgaggatgcgactgaagctgcggttgtgagattcgtcatgcctacttgcgtgtggaagttcatgaggtatcttgatataggaacagagaagaagcttaaggaatcaataaagggtgtggatgatttcgctgatgaagttatcaggacgaggaagaaagaactgtctcttgagggcgaaactacaaaaagatcggatctcttaactgtgtttatgggtctgagagatgagaagggagagagtttttcagacaagtttcttcgtgatatctgtgtgaacttcatacttgctgggagagatacttcttctgtggctttgagctggtttttctggttgctagagaagaacccagaggtcgaagagaagatcatggtggagatgtgtaagattctgaggcagagagatgaccatggaaatgcagagaagagtgattatgaacctgtgtttggaccagaagagatcaagaagatggattatctacaagctgctttgtctgaagctcttagattgtatccttcagttcccgtggatcacaaagaggttcaagaagacgacgtatttcctgatggaactatgttgaagaagggagacaaagttatatacgcgatttacgcaatgggtcgtatggaagctatttggggaaaagactgtcttgagtttaggccagagaggtggctaagagacggacggttcatgagtgagtcggcctacaaattcacagcctttaacggtggtccacgcctttgtcttggcaaagattttgcctattatcagatgaaatctacggcggccgcaatagtttatcggtacaaggtgaaggtggtgaatggtcacaaggtggagccgaagttggcactcacaatgtacatgaaacatggtttgatggtgaacttgatcaataggagtgtctccgagatagatcaatactatgccaagtcttttgatgagggttatattaattagtgtttttaatgttttgaagatttgttaattgattaagttaatggtctaagaagattgtgtgcttacttttagttgatttgaatttttaaagtatgttttttgtgtccactttgttattagatgatgtgtacagtctatgggttatgtgtacgtggaaatgtggaggaagttgaatgggttatatatacttatattgataataaattaattacttggaattttaattttagtttctatc

SEQ ID NO: 82609 - protein, 559 aa, Arabidopsis thaliana
  peptide (1)..(559): Ceres Seq. ID no. 12666502
MNFNSSYNLTFNDVFFSSSSSSDPLVSRRLFLLRDVQILELLIAIFVFVAIHALRQKKYQGLPVWPFLGMLPSLAFGLRGNIYEWLSDVLCLQNGTFQFRGPWFSSLNSTITCDPRNVEHLLKNRFSVFPKGSYFRDNLRDLLGDGIFNADDETWQRQRKTASIEFHSAKFRQLTTQSLFELVHKRLLPVLETSVKSSSPIDLQDVLLRLTFDNVCMIAFGVDPGCLGPDQPVIPFAKAFEDATEAAVVRFVMPTCVWKFMRYLDIGTEKKLKESIKGVDDFADEVIRTRKKELSLEGETTKRSDLLTVFMGLRDEKGESFSDKFLRDICVNFILAGRDTSSVALSWFFWLLEKNPEVEEKIMVEMCKILRQRDDHGNAEKSDYEPVFGPEEIKKMDYLQAALSEALRLYPSVPVDHKEVQEDDVFPDGTMLKKGDKVIYAIYAMGRMEAIWGKDCLEFRPERWLRDGRFMSESAYKFTAFNGGPRLCLGKDFAYYQMKSTAAAIVYRYKVKVVNGHKVEPKLALTMYMKHGLMVNLINRSVSEIDQYYAKSFDEGYIN

SEQ ID NO: 82610 - protein, 490 aa, Arabidopsis thaliana
  peptide (1)..(490): Ceres Seq. ID no. 12666503
MLPSLAFGLRGNIYEWLSDVLCLQNGTFQFRGPWFSSLNSTITCDPRNVEHLLKNRFSVFPKGSYFRDNLRDLLGDGIFNADDETWQRQRKTASIEFHSAKFRQLTTQSLFELVHKRLLPVLETSVKSSSPIDLQDVLLRLTFDNVCMIAFGVDPGCLGPDQPVIPFAKAFEDATEAAVVRFVMPTCVWKFMRYLDIGTEKKLKESIKGVDDFADEVIRTRKKELSLEGETTKRSDLLTVFMGLRDEKGESFSDKFLRDICVNFILAGRDTSSVALSWFFWLLEKNPEVEEKIMVEMCKILRQRDDHGNAEKSDYEPVFGPEEIKKMDYLQAALSEALRLYPSVPVDHKEVQEDDVFPDGTMLKKGDKVIYAIYAMGRMEAIWGKDCLEFRPERWLRDGRFMSESAYKFTAFNGGPRLCLGKDFAYYQMKSTAAAIVYRYKVKVVNGHKVEPKLALTMYMKHGLMVNLINRSVSEIDQYYAKSFDEGYIN

SEQ ID NO: 82611 - protein, 343 aa, Arabidopsis thaliana
  peptide (1)..(343): Ceres Seq. ID no. 12666504
MIAFGVDPGCLGPDQPVIPFAKAFEDATEAAVVRFVMPTCVWKFMRYLDIGTEKKLKESIKGVDDFADEVIRTRKKELSLEGETTKRSDLLTVFMGLRDEKGESFSDKFLRDICVNFILAGRDTSSVALSWFFWLLEKNPEVEEKIMVEMCKILRQRDDHGNAEKSDYEPVFGPEEIKKMDYLQAALSEALRLYPSVPVDHKEVQEDDVFPDGTMLKKGDKVIYAIYAMGRMEAIWGKDCLEFRPERWLRDGRFMSESAYKFTAFNGGPRLCLGKDFAYYQMKSTAAAIVYRYKVKVVNGHKVEPKLALTMYMKHGLMVNLINRSVSEIDQYYAKSFDEGYIN

SEQ ID NO: 82612 - DNA, 1692 bp, Arabidopsis thaliana
  misc_feature (1)..(1692): Ceres Seq. ID no. 12666541
  misc_feature (1)..(1692): Ortholog of  Ceres SEQ ID NO 13659971 as cited in SEQ ID NO 67565
  misc_feature (1)..(1692): Ortholog of  Ceres SEQ ID NO 13500385 as cited in SEQ ID NO 67583
acgaaaccctcaaagaaataaaaaaaagctctcaagaatggcgaacaaaccaagaaccagatgggttcttccttacaagaccaaaaacgttgaagacaattactttcttggtcaagtccttggacaaggccaattcggaaccactttcctctgtacccataaacagacaggtcaaaagcttgcctgcaaatccatacccaaaaggaagctcctttgtcaagaagattacgacgacgttctgagagagatccagataatgcatcacttgtctgaataccccaacgttgtccgtatagagagtgcgtacgaggacaccaaaaacgtgcatcttgtgatggagctttgtgaaggaggtgagttgtttgatagaattgtgaagagaggtcattacagtgaaagagaagctgctaagcttatcaagaccattgttggggttgttgaggcgtgtcactctcttggtgttgttcatagagatcttaagcctgagaatttcttgttttcttcttctgatgaagatgcttctcttaaatctactgactttggcctctctgttttctgcacaccaggagaagcattttcggaactcgttggtagtgcttactatgtggcacctgaggttttacataagcattatggtcctgaatgtgacgtatggagtgctggagttatcctctacattctcttatgtggttttcctcctttttgggctgagagtgaaataggcatcttcaggaagattttacagggaaagttggagtttgagatcaatccttggcctagcatttcagagagtgccaaagatcttataaagaaaatgcttgaaagcaatcctaaaaagaggctaactgctcatcaagtgttgtgtcatccgtggattgtggatgataaggttgctccagataaacctttggactgcgcggtagtgtcccgcctgaagaagttctctgcaatgaacaaacttaagaagatggctttacgagttattgcagagagactatctgaggaagaaatcggtggtctcaaagaactgttcaaaatgatagacacagataaaagtgggactatcacgtttgaagagttaaaagatagtatgagacgtgttgggtcagagcttatggaatcagagatccaagaactcttgcgtgcggctgatgttgatgagagtggaacaattgactatggagagttcttagctgcaacaatccacttgaacaagctggagagagaggagaatctagtagctgcattctctttctttgataaggatgcaagtggttacatcactatcgaagagcttcaacaggcatggaaggagtttggtataaacgattctaatcttgatgaaatgatcaaagacattgatcaagataatgatggacaaatagactatggagaatttgtggcaatgatgaggaaaggaaatggcactggaggagggattggtcggagaactatgaggaactctctcaactttggaactactcttcctgatgagtctatgaatgtctgaagtactcatttttagtgaaaataatttagcgactttatggagcaaaacatgtcatatgatacaacttgctgtttctgcttactctaattctgcttttaacaactcttagtaattgaaattgtaagctctcaacaatttgtagaattttcccatggattttaccatatctcagagctttagag

SEQ ID NO: 82613 - protein, 502 aa, Arabidopsis thaliana
  peptide (1)..(502): Ceres Seq. ID no. 12666542
RNPQRNKKKLSRMANKPRTRWVLPYKTKNVEDNYFLGQVLGQGQFGTTFLCTHKQTGQKLACKSIPKRKLLCQEDYDDVLREIQIMHHLSEYPNVVRIESAYEDTKNVHLVMELCEGGELFDRIVKRGHYSEREAAKLIKTIVGVVEACHSLGVVHRDLKPENFLFSSSDEDASLKSTDFGLSVFCTPGEAFSELVGSAYYVAPEVLHKHYGPECDVWSAGVILYILLCGFPPFWAESEIGIFRKILQGKLEFEINPWPSISESAKDLIKKMLESNPKKRLTAHQVLCHPWIVDDKVAPDKPLDCAVVSRLKKFSAMNKLKKMALRVIAERLSEEEIGGLKELFKMIDTDKSGTITFEELKDSMRRVGSELMESEIQELLRAADVDESGTIDYGEFLAATIHLNKLEREENLVAAFSFFDKDASGYITIEELQQAWKEFGINDSNLDEMIKDIDQDNDGQIDYGEFVAMMRKGNGTGGGIGRRTMRNSLNFGTTLPDESMNV

SEQ ID NO: 82614 - protein, 490 aa, Arabidopsis thaliana
  peptide (1)..(490): Ceres Seq. ID no. 12666543
MANKPRTRWVLPYKTKNVEDNYFLGQVLGQGQFGTTFLCTHKQTGQKLACKSIPKRKLLCQEDYDDVLREIQIMHHLSEYPNVVRIESAYEDTKNVHLVMELCEGGELFDRIVKRGHYSEREAAKLIKTIVGVVEACHSLGVVHRDLKPENFLFSSSDEDASLKSTDFGLSVFCTPGEAFSELVGSAYYVAPEVLHKHYGPECDVWSAGVILYILLCGFPPFWAESEIGIFRKILQGKLEFEINPWPSISESAKDLIKKMLESNPKKRLTAHQVLCHPWIVDDKVAPDKPLDCAVVSRLKKFSAMNKLKKMALRVIAERLSEEEIGGLKELFKMIDTDKSGTITFEELKDSMRRVGSELMESEIQELLRAADVDESGTIDYGEFLAATIHLNKLEREENLVAAFSFFDKDASGYITIEELQQAWKEFGINDSNLDEMIKDIDQDNDGQIDYGEFVAMMRKGNGTGGGIGRRTMRNSLNFGTTLPDESMNV

SEQ ID NO: 82615 - protein, 417 aa, Arabidopsis thaliana
  peptide (1)..(417): Ceres Seq. ID no. 12666544
MHHLSEYPNVVRIESAYEDTKNVHLVMELCEGGELFDRIVKRGHYSEREAAKLIKTIVGVVEACHSLGVVHRDLKPENFLFSSSDEDASLKSTDFGLSVFCTPGEAFSELVGSAYYVAPEVLHKHYGPECDVWSAGVILYILLCGFPPFWAESEIGIFRKILQGKLEFEINPWPSISESAKDLIKKMLESNPKKRLTAHQVLCHPWIVDDKVAPDKPLDCAVVSRLKKFSAMNKLKKMALRVIAERLSEEEIGGLKELFKMIDTDKSGTITFEELKDSMRRVGSELMESEIQELLRAADVDESGTIDYGEFLAATIHLNKLEREENLVAAFSFFDKDASGYITIEELQQAWKEFGINDSNLDEMIKDIDQDNDGQIDYGEFVAMMRKGNGTGGGIGRRTMRNSLNFGTTLPDESMNV

SEQ ID NO: 82616 - DNA, 1014 bp, Arabidopsis thaliana
  misc_feature (1)..(1014): Ceres Seq. ID no. 12666549
  misc_feature (1)..(1014): Ortholog of  Ceres SEQ ID NO 13638441 as cited in SEQ ID NO 58066
atgaatttaggacaggaaattagtgtcggatcgtcttggagcaaggatgatgatattgctttcgagaaagcccttgcaatttataacgataaaacagagattcgttggaaaaaaattgctacagttgttccgggaaaaactttagaacaagttatagagcattacaacattttagctcgtgatgttatgttgattgaatctggatgtgtacgtcttccagattatgatgattttttagaagaaccaaatcacaatgcttttggtaaagaaagaagcatattggaaggtggcaacgatcgcaaatatgagtctaaacacaaaggtaaatcaaaactaaagcaaaaacgacgaaggggtgttccttggaagccttttgaacacagacaatttctgcatggtttgaaaaaatatgggaaaggtgattggcgtagtatttctcgtcactgtgtagtgacaagaacatcaactcaggttgcaagtcatgctcaaaaatactttgcacatatcaactcagaggataaaaagagaaagaggccaagcattcatgacatcactattgcggaaaacaaaagtatctcaacaaaacaaagaccaatcacatggcaaaaaataaacaacaatggtgctactgcttccaacactcaagccaatcaaaccactttgcaaccatcacttgacattcctatatatggtacacacaacaacatatggaatgcacaagccactcaagtcatttcacagccatcacaaaaccatcctacatatgatgcacccatcatatggaacacacaagtcgcttcgcaaccatcggccaatattcctatgtatggaacgtccaccataagtcaaccaatggttggaccaatgctctcaccttttggaacaaacttgaaccacttggctccatctcatatgacttctggagttcaacatgattcagtaccttactactcaggtcctagtgcaccgatcaacatggattcaataccatacaacattgacttatataactag

SEQ ID NO: 82617 - protein, 337 aa, Arabidopsis thaliana
  peptide (1)..(337): Ceres Seq. ID no. 12666550
MNLGQEISVGSSWSKDDDIAFEKALAIYNDKTEIRWKKIATVVPGKTLEQVIEHYNILARDVMLIESGCVRLPDYDDFLEEPNHNAFGKERSILEGGNDRKYESKHKGKSKLKQKRRRGVPWKPFEHRQFLHGLKKYGKGDWRSISRHCVVTRTSTQVASHAQKYFAHINSEDKKRKRPSIHDITIAENKSISTKQRPITWQKINNNGATASNTQANQTTLQPSLDIPIYGTHNNIWNAQATQVISQPSQNHPTYDAPIIWNTQVASQPSANIPMYGTSTISQPMVGPMLSPFGTNLNHLAPSHMTSGVQHDSVPYYSGPSAPINMDSIPYNIDLYN

SEQ ID NO: 82618 - protein, 275 aa, Arabidopsis thaliana
  peptide (1)..(275): Ceres Seq. ID no. 12666551
MLIESGCVRLPDYDDFLEEPNHNAFGKERSILEGGNDRKYESKHKGKSKLKQKRRRGVPWKPFEHRQFLHGLKKYGKGDWRSISRHCVVTRTSTQVASHAQKYFAHINSEDKKRKRPSIHDITIAENKSISTKQRPITWQKINNNGATASNTQANQTTLQPSLDIPIYGTHNNIWNAQATQVISQPSQNHPTYDAPIIWNTQVASQPSANIPMYGTSTISQPMVGPMLSPFGTNLNHLAPSHMTSGVQHDSVPYYSGPSAPINMDSIPYNIDLYN

SEQ ID NO: 82619 - DNA, 645 bp, Arabidopsis thaliana
  misc_feature (1)..(645): Ceres Seq. ID no. 12666587
  misc_feature (1)..(645): Ortholog of  Ceres SEQ ID NO 14301396 as cited in SEQ ID NO 51789
  misc_feature (1)..(645): Ortholog of  Ceres SEQ ID NO 12610031 as cited in SEQ ID NO 55811
  misc_feature (1)..(645): Ortholog of  Ceres SEQ ID NO 12610896 as cited in SEQ ID NO 55861
  misc_feature (1)..(645): Ortholog of  Ceres SEQ ID NO 12619664 as cited in SEQ ID NO 66048
  misc_feature (1)..(645): Ortholog of  Ceres SEQ ID NO 12635952 as cited in SEQ ID NO 0
atggttgtgaaactatatggacaggtaacagcagcttgtccacaaagagtcttgctttgttttctcgagaaaggaattgaatttgagattattcatatcgatcttgatacatttgagcaaaaaaaaccagaacatcttcttcgtcagccatttggtcaagttccagccatagaagatggagatttcaagctttttgaatcacgagccatcgcgagatactacgctaccaagttcgcggaccaaggcacgaaccttttgggcaagtctctagagcaccgagccatcgtggaccagtgggctgacgtggagacctattacttcaacgttctggcccaacccctcgtgattaacctaatcatcaagcctaggttaggcgagaaatgtgacgtcgttttggtcgaggatctcaaagtgaagctaggagtggtcttggacatatacaataaccggctttcttcgaaccggtttttggctggtgaagaattcactatggctgatttgacgcacatgccggcgatggggtacttgatgagtataaccgatataaaccagatggttaaggctcggggtagttttaaccggtggtgggaagagatttcggatagaccgtcttggaagaagcttatggtgctggctggtcactga

SEQ ID NO: 82620 - protein, 214 aa, Arabidopsis thaliana
  peptide (1)..(214): Ceres Seq. ID no. 12666588
MVVKLYGQVTAACPQRVLLCFLEKGIEFEIIHIDLDTFEQKKPEHLLRQPFGQVPAIEDGDFKLFESRAIARYYATKFADQGTNLLGKSLEHRAIVDQWADVETYYFNVLAQPLVINLIIKPRLGEKCDVVLVEDLKVKLGVVLDIYNNRLSSNRFLAGEEFTMADLTHMPAMGYLMSITDINQMVKARGSFNRWWEEISDRPSWKKLMVLAGH

SEQ ID NO: 82621 - DNA, 3355 bp, Arabidopsis thaliana
  misc_feature (1)..(3355): Ceres Seq. ID no. 12666615
  misc_feature (1)..(3355): Ortholog of  Ceres SEQ ID NO 14303524 as cited in SEQ ID NO 59500
  misc_feature (1)..(3355): Ortholog of  Ceres SEQ ID NO 14313220 as cited in SEQ ID NO 66007
  misc_feature (1)..(3355): Ortholog of  Ceres SEQ ID NO 13658778 as cited in SEQ ID NO 66511
accgttttgttctctcaagatcgctgctaatctccggccgtccctatggaagctagcgccggtcttgtcgccggttctcataaccgtaatgaactagtcgtcattcacaaccatgaagagccaaagcctctgaagaatctagatggacaattctgtgagatatgtggagatcagattggtttaacagtagaaggagacctcttcgtagcttgcaatgagtgtggttttccggcgtgtagaccttgctatgagtacgagagaagagaaggaacacaaaactgtcctcagtgtaagactcgttacaagcgtctcagaggaagcccaagagtggagggagatgaagacgaagaagatattgatgatattgagtatgaatttaatatcgaacatgaacaagataagcataagcattctgctgaggctatgctttatgggaaaatgagctatggaagaggtcctgaggatgatgagaatgggagattcccacctgttatagctggtggtcatagtggagaatttccagttggaggaggttatggtaatggagaacatgggcttcataagcgtgtgcacccatatccatcatctgaagctgggagtgagggaggatggcgggaaagaatggatgactggaagctccagcatggaaatcttgggccagaaccagatgatgatcctgagatgggactgatcgacgaggcacggcagccactctcgcggaaagttcccattgcctcaagcaagatcaatccatatcggatggtcatcgtcgctaggcttgtgattctagcagtttttctgcggtataggctcttgaatccagtgcatgatgctctgggattatggctgacctctgtgatctgtgaaatctggttcgctgtctcttggattcttgatcagttccccaagtggttccctattgaacgtgagacctatctagatcggctttccctcaggtacgagagagaaggtgaaccaaatatgcttgcccctgtagatgtctttgtcagtacggtggacccattgaaggagcctcccctcgtcacatccaacactgtgctgtcaatcttggccatggactacccagttgagaaaatctcctgctatgtctctgacgacggtgcttcaatgcttacattcgaatctctctcggaaactgctgagtttgcaagaaaatgggttcccttctgtaagaaattctccatagagccacgggcaccggagatgtacttcacgttgaaagttgattatctccaggacaaagtccacccaacatttgttaaggaacgtcgagccatgaagagagaatatgaggagttcaaggtcaggatcaacgctcaagtggcgaaggcctcaaaggttcctctagaaggttggatcatgcaagatggaacaccgtggccagggaacaacaccaaggaccaccccggtatgatccaagtcttcctcggccacagcggaggatttgatgtcgaagggcatgagcttcctcggcttgtgtacgtgtcccgtgagaagcgtcctggttttcaacaccacaagaaagctggcgccatgaatgccctggttcgagtggcaggcgtactcacaaatgctcctttcatgctgaacttggactgtgatcactatgtaaacaacagcaaggccgtgagggaagcaatgtgttttttgatggatcctcagattggaaagaaggtctgctatgttcagttccctcaaaggtttgatggcattgacacaaacgatcgttacgccaacagaaacacagtcttctttgatatcaatatgaaaggtctagatggaatccaaggtccagtttacgttggtactggttgtgttttcaaacgacaagctctgtatggttatgaaccaccaaagggtcctaaacgtccaaagatgataagctgtggttgttgtccttgctttgggcgccggagaaagaataagaaattttccaagaatgacatgaatggtgacgtagcagcccttggaggagcagaaggtgataaggagcatttgatgtctgaaatgaactttgagaaaacatttgggcaatcatccatctttgtaacctcaactttgatggaagaaggtggtgttcctccgtcatcaagtcctgcagtgctccttaaagaggcaatccatgtcataagctgcggttatgaagacaagactgagtggggaactgagctgggttggatctatggctctatcacagaggatattttgacgggattcaagatgcattgccgtggatggaggtctatttactgcatgcctaagaggcctgcattcaaaggttcagctcctattaatctatcagacaggttaaaccaggttttgcgttgggcacttggatcggttgagatatttttcagccggcacagtcctctctggtatggctacaaaggaggcaaactcaagtggcttgagcgttttgcttatgccaacacaacaatctaccccttcacatctataccacttcttgcctactgtatccttccagccatctgtctccttactgacaaattcatcatgccaccgataagcacatttgctagtctcttcttcatctcactgtttatgtcgatcattgtaacgggaatcttggaattgagatggagcggagttagcattgaggaatggtggagaaacgagcaattctgggtcattggaggaatctcagctcatctctttgcggttgtccaaggtctcctcaaaatcttagcaggcattgacacaaacttcaccgtcacatcaaaggcaacagatgatgatgactttggagaactttacgcattcaaatggacaacactgctgatccctccaacaactgtcttaatcataaacattgttggcgttgttgcaggcatctcagatgccattaacaatggatatcagtcttggggacctctatttggtaaactcttcttctccttttgggtcattgttcatctctacccattcctcaaaggtctgatgggtagacagaacagaacaccaaccattgtggtgatttggtcagtgttattggcatctatcttctctttgctttgggtaagaattgatccttttgtgctcaagaccaaaggacctgacacttccaagtgtggcatcaactgctgaagcaaaatctttttcgtcttctgaaactttttctgtactttgtcgagagtgttttcacttctctctttggattgcataattggattttgtttattgtatattagccagtaaaacagatggatctgggtttattgtgagcgagtaatgcattgtaagaaaatttgaacaaaactactttttagttacacagtaaaagattcacagatacttccctcaagagacatgtagt

SEQ ID NO: 82622 - protein, 1026 aa, Arabidopsis thaliana
  peptide (1)..(1026): Ceres Seq. ID no. 12666616
MEASAGLVAGSHNRNELVVIHNHEEPKPLKNLDGQFCEICGDQIGLTVEGDLFVACNECGFPACRPCYEYERREGTQNCPQCKTRYKRLRGSPRVEGDEDEEDIDDIEYEFNIEHEQDKHKHSAEAMLYGKMSYGRGPEDDENGRFPPVIAGGHSGEFPVGGGYGNGEHGLHKRVHPYPSSEAGSEGGWRERMDDWKLQHGNLGPEPDDDPEMGLIDEARQPLSRKVPIASSKINPYRMVIVARLVILAVFLRYRLLNPVHDALGLWLTSVICEIWFAVSWILDQFPKWFPIERETYLDRLSLRYEREGEPNMLAPVDVFVSTVDPLKEPPLVTSNTVLSILAMDYPVEKISCYVSDDGASMLTFESLSETAEFARKWVPFCKKFSIEPRAPEMYFTLKVDYLQDKVHPTFVKERRAMKREYEEFKVRINAQVAKASKVPLEGWIMQDGTPWPGNNTKDHPGMIQVFLGHSGGFDVEGHELPRLVYVSREKRPGFQHHKKAGAMNALVRVAGVLTNAPFMLNLDCDHYVNNSKAVREAMCFLMDPQIGKKVCYVQFPQRFDGIDTNDRYANRNTVFFDINMKGLDGIQGPVYVGTGCVFKRQALYGYEPPKGPKRPKMISCGCCPCFGRRRKNKKFSKNDMNGDVAALGGAEGDKEHLMSEMNFEKTFGQSSIFVTSTLMEEGGVPPSSSPAVLLKEAIHVISCGYEDKTEWGTELGWIYGSITEDILTGFKMHCRGWRSIYCMPKRPAFKGSAPINLSDRLNQVLRWALGSVEIFFSRHSPLWYGYKGGKLKWLERFAYANTTIYPFTSIPLLAYCILPAICLLTDKFIMPPISTFASLFFISLFMSIIVTGILELRWSGVSIEEWWRNEQFWVIGGISAHLFAVVQGLLKILAGIDTNFTVTSKATDDDDFGELYAFKWTTLLIPPTTVLIINIVGVVAGISDAINNGYQSWGPLFGKLFFSFWVIVHLYPFLKGLMGRQNRTPTIVVIWSVLLASIFSLLWVRIDPFVLKTKGPDTSKCGINC

SEQ ID NO: 82623 - protein, 900 aa, Arabidopsis thaliana
  peptide (1)..(900): Ceres Seq. ID no. 12666617
MLYGKMSYGRGPEDDENGRFPPVIAGGHSGEFPVGGGYGNGEHGLHKRVHPYPSSEAGSEGGWRERMDDWKLQHGNLGPEPDDDPEMGLIDEARQPLSRKVPIASSKINPYRMVIVARLVILAVFLRYRLLNPVHDALGLWLTSVICEIWFAVSWILDQFPKWFPIERETYLDRLSLRYEREGEPNMLAPVDVFVSTVDPLKEPPLVTSNTVLSILAMDYPVEKISCYVSDDGASMLTFESLSETAEFARKWVPFCKKFSIEPRAPEMYFTLKVDYLQDKVHPTFVKERRAMKREYEEFKVRINAQVAKASKVPLEGWIMQDGTPWPGNNTKDHPGMIQVFLGHSGGFDVEGHELPRLVYVSREKRPGFQHHKKAGAMNALVRVAGVLTNAPFMLNLDCDHYVNNSKAVREAMCFLMDPQIGKKVCYVQFPQRFDGIDTNDRYANRNTVFFDINMKGLDGIQGPVYVGTGCVFKRQALYGYEPPKGPKRPKMISCGCCPCFGRRRKNKKFSKNDMNGDVAALGGAEGDKEHLMSEMNFEKTFGQSSIFVTSTLMEEGGVPPSSSPAVLLKEAIHVISCGYEDKTEWGTELGWIYGSITEDILTGFKMHCRGWRSIYCMPKRPAFKGSAPINLSDRLNQVLRWALGSVEIFFSRHSPLWYGYKGGKLKWLERFAYANTTIYPFTSIPLLAYCILPAICLLTDKFIMPPISTFASLFFISLFMSIIVTGILELRWSGVSIEEWWRNEQFWVIGGISAHLFAVVQGLLKILAGIDTNFTVTSKATDDDDFGELYAFKWTTLLIPPTTVLIINIVGVVAGISDAINNGYQSWGPLFGKLFFSFWVIVHLYPFLKGLMGRQNRTPTIVVIWSVLLASIFSLLWVRIDPFVLKTKGPDTSKCGINC

SEQ ID NO: 82624 - protein, 895 aa, Arabidopsis thaliana
  peptide (1)..(895): Ceres Seq. ID no. 12666618
MSYGRGPEDDENGRFPPVIAGGHSGEFPVGGGYGNGEHGLHKRVHPYPSSEAGSEGGWRERMDDWKLQHGNLGPEPDDDPEMGLIDEARQPLSRKVPIASSKINPYRMVIVARLVILAVFLRYRLLNPVHDALGLWLTSVICEIWFAVSWILDQFPKWFPIERETYLDRLSLRYEREGEPNMLAPVDVFVSTVDPLKEPPLVTSNTVLSILAMDYPVEKISCYVSDDGASMLTFESLSETAEFARKWVPFCKKFSIEPRAPEMYFTLKVDYLQDKVHPTFVKERRAMKREYEEFKVRINAQVAKASKVPLEGWIMQDGTPWPGNNTKDHPGMIQVFLGHSGGFDVEGHELPRLVYVSREKRPGFQHHKKAGAMNALVRVAGVLTNAPFMLNLDCDHYVNNSKAVREAMCFLMDPQIGKKVCYVQFPQRFDGIDTNDRYANRNTVFFDINMKGLDGIQGPVYVGTGCVFKRQALYGYEPPKGPKRPKMISCGCCPCFGRRRKNKKFSKNDMNGDVAALGGAEGDKEHLMSEMNFEKTFGQSSIFVTSTLMEEGGVPPSSSPAVLLKEAIHVISCGYEDKTEWGTELGWIYGSITEDILTGFKMHCRGWRSIYCMPKRPAFKGSAPINLSDRLNQVLRWALGSVEIFFSRHSPLWYGYKGGKLKWLERFAYANTTIYPFTSIPLLAYCILPAICLLTDKFIMPPISTFASLFFISLFMSIIVTGILELRWSGVSIEEWWRNEQFWVIGGISAHLFAVVQGLLKILAGIDTNFTVTSKATDDDDFGELYAFKWTTLLIPPTTVLIINIVGVVAGISDAINNGYQSWGPLFGKLFFSFWVIVHLYPFLKGLMGRQNRTPTIVVIWSVLLASIFSLLWVRIDPFVLKTKGPDTSKCGINC

SEQ ID NO: 82625 - DNA, 1746 bp, Arabidopsis thaliana
  misc_feature (1)..(1746): Ceres Seq. ID no. 12666619
  misc_feature (1)..(1746): Ortholog of  Ceres SEQ ID NO 14303351 as cited in SEQ ID NO 54864
  misc_feature (1)..(1746): Ortholog of  Ceres SEQ ID NO 13597260 as cited in SEQ ID NO 63885
atgaactcgatgaataactggttaggcttctctctctctcctcatgatcaaaatcatcaccgtacggatgttgactcctccaccaccagaaccgccgtagatgttgccggagggtactgttttgatctggccgctccctccgatgaatcttctgccgttcaaacatcttttctttctcctttcggtgtcaccctcgaagctttcaccagagacaataatagtcactcccgagattgggacatcaatggtggtgcatgcaataacattaacaataacgaacaaaatggaccaaagcttgagaatttcctcggccgcaccaccacgatttacaataccaacgagaccgttgtagatggaaatggcgattgtggaggaggagacggtggtggtggcggctcactaggcctttcgatgataaaaacatggctgagtaatcattcggttgctaatgctaatcatcaagacaatggtaacggtgcacgaggcttgtccctctctatgaattcatctactagtgatagcaacaactacaacaacaatgatgatgtcgtccaagagaagactattgttgatgtcgtagaaactacaccgaagaaaactattgagagttttggacaaaggacgtctatataccgcggtgttacaaggcatcggtggacaggtagatacgaggcacatttatgggacaatagttgcaaaagagaaggccagactcgcaaaggaagacaaggaggttatgacaaagaagaaaaagcagctagggcttacgatttagccgcactaaagtattggggaaccaccactactactaacttccccttgagtgaatatgagaaagaggtagaagagatgaagcacatgacgaggcaagagtatgttgcctctctgcgcaggaaaagtagtggtttctctcgtggtgcatcgatttatcgaggagtaacaaggcatcaccaacatggaaggtggcaagctaggatcggaagagtcgccggtaacaaagacctctacttgggaactttcggcacacaggaagaggctgctgaggcttatgacattgcagccattaaattcagaggattaagcgcagtgactaacttcgacatgaacagatacaatgttaaagcaatcctcgagagcccgagtctacctattggtagttctgcgaaacgtctcaaggacgttaataatccggttccagctatgatgattagtaataacgtttcagagagtgcaaataatgttagcggttggcaaaacactgcgtttcagcatcatcagggaatggatttgagcttattgcagcaacagcaggagaggtacgttggttattacaatggaggaaacttgtctaccgagagtactagggtttgtttcaaacaagaggaggaacaacaacacttcttgagaaactcgccgagtcacatgactaatgttgatcatcatagctcgacctctgatgattctgttaccgtttgtggaaatgttgttagttatggtggttatcaaggattcgcaatccctgttggaacatcggttaattacgatccctttactgctgctgagattgcttacaacgcaagaaatcattattactatgctcagcatcagcaacaacagcagattcagcagtcgccgggaggagattttccggtggcgatttcgaataaccatagctctaacatgtactttcacggggaaggtggtggagaaggggctccaacgttttcagtttggaacgacacttag

SEQ ID NO: 82626 - protein, 581 aa, Arabidopsis thaliana
  peptide (1)..(581): Ceres Seq. ID no. 12666620
MNSMNNWLGFSLSPHDQNHHRTDVDSSTTRTAVDVAGGYCFDLAAPSDESSAVQTSFLSPFGVTLEAFTRDNNSHSRDWDINGGACNNINNNEQNGPKLENFLGRTTTIYNTNETVVDGNGDCGGGDGGGGGSLGLSMIKTWLSNHSVANANHQDNGNGARGLSLSMNSSTSDSNNYNNNDDVVQEKTIVDVVETTPKKTIESFGQRTSIYRGVTRHRWTGRYEAHLWDNSCKREGQTRKGRQGGYDKEEKAARAYDLAALKYWGTTTTTNFPLSEYEKEVEEMKHMTRQEYVASLRRKSSGFSRGASIYRGVTRHHQHGRWQARIGRVAGNKDLYLGTFGTQEEAAEAYDIAAIKFRGLSAVTNFDMNRYNVKAILESPSLPIGSSAKRLKDVNNPVPAMMISNNVSESANNVSGWQNTAFQHHQGMDLSLLQQQQERYVGYYNGGNLSTESTRVCFKQEEEQQHFLRNSPSHMTNVDHHSSTSDDSVTVCGNVVSYGGYQGFAIPVGTSVNYDPFTAAEIAYNARNHYYYAQHQQQQQIQQSPGGDFPVAISNNHSSNMYFHGEGGGEGAPTFSVWNDT

SEQ ID NO: 82627 - protein, 578 aa, Arabidopsis thaliana
  peptide (1)..(578): Ceres Seq. ID no. 12666621
MNNWLGFSLSPHDQNHHRTDVDSSTTRTAVDVAGGYCFDLAAPSDESSAVQTSFLSPFGVTLEAFTRDNNSHSRDWDINGGACNNINNNEQNGPKLENFLGRTTTIYNTNETVVDGNGDCGGGDGGGGGSLGLSMIKTWLSNHSVANANHQDNGNGARGLSLSMNSSTSDSNNYNNNDDVVQEKTIVDVVETTPKKTIESFGQRTSIYRGVTRHRWTGRYEAHLWDNSCKREGQTRKGRQGGYDKEEKAARAYDLAALKYWGTTTTTNFPLSEYEKEVEEMKHMTRQEYVASLRRKSSGFSRGASIYRGVTRHHQHGRWQARIGRVAGNKDLYLGTFGTQEEAAEAYDIAAIKFRGLSAVTNFDMNRYNVKAILESPSLPIGSSAKRLKDVNNPVPAMMISNNVSESANNVSGWQNTAFQHHQGMDLSLLQQQQERYVGYYNGGNLSTESTRVCFKQEEEQQHFLRNSPSHMTNVDHHSSTSDDSVTVCGNVVSYGGYQGFAIPVGTSVNYDPFTAAEIAYNARNHYYYAQHQQQQQIQQSPGGDFPVAISNNHSSNMYFHGEGGGEGAPTFSVWNDT

SEQ ID NO: 82628 - protein, 444 aa, Arabidopsis thaliana
  peptide (1)..(444): Ceres Seq. ID no. 12666622
MIKTWLSNHSVANANHQDNGNGARGLSLSMNSSTSDSNNYNNNDDVVQEKTIVDVVETTPKKTIESFGQRTSIYRGVTRHRWTGRYEAHLWDNSCKREGQTRKGRQGGYDKEEKAARAYDLAALKYWGTTTTTNFPLSEYEKEVEEMKHMTRQEYVASLRRKSSGFSRGASIYRGVTRHHQHGRWQARIGRVAGNKDLYLGTFGTQEEAAEAYDIAAIKFRGLSAVTNFDMNRYNVKAILESPSLPIGSSAKRLKDVNNPVPAMMISNNVSESANNVSGWQNTAFQHHQGMDLSLLQQQQERYVGYYNGGNLSTESTRVCFKQEEEQQHFLRNSPSHMTNVDHHSSTSDDSVTVCGNVVSYGGYQGFAIPVGTSVNYDPFTAAEIAYNARNHYYYAQHQQQQQIQQSPGGDFPVAISNNHSSNMYFHGEGGGEGAPTFSVWNDT

SEQ ID NO: 82629 - DNA, 450 bp, Arabidopsis thaliana
  misc_feature (1)..(450): Ceres Seq. ID no. 12666623
  misc_feature (1)..(450): Ortholog of  Ceres SEQ ID NO 15177004 as cited in SEQ ID NO 57554
  misc_feature (1)..(450): Ortholog of  Ceres SEQ ID NO 13662587 as cited in SEQ ID NO 63275
  misc_feature (1)..(450): Ortholog of  Ceres SEQ ID NO 13599500 as cited in SEQ ID NO 0
atgggtgcatttgattatatctctagcttttgttcatatacatacgctaatgccaaaaccaagcgtaagccattgcagacagtggatatcaaggtgaaaatggactgtgatggttgtgaaaggagagttagaaacgtggttcgtcgcatgaaaggggtgaaatcggtggaggtgaaccggaaacagagccggataacggtgaacggacacgtggacccaaacaaggtgttgaagagagtgaagagcaccggtaaaaaggctgagttttggccttacatacctcaacatatggtctattacccttttgctcctggcatgtacgataaacgtgcacctgcaggccacatccgtaatcccactcaatcgtttccaacagcaaacgctcccgaggaaaattacgtttccctcttcagcgacgacaacgtccacgccgcttgttccatcatgtga

SEQ ID NO: 82630 - protein, 149 aa, Arabidopsis thaliana
  peptide (1)..(149): Ceres Seq. ID no. 12666624
MGAFDYISSFCSYTYANAKTKRKPLQTVDIKVKMDCDGCERRVRNVVRRMKGVKSVEVNRKQSRITVNGHVDPNKVLKRVKSTGKKAEFWPYIPQHMVYYPFAPGMYDKRAPAGHIRNPTQSFPTANAPEENYVSLFSDDNVHAACSIM

SEQ ID NO: 82631 - protein, 116 aa, Arabidopsis thaliana
  peptide (1)..(116): Ceres Seq. ID no. 12666625
MDCDGCERRVRNVVRRMKGVKSVEVNRKQSRITVNGHVDPNKVLKRVKSTGKKAEFWPYIPQHMVYYPFAPGMYDKRAPAGHIRNPTQSFPTANAPEENYVSLFSDDNVHAACSIM

SEQ ID NO: 82632 - protein, 100 aa, Arabidopsis thaliana
  peptide (1)..(100): Ceres Seq. ID no. 12666626
MKGVKSVEVNRKQSRITVNGHVDPNKVLKRVKSTGKKAEFWPYIPQHMVYYPFAPGMYDKRAPAGHIRNPTQSFPTANAPEENYVSLFSDDNVHAACSIM

SEQ ID NO: 82633 - DNA, 1581 bp, Arabidopsis thaliana
  misc_feature (1)..(1581): Ceres Seq. ID no. 12666636
  misc_feature (1)..(1581): Ortholog of  Ceres SEQ ID NO 14303500 as cited in SEQ ID NO 54123
  misc_feature (1)..(1581): Ortholog of  Ceres SEQ ID NO 14303141 as cited in SEQ ID NO 65752
atggcaaaagcaatcgctttaactgtctttttgttcttattcttgtcattaatatctctaaccctagcaacagattatccactattcacaaagtctcgatggatcgtaaacaacaagggccaccgcgtgaagctagcttgcgcgaactggccttcgcacctcaagccagtggtagcagaggggctgagcagccagccaatggattcaatatcgaaaaagataaaagacatgggattcaattgtgttaggctcacttggccacttgaattaatgattaatgacactttagcctttaatgttaccgtgaaacaatcatttgagagatatggattggatcatgagcttcaagggatttacactcacaatccatacattgtcaatactcctctcatcaatgtctttcaggctgtggtgtatagtcttgggaggcatgatgtgatggtgatacttgacaaccacaagaccgtaccggggtggtgttgtagcaacgatgacccggacgcgttctttggcgacccaaaattcaacccggatctatggatgttgggtcttaagaagatggccacaatatttatgaacgtgaaaaacgttgttggtatgagcctgaggaatgaacttagaggctacaatcatacatcaaaagattggtacaagtacatgcaaaaaggagcagaagcagtgcatacatcaaaccctaacgtactggtcatactctcagggcttaacttcgatgctgacctaagtttcttaaaagatcgtccagtgaatcttagcttcaagaaaaaacttgtcttggagcttcattggtattctttcactgacggtactggtcaatggaagtcacacaatgtcaacgacttttgcagccaaatgttctctaaggagcgtcgtaccggcggttttgttctcgaccaaggctttcctttgttcttgagcgagtttgggaccgatcaaagaggtggcgatcttgaaggaaacaggtacatgaattgtatgttggcatgggcggccgagaaagatttggattgggcggtttgggcggttacgggagtttattatttccgcgaaggcaaacgtggtgtagttgaagcttacggtatgttagatgcgaattggcataatgttcataactatacttatctccgtaggctctccgtcattcaaccaccgcacacaggacccggtgtaaagcacaatcatcacaagaaaatatttcatccgttaaccggactctgcctagtgagaaagtcacactgccatgagtccgagctcacgttaggtccatgcacaaaggacgaaccgtggagctattctcatggaggcatacttgagatcagacgcggtcacaaatcttgcttagaaggagaaacagcggtcggaaaaagtgtgaaacttggcaggatatgcacaaagattgagcaaatatcggccacaaagatgcatttgtcgttcaacactagtgacggttcgttggtatgcttagacgtggattcggataacaatgttgttgctaattcttgcaactgtttgaccggagatactacttgtgaacctgcaagccaatggttcaaaatcttctga

SEQ ID NO: 82634 - protein, 526 aa, Arabidopsis thaliana
  peptide (1)..(526): Ceres Seq. ID no. 12666637
MAKAIALTVFLFLFLSLISLTLATDYPLFTKSRWIVNNKGHRVKLACANWPSHLKPVVAEGLSSQPMDSISKKIKDMGFNCVRLTWPLELMINDTLAFNVTVKQSFERYGLDHELQGIYTHNPYIVNTPLINVFQAVVYSLGRHDVMVILDNHKTVPGWCCSNDDPDAFFGDPKFNPDLWMLGLKKMATIFMNVKNVVGMSLRNELRGYNHTSKDWYKYMQKGAEAVHTSNPNVLVILSGLNFDADLSFLKDRPVNLSFKKKLVLELHWYSFTDGTGQWKSHNVNDFCSQMFSKERRTGGFVLDQGFPLFLSEFGTDQRGGDLEGNRYMNCMLAWAAEKDLDWAVWAVTGVYYFREGKRGVVEAYGMLDANWHNVHNYTYLRRLSVIQPPHTGPGVKHNHHKKIFHPLTGLCLVRKSHCHESELTLGPCTKDEPWSYSHGGILEIRRGHKSCLEGETAVGKSVKLGRICTKIEQISATKMHLSFNTSDGSLVCLDVDSDNNVVANSCNCLTGDTTCEPASQWFKIF

SEQ ID NO: 82635 - protein, 460 aa, Arabidopsis thaliana
  peptide (1)..(460): Ceres Seq. ID no. 12666638
MDSISKKIKDMGFNCVRLTWPLELMINDTLAFNVTVKQSFERYGLDHELQGIYTHNPYIVNTPLINVFQAVVYSLGRHDVMVILDNHKTVPGWCCSNDDPDAFFGDPKFNPDLWMLGLKKMATIFMNVKNVVGMSLRNELRGYNHTSKDWYKYMQKGAEAVHTSNPNVLVILSGLNFDADLSFLKDRPVNLSFKKKLVLELHWYSFTDGTGQWKSHNVNDFCSQMFSKERRTGGFVLDQGFPLFLSEFGTDQRGGDLEGNRYMNCMLAWAAEKDLDWAVWAVTGVYYFREGKRGVVEAYGMLDANWHNVHNYTYLRRLSVIQPPHTGPGVKHNHHKKIFHPLTGLCLVRKSHCHESELTLGPCTKDEPWSYSHGGILEIRRGHKSCLEGETAVGKSVKLGRICTKIEQISATKMHLSFNTSDGSLVCLDVDSDNNVVANSCNCLTGDTTCEPASQWFKIF

SEQ ID NO: 82636 - protein, 450 aa, Arabidopsis thaliana
  peptide (1)..(450): Ceres Seq. ID no. 12666639
MGFNCVRLTWPLELMINDTLAFNVTVKQSFERYGLDHELQGIYTHNPYIVNTPLINVFQAVVYSLGRHDVMVILDNHKTVPGWCCSNDDPDAFFGDPKFNPDLWMLGLKKMATIFMNVKNVVGMSLRNELRGYNHTSKDWYKYMQKGAEAVHTSNPNVLVILSGLNFDADLSFLKDRPVNLSFKKKLVLELHWYSFTDGTGQWKSHNVNDFCSQMFSKERRTGGFVLDQGFPLFLSEFGTDQRGGDLEGNRYMNCMLAWAAEKDLDWAVWAVTGVYYFREGKRGVVEAYGMLDANWHNVHNYTYLRRLSVIQPPHTGPGVKHNHHKKIFHPLTGLCLVRKSHCHESELTLGPCTKDEPWSYSHGGILEIRRGHKSCLEGETAVGKSVKLGRICTKIEQISATKMHLSFNTSDGSLVCLDVDSDNNVVANSCNCLTGDTTCEPASQWFKIF

SEQ ID NO: 82637 - DNA, 1386 bp, Arabidopsis thaliana
  misc_feature (1)..(1386): Ceres Seq. ID no. 12666640
  misc_feature (1)..(1386): Ortholog of  Ceres SEQ ID NO 13596932 as cited in SEQ ID NO 62984
  misc_feature (1)..(1386): Ortholog of  Ceres SEQ ID NO 14313292 as cited in SEQ ID NO 67393
atgtccgggtcactcacgtttaagatttaccggcagaagccggagttagtttctccggcgaagccaacgccaagagagctcaaacccctctcagatattgacgaccaagaaggactaagatttcacattcccactatctttttctatagacacaaccctactactaactctgatcctgtcgcagtcattcggagagctctcgcagagacgctggtttactactatccgttcgccggtaggcttcgggaaggaccgaaccggaaactggctgtggattgtaccggtgaaggcgttttgtttattgaggctgatgctgacgtgacacttgttgagtttgaagagaaggatgctcttaagcctcctttcccttgctttgaagagcttctgtttaacgttgaaggttcttgtgaaatgctcaacactcctttgatgctcatgcaggtcacgcgcttgaaatgcggcggttttatcttcgccgtccgtatcaaccacgcaatgtccgatgccggcggtctcacgctgttcctcaaaacgatgtgcgagttcgtgcgtggttatcatgcacctacggttgctccggtgtgggaacgtcacctgctgagcgccagagtcctgctgcgtgtgacacacgcacaccgagagtacgacgaaatgccggcaataggtacagaactcggcagtagaagagacaatctggtaggccggtcactcttcttcggtccctgcgagatgtccgcaatacgcaggctcctcccaccaaatcttgtcaacagcagcaccaatatggaaatgctaacgtctttcttatggcgttatcgcaccatcgctctacgaccagaccaggacaaggagatgcggctcatattaattgtcaacgcacgttctaagcttaaaaatccaccactacctcgaggatactacggaaatgcctttgcgttcccagtcgcaatcgcaacagctaatgaactaactaagaaaccgttagagtttgctctgagactaataaaagaggcgaaatcgagcgtgacggaggagtacatgcgatcacttgcggatctgatggtgataaagggaagaccaagcttctcgtcggacggagcttacttggtttcggatgtaagaattttcgcagatattgatttcggaatttgggggaaaccagtttacggaggaattggtacagccggagttgaagaccttccgggggctagcttctacgtttcatttgagaagagaaatggtgagatagggatcgttgtaccggtttgtttgccagagaaggcgatgcagaggtttgtggaagagcttgaaggcgtgtttaatggtcaagttgtattcaatagaggaagcaaaagctctaataaattgatcatgtcttctctgtaa

SEQ ID NO: 82638 - protein, 461 aa, Arabidopsis thaliana
  peptide (1)..(461): Ceres Seq. ID no. 12666641
MSGSLTFKIYRQKPELVSPAKPTPRELKPLSDIDDQEGLRFHIPTIFFYRHNPTTNSDPVAVIRRALAETLVYYYPFAGRLREGPNRKLAVDCTGEGVLFIEADADVTLVEFEEKDALKPPFPCFEELLFNVEGSCEMLNTPLMLMQVTRLKCGGFIFAVRINHAMSDAGGLTLFLKTMCEFVRGYHAPTVAPVWERHLLSARVLLRVTHAHREYDEMPAIGTELGSRRDNLVGRSLFFGPCEMSAIRRLLPPNLVNSSTNMEMLTSFLWRYRTIALRPDQDKEMRLILIVNARSKLKNPPLPRGYYGNAFAFPVAIATANELTKKPLEFALRLIKEAKSSVTEEYMRSLADLMVIKGRPSFSSDGAYLVSDVRIFADIDFGIWGKPVYGGIGTAGVEDLPGASFYVSFEKRNGEIGIVVPVCLPEKAMQRFVEELEGVFNGQVVFNRGSKSSNKLIMSSL

SEQ ID NO: 82639 - protein, 324 aa, Arabidopsis thaliana
  peptide (1)..(324): Ceres Seq. ID no. 12666642
MLNTPLMLMQVTRLKCGGFIFAVRINHAMSDAGGLTLFLKTMCEFVRGYHAPTVAPVWERHLLSARVLLRVTHAHREYDEMPAIGTELGSRRDNLVGRSLFFGPCEMSAIRRLLPPNLVNSSTNMEMLTSFLWRYRTIALRPDQDKEMRLILIVNARSKLKNPPLPRGYYGNAFAFPVAIATANELTKKPLEFALRLIKEAKSSVTEEYMRSLADLMVIKGRPSFSSDGAYLVSDVRIFADIDFGIWGKPVYGGIGTAGVEDLPGASFYVSFEKRNGEIGIVVPVCLPEKAMQRFVEELEGVFNGQVVFNRGSKSSNKLIMSSL

SEQ ID NO: 82640 - protein, 318 aa, Arabidopsis thaliana
  peptide (1)..(318): Ceres Seq. ID no. 12666643
MLMQVTRLKCGGFIFAVRINHAMSDAGGLTLFLKTMCEFVRGYHAPTVAPVWERHLLSARVLLRVTHAHREYDEMPAIGTELGSRRDNLVGRSLFFGPCEMSAIRRLLPPNLVNSSTNMEMLTSFLWRYRTIALRPDQDKEMRLILIVNARSKLKNPPLPRGYYGNAFAFPVAIATANELTKKPLEFALRLIKEAKSSVTEEYMRSLADLMVIKGRPSFSSDGAYLVSDVRIFADIDFGIWGKPVYGGIGTAGVEDLPGASFYVSFEKRNGEIGIVVPVCLPEKAMQRFVEELEGVFNGQVVFNRGSKSSNKLIMSSL

SEQ ID NO: 82641 - DNA, 1479 bp, Arabidopsis thaliana
  misc_feature (1)..(1479): Ceres Seq. ID no. 12666658
  misc_feature (1)..(1479): Ortholog of  Ceres SEQ ID NO 14312212 as cited in SEQ ID NO 54399
  misc_feature (1)..(1479): Ortholog of  Ceres SEQ ID NO 15225341 as cited in SEQ ID NO 55222
  misc_feature (1)..(1479): Ortholog of  Ceres SEQ ID NO 14311755 as cited in SEQ ID NO 57271
  misc_feature (1)..(1479): Ortholog of  Ceres SEQ ID NO 15171156 as cited in SEQ ID NO 58259
  misc_feature (1)..(1479): Ortholog of  Ceres SEQ ID NO 14302212 as cited in SEQ ID NO 66507
  misc_feature (1)..(1479): Ortholog of  Ceres SEQ ID NO 13653980 as cited in SEQ ID NO 69253
gcttaaacaatgatctccctgaatctatctccttccctcaatccgggtctcctccacaagacccggacctgtcaacaaccgacccgtctctctgctcttctcgtcaccaaccctaaacccttcaatcacagacacccactagggctttcaccgattcccaatctccagattcgtgatgtttccgcaaaacccttgctttcactcacaaaccctgaatcctcatctgggttctcgagaaaacccagatccatcgccgccgttggctcatcggattcaaatccagacgaaaaatccgatcttggtgaagcggagaagaaagagaagaaggctaagactcttcagctagggattgtgtttggtctttggtatttccagaacatcgtcttcaacatcttcaacaaaaaggcactcaatgtctttccttatccatggcttctcgcttcgtttcagctcttcgcaggttctatttggatgcttgtcttatggtcctttaagctttacccctgccctaaaatctccaagccttttatcattgctctccttggtcctgcattgttccacactattggacatatctcagcttgtgtctcattctccaaagtcgctgtttcgttcactcatgttatcaaatcagcagagcctgtcttctctgttatcttctcgtctttactcggtgattcgtatccgttagctgtctggttatcgattcttccgattgttatgggttgttctttagctgcagtcactgaagtgtcattcaatttaggtggattatcaggagctatgattagtaacgttggttttgtcttgagaaacatttactctaaacgtagcttacagagctttaaagagattgatggattgaatctatacggttgcatcagtatactctctctgctttatctgtttcccgtggcgattttcgttgaaggatcacattgggttccaggttaccataaagccattgcatctgttgggacaccatcaacgttctacttttgggttttgctctctggtgtcttctatcatctgtacaaccagtcttcttaccaggcactcgacgagatcagtccattgactttctctgttgggaacacgatgaagcgagtcgtggtgattatctccactgttttggtgtttaggaatcctgttagacctctgaatgctcttggatcagccattgcgattttcggtaccttcttgtattctcaggccactgcaaagaagaagaagattgaagtgggaggtgataagaagaactaaaggttttaagtgcaaaaccaaggtttacttgagctttttctttctttccaagttttttctttttttcttttgctgtttttgatttcattatgagactagaattatcatttctgttgactggtttagttgctttaaagactttgatctacttagttcttgacctcgtctacttgatgtttttccattgatataaagttggtctgattctgagaagag

SEQ ID NO: 82642 - protein, 417 aa, Arabidopsis thaliana
  peptide (1)..(417): Ceres Seq. ID no. 12666659
MISLNLSPSLNPGLLHKTRTCQQPTRLSALLVTNPKPFNHRHPLGLSPIPNLQIRDVSAKPLLSLTNPESSSGFSRKPRSIAAVGSSDSNPDEKSDLGEAEKKEKKAKTLQLGIVFGLWYFQNIVFNIFNKKALNVFPYPWLLASFQLFAGSIWMLVLWSFKLYPCPKISKPFIIALLGPALFHTIGHISACVSFSKVAVSFTHVIKSAEPVFSVIFSSLLGDSYPLAVWLSILPIVMGCSLAAVTEVSFNLGGLSGAMISNVGFVLRNIYSKRSLQSFKEIDGLNLYGCISILSLLYLFPVAIFVEGSHWVPGYHKAIASVGTPSTFYFWVLLSGVFYHLYNQSSYQALDEISPLTFSVGNTMKRVVVIISTVLVFRNPVRPLNALGSAIAIFGTFLYSQATAKKKKIEVGGDKKN

SEQ ID NO: 82643 - protein, 263 aa, Arabidopsis thaliana
  peptide (1)..(263): Ceres Seq. ID no. 12666660
MLVLWSFKLYPCPKISKPFIIALLGPALFHTIGHISACVSFSKVAVSFTHVIKSAEPVFSVIFSSLLGDSYPLAVWLSILPIVMGCSLAAVTEVSFNLGGLSGAMISNVGFVLRNIYSKRSLQSFKEIDGLNLYGCISILSLLYLFPVAIFVEGSHWVPGYHKAIASVGTPSTFYFWVLLSGVFYHLYNQSSYQALDEISPLTFSVGNTMKRVVVIISTVLVFRNPVRPLNALGSAIAIFGTFLYSQATAKKKKIEVGGDKKN

SEQ ID NO: 82644 - DNA, 1811 bp, Arabidopsis thaliana
  misc_feature (1)..(1811): Ceres Seq. ID no. 12666661
  misc_feature (1)..(1811): Ortholog of  Ceres SEQ ID NO 15179924 as cited in SEQ ID NO 57437
  misc_feature (1)..(1811): Ortholog of  Ceres SEQ ID NO 15171286 as cited in SEQ ID NO 58206
  misc_feature (1)..(1811): Ortholog of  Ceres SEQ ID NO 14302451 as cited in SEQ ID NO 66180
agcaaatatcacacaatttttcttcaatatttttacttatacacagcaaaaacgagagaaagagagagagaagaaaagtttctctctttggggttctgtgaaaaccaaaatcgaaatcgcatcataatcttaaatctctcttctttctacgaattttcatgtttatgttccctctctcttgattctccaccatttcactattcacatattttttttttattgataaagttttctcctttttttgagttttacgagaggatttttcaaaggtctaaactttcttgggatctatcagattgtcttgaaactaatgcttacgggttttaacaggttgattgattgatcataccaccatggatatgcatcatctctgaaccaatggggaaacatttctgacatttaatggatcctcaagctttcattcgtctttcggttggctctcttgctttgagaattcccaaggtccttataaactctacttcaaaatctaatgagaagaagaacttttcttctcaatgctcttgcgaaataaaactacgaggctttcctgttcaaacaacatctatccctttgatgccgtcccttgatgcagctcctgaccatcacagtatttccactagcttttatcttgaagaatctgatttaagagctcttttgacacctggatgcttctatagtcctcatgctcacttggaaatctcggttttcacgggtaaaaagagtttgaattgcggtgttggtggcaaaagacagcagattgggatgtttaagttggaggtaggtcctgaatggggagaaggaaaaccaatgattcttttcaatggttggatcagtattggaaagaccaagcgggatggtgctgcagagcttcatttgaaagtgaaacttgatcctgatcctcgatatgtttttcagtttgaggatgttactaccttgagccctcagatagttcagctccgtggctcggtcaagcaacctatcttcagttgcaagtttagcagagacagggtgtcacaggtggatccgttgaatgggtactggtcaagttcaggcgatggaactgagcttgagagtgagagacgtgaaagaaaaggatggaaggtgaagatacatgatctctctggctctgcagttgctgctgctttcataacaactccttttgttccatccactggatgtgattgggtcgcaaagtccaacccgggtgcttggcttgtggtccggcctgacccatctcgaccaaacagctggcagccatggggaaagctcgaagcttggcgggaacgcgggatcagagactccgtgtgttgcagattccatcttctatcaaacggtctagaagttggagatgttttaatgtctgaaatcctcatcagcgctgagaaaggtggggaatttttaatcgacacggataaacagatgctaacagttgcagctacaccaattccaagcccgcagagtagtggagacttctcagggttgggacagtgtgtctctggaggtgggtttgtaatgagctcgagagtgcaaggggaagggaaaagcagcaagcccgttgtacaattagctatgagacatgtaacttgtgtggaagatgcagccattttcatggcacttgctgcagctgttgatcttagcattcttgcttgtaaaccttttaggagaacgagtcggagaaggttccggcattactcctggtgaagaaaggaactctcttttgtgtgttttagtgtacagtttttgaattggactcaaagtctcattgtattaggaagaaactggcttaaggattaagaaatttcactcttctc

SEQ ID NO: 82645 - protein, 432 aa, Arabidopsis thaliana
  peptide (1)..(432): Ceres Seq. ID no. 12666662
MDPQAFIRLSVGSLALRIPKVLINSTSKSNEKKNFSSQCSCEIKLRGFPVQTTSIPLMPSLDAAPDHHSISTSFYLEESDLRALLTPGCFYSPHAHLEISVFTGKKSLNCGVGGKRQQIGMFKLEVGPEWGEGKPMILFNGWISIGKTKRDGAAELHLKVKLDPDPRYVFQFEDVTTLSPQIVQLRGSVKQPIFSCKFSRDRVSQVDPLNGYWSSSGDGTELESERRERKGWKVKIHDLSGSAVAAAFITTPFVPSTGCDWVAKSNPGAWLVVRPDPSRPNSWQPWGKLEAWRERGIRDSVCCRFHLLSNGLEVGDVLMSEILISAEKGGEFLIDTDKQMLTVAATPIPSPQSSGDFSGLGQCVSGGGFVMSSRVQGEGKSSKPVVQLAMRHVTCVEDAAIFMALAAAVDLSILACKPFRRTSRRRFRHYSW

SEQ ID NO: 82646 - protein, 375 aa, Arabidopsis thaliana
  peptide (1)..(375): Ceres Seq. ID no. 12666663
MPSLDAAPDHHSISTSFYLEESDLRALLTPGCFYSPHAHLEISVFTGKKSLNCGVGGKRQQIGMFKLEVGPEWGEGKPMILFNGWISIGKTKRDGAAELHLKVKLDPDPRYVFQFEDVTTLSPQIVQLRGSVKQPIFSCKFSRDRVSQVDPLNGYWSSSGDGTELESERRERKGWKVKIHDLSGSAVAAAFITTPFVPSTGCDWVAKSNPGAWLVVRPDPSRPNSWQPWGKLEAWRERGIRDSVCCRFHLLSNGLEVGDVLMSEILISAEKGGEFLIDTDKQMLTVAATPIPSPQSSGDFSGLGQCVSGGGFVMSSRVQGEGKSSKPVVQLAMRHVTCVEDAAIFMALAAAVDLSILACKPFRRTSRRRFRHYSW

SEQ ID NO: 82647 - protein, 312 aa, Arabidopsis thaliana
  peptide (1)..(312): Ceres Seq. ID no. 12666664
MFKLEVGPEWGEGKPMILFNGWISIGKTKRDGAAELHLKVKLDPDPRYVFQFEDVTTLSPQIVQLRGSVKQPIFSCKFSRDRVSQVDPLNGYWSSSGDGTELESERRERKGWKVKIHDLSGSAVAAAFITTPFVPSTGCDWVAKSNPGAWLVVRPDPSRPNSWQPWGKLEAWRERGIRDSVCCRFHLLSNGLEVGDVLMSEILISAEKGGEFLIDTDKQMLTVAATPIPSPQSSGDFSGLGQCVSGGGFVMSSRVQGEGKSSKPVVQLAMRHVTCVEDAAIFMALAAAVDLSILACKPFRRTSRRRFRHYSW

SEQ ID NO: 82648 - DNA, 5075 bp, Arabidopsis thaliana
  misc_feature (1)..(5075): Ceres Seq. ID no. 12666701
  misc_feature (1)..(5075): Ortholog of  Ceres SEQ ID NO 13646221 as cited in SEQ ID NO 20310
  misc_feature (1)..(5075): Ortholog of  Ceres SEQ ID NO 14311423 as cited in SEQ ID NO 53911
gtgttaagaatagatagatgagagtgatgatttggagaaagagagatggaaccaccagctgctcgtgtaacgccgtcgattaaggccgactgtagtcacagcgtcaacatcatctgcgaggaaacagtactgcactcccttgtcagccacctctcggccgctttacgccgggaaggcatatctgtgtttgtggatgcgtgcggattgcaggaaaccaagttcttctccattaaacagaatcagccgttgacagatggggctagggttttggtggtggttatttccgacgaggtggagttctacgatccttggtttcctaagttcttaaaggttatccagggttggcaaaacaacggccacgtggtggttccagtcttctacggcgtcgattcgttgacccgagtttacgggtgggccaatagttggctggaggccgaaaaattaaccagccaccaatcaaagatcttaagcaataatgtactcacggactccgaactagtggaagagatcgtcagagatgtttatgggaagctttatcctgcagaacgagttggaatttacgcgaggctactagagatagaaaagttgctttacaagcaacatagggacatccgaagcataggaatttggggtatgcctggcataggcaagacgacgcttgctaaagcagtctttaatcacatgtccactgattatgatgcttcttgcttcatcgagaactttgatgaagcttttcataaggagggactccaccgtttgctcaaagaaagaattggtaaaattctaaaggatgagtttgacatagaaagttcgtatattatgagaccgaccctccatagggacaaattatacgataaaaggattcttgttgttttagatgatgtgcgcgattcccttgctgcagagtccttccttaaaaggcttgattggtttggttccggaagccttataatcataacctccgttgataaacaagtgtttgccttttgtcagatcaatcaaatatacacggttcaaggtttaaatgtgcacgaggctctgcagcttttctcccaaagcgtatttggaataaacgagccagagcagaatgacaggaaactgtcaatgaaggtgattgactatgttaatggaaacccgttagctctcagcatttacggccgagagctaatggggaagaagtcagaaatggagactgcattcttcgagctcaagcattgtcctcccttaaagattcaggatgtgctaaaaaacgcttatagtgcacttagcgacaatgagaagaacattgttttggacattgcttttttcttcaagggagaaactgtcaattatgtgatgcagctgcttgaggaatctcattactttccacgtcttgcaatagatgttcttgtggacaagtgtgtgttaactatctcagaaaacacagtgcaaatgaataatttgatccaagacacctgccaagaaatcttcaatggagaaattgagacctgcaccagaatgtgggaaccttccagaatcagatatctgctagaatatgatgaacttgaaggaagtggagaaaccaaagcaatgcctaaatctggtctggtcgctgaacacatcgaaagcatattcctggacacttcaaacgtgaaatttgatgtcaaacacgatgcattcaagaatatgtttaatctcaaattcctaaagatatacaattcatgctctaaatatatttctggactcaattttccaaagggcctcgattctctgccttatgagctaaggctcctccactgggagaactaccctttgcaatccttgcctcaagattttgactttggacaccttgttaagctcagtatgccttacagccagcttcataaactcgggacaagagtcaaggaccttgtgatgttaaagaggctcattctttctcattctttacagctagttgaatgtgacatactaatatatgctcaaaatatcgagctaattgatcttcaaggctgtacaggattgcaaagatttccagacacgagtcaattacagaatctccgggtagtaaatctctcaggttgcacagagatcaaatgtttctcaggggttccaccaaatattgaggaattacatctccaaggaactcgtataagggaaataccaatattcaatgcgacccatccccccaaggttaagctggaccggaaaaagctttggaatcttctagaaaacttctcggatgttgagcatatcgatttggagtgtgtaacaaatctagctacagttacctcaaataatcatgttatgggcaagcttgtctgcttgaatatgaaatattgttccaatttgcgaggccttcctgacatggtcagtttagaatctctcaaagttctttatctgtcgggctgttcagagcttgagaaaattatgggtttcccgagaaacttgaaaaaactatatgttggtggaaccgccatacgagaattgccacagcttcccaacagtctagaattcctgaatgctcatggttgtaagcatctgaagtcaattaatttggattttgagcagcttcctaggcacttcatcttcagtaattgttatagattttcttcacaagtgatcgctgagttcgtagagaaaggtcttgtagcaagtttagcaagagcaaaacaagaggaactcatcaaagcacctgaagtcatcatctgtattcctatggacacacggcagagatcctcctttcgcttgcaagcaggtcgaaatgcaatgacagacttagttccgtggatgcaaaaacctatctcaggcttttctatgtcagttgtagtatcatttcaagatgattaccacaatgatgtaggtcttcgcattaggtgtgtaggtacatggaagacctggaacaaccagcctgatagaatagttgagagattttttcaatgttgggctcctaccgaagctccaaaagttgtagcggatcacatttttgtcttgtatgataccaaaatgcatcctagtgatagtgaagaaaaccacatcagtatgtgggctcatgaagtcaaatttgaattccacacagtgagtggggaaaacaatcctctaggtgctagttgcaaggtgactgaatgtggtgtcgaggtaattacagctgcaacaggtgatactagtgttagtggaattataagagaaagtgaaactataactattatcgagaaggaggatactattattgatgaggaggatactcctcttttgtccagaaagccagaggaaacgaatcgttctcgttcatctagcgaattacagaagctttctagtacgtcaagtaaggtaagatctaagggaaatgtgttttggaagtggttaggttgttttcccctgcagccaaaaaacttgagatctagaagtaggcgcacaacagcgttagaagaagcgttagaagaagcattaaaagaaagagaaaaattagaggacaccagagagttacaaatagcattaatagagtcaaagaagataaaaaaaataaagcaagcagacgaaagggatcaaataaagcacgcagacgaaagggaacaaagaaagcattccaaagatcatgaggaagaagaaatagagtcaaatgagaaagaagaaagaaggcattccaaagattatgtgatagaagaattagtgttaaaggggaaaggtaaaagaaagcaactggatgatgataaagccgacgaaaaggaacaaataaagcattccaaagatcatgtggaagaagaagtgaatcctcctcttagcaaatgcaaggattgcaaatctgcaattgaagatggaatatctatcaatgcctacggttctgtttggcatcctcaatgtttctgttgccttcgttgtcgggagcctattgctatgaacgagatttcagacttaagaggaatgtatcacaaaccttgctacaaggagctccgtcatccgaattgctatgtctgcgaaaaaaagattcctcgtactgcggaaggtttaaagtaccatgagcatccgttctggatggaaacatactgcccttctcatgatggtgatggaactcccaaatgttgtagctgtgaaagattagagcattgcggaacacagtatgtaatgcttgcagattttcgatggctatgtcgagaatgtatggacagcgcgattatggattctgatgaatgccaacctttgcactttgaaatccgtgaattctttgagggcttacacatgaagattgaggaagaatttcctgtttatttggtggagaaaaatgctctgaataaagctgagaaggaagagaagattgacaaacagggggatcagtgtctgatggtagtcagaggtatttgcctatctgaagagcagattgtcacaagtgtctcacaaggagtaaggaggatgttgaataagcagatactagatacggttacagagtctcaaagggttgttcgcaagtgcgaggtcactgcaattctcatcttatatgggcttcctaggttactcacaggatatatcttggcccatgagatgatgcatgcttatcttagactcaatggttacaggaatcttaacatggttcttgaagaaggattatgccaagtgttaggctacatgtggttggagtgtcagacatacgtttttgatactgccacaatagcttcttcttcttcttcttcccgcactcctctatctacaaccacatcaaagaaagttgacccatctgattttgagaagaggctggtaaatttctgcaagcatcagatagaaacagatgagtcaccattcttcggtgacgggttcaggaaagttaacaaaatgatggcctcaaataatcacagccttaaggataccctgaaagagatcatcagcatttccaagactccacaatattcaaagttatgatagccagccatatgttataccagtaatgcacgttttcattctttggtgtgaacacagtttcttcttgctctattgctcttgttctcatgttttaagagtttctccttcgttttgcagccatagaaactttaaacaatcttgcctgttgtacaaatgtatttttcgctggaatgaattcttgctgtgat

SEQ ID NO: 82649 - protein, 1613 aa, Arabidopsis thaliana
  peptide (1)..(1613): Ceres Seq. ID no. 12666702
MEPPAARVTPSIKADCSHSVNIICEETVLHSLVSHLSAALRREGISVFVDACGLQETKFFSIKQNQPLTDGARVLVVVISDEVEFYDPWFPKFLKVIQGWQNNGHVVVPVFYGVDSLTRVYGWANSWLEAEKLTSHQSKILSNNVLTDSELVEEIVRDVYGKLYPAERVGIYARLLEIEKLLYKQHRDIRSIGIWGMPGIGKTTLAKAVFNHMSTDYDASCFIENFDEAFHKEGLHRLLKERIGKILKDEFDIESSYIMRPTLHRDKLYDKRILVVLDDVRDSLAAESFLKRLDWFGSGSLIIITSVDKQVFAFCQINQIYTVQGLNVHEALQLFSQSVFGINEPEQNDRKLSMKVIDYVNGNPLALSIYGRELMGKKSEMETAFFELKHCPPLKIQDVLKNAYSALSDNEKNIVLDIAFFFKGETVNYVMQLLEESHYFPRLAIDVLVDKCVLTISENTVQMNNLIQDTCQEIFNGEIETCTRMWEPSRIRYLLEYDELEGSGETKAMPKSGLVAEHIESIFLDTSNVKFDVKHDAFKNMFNLKFLKIYNSCSKYISGLNFPKGLDSLPYELRLLHWENYPLQSLPQDFDFGHLVKLSMPYSQLHKLGTRVKDLVMLKRLILSHSLQLVECDILIYAQNIELIDLQGCTGLQRFPDTSQLQNLRVVNLSGCTEIKCFSGVPPNIEELHLQGTRIREIPIFNATHPPKVKLDRKKLWNLLENFSDVEHIDLECVTNLATVTSNNHVMGKLVCLNMKYCSNLRGLPDMVSLESLKVLYLSGCSELEKIMGFPRNLKKLYVGGTAIRELPQLPNSLEFLNAHGCKHLKSINLDFEQLPRHFIFSNCYRFSSQVIAEFVEKGLVASLARAKQEELIKAPEVIICIPMDTRQRSSFRLQAGRNAMTDLVPWMQKPISGFSMSVVVSFQDDYHNDVGLRIRCVGTWKTWNNQPDRIVERFFQCWAPTEAPKVVADHIFVLYDTKMHPSDSEENHISMWAHEVKFEFHTVSGENNPLGASCKVTECGVEVITAATGDTSVSGIIRESETITIIEKEDTIIDEEDTPLLSRKPEETNRSRSSSELQKLSSTSSKVRSKGNVFWKWLGCFPLQPKNLRSRSRRTTALEEALEEALKEREKLEDTRELQIALIESKKIKKIKQADERDQIKHADEREQRKHSKDHEEEEIESNEKEERRHSKDYVIEELVLKGKGKRKQLDDDKADEKEQIKHSKDHVEEEVNPPLSKCKDCKSAIEDGISINAYGSVWHPQCFCCLRCREPIAMNEISDLRGMYHKPCYKELRHPNCYVCEKKIPRTAEGLKYHEHPFWMETYCPSHDGDGTPKCCSCERLEHCGTQYVMLADFRWLCRECMDSAIMDSDECQPLHFEIREFFEGLHMKIEEEFPVYLVEKNALNKAEKEEKIDKQGDQCLMVVRGICLSEEQIVTSVSQGVRRMLNKQILDTVTESQRVVRKCEVTAILILYGLPRLLTGYILAHEMMHAYLRLNGYRNLNMVLEEGLCQVLGYMWLECQTYVFDTATIASSSSSSRTPLSTTTSKKVDPSDFEKRLVNFCKHQIETDESPFFGDGFRKVNKMMASNNHSLKDTLKEIISISKTPQYSKL

SEQ ID NO: 82650 - protein, 1417 aa, Arabidopsis thaliana
  peptide (1)..(1417): Ceres Seq. ID no. 12666703
MPGIGKTTLAKAVFNHMSTDYDASCFIENFDEAFHKEGLHRLLKERIGKILKDEFDIESSYIMRPTLHRDKLYDKRILVVLDDVRDSLAAESFLKRLDWFGSGSLIIITSVDKQVFAFCQINQIYTVQGLNVHEALQLFSQSVFGINEPEQNDRKLSMKVIDYVNGNPLALSIYGRELMGKKSEMETAFFELKHCPPLKIQDVLKNAYSALSDNEKNIVLDIAFFFKGETVNYVMQLLEESHYFPRLAIDVLVDKCVLTISENTVQMNNLIQDTCQEIFNGEIETCTRMWEPSRIRYLLEYDELEGSGETKAMPKSGLVAEHIESIFLDTSNVKFDVKHDAFKNMFNLKFLKIYNSCSKYISGLNFPKGLDSLPYELRLLHWENYPLQSLPQDFDFGHLVKLSMPYSQLHKLGTRVKDLVMLKRLILSHSLQLVECDILIYAQNIELIDLQGCTGLQRFPDTSQLQNLRVVNLSGCTEIKCFSGVPPNIEELHLQGTRIREIPIFNATHPPKVKLDRKKLWNLLENFSDVEHIDLECVTNLATVTSNNHVMGKLVCLNMKYCSNLRGLPDMVSLESLKVLYLSGCSELEKIMGFPRNLKKLYVGGTAIRELPQLPNSLEFLNAHGCKHLKSINLDFEQLPRHFIFSNCYRFSSQVIAEFVEKGLVASLARAKQEELIKAPEVIICIPMDTRQRSSFRLQAGRNAMTDLVPWMQKPISGFSMSVVVSFQDDYHNDVGLRIRCVGTWKTWNNQPDRIVERFFQCWAPTEAPKVVADHIFVLYDTKMHPSDSEENHISMWAHEVKFEFHTVSGENNPLGASCKVTECGVEVITAATGDTSVSGIIRESETITIIEKEDTIIDEEDTPLLSRKPEETNRSRSSSELQKLSSTSSKVRSKGNVFWKWLGCFPLQPKNLRSRSRRTTALEEALEEALKEREKLEDTRELQIALIESKKIKKIKQADERDQIKHADEREQRKHSKDHEEEEIESNEKEERRHSKDYVIEELVLKGKGKRKQLDDDKADEKEQIKHSKDHVEEEVNPPLSKCKDCKSAIEDGISINAYGSVWHPQCFCCLRCREPIAMNEISDLRGMYHKPCYKELRHPNCYVCEKKIPRTAEGLKYHEHPFWMETYCPSHDGDGTPKCCSCERLEHCGTQYVMLADFRWLCRECMDSAIMDSDECQPLHFEIREFFEGLHMKIEEEFPVYLVEKNALNKAEKEEKIDKQGDQCLMVVRGICLSEEQIVTSVSQGVRRMLNKQILDTVTESQRVVRKCEVTAILILYGLPRLLTGYILAHEMMHAYLRLNGYRNLNMVLEEGLCQVLGYMWLECQTYVFDTATIASSSSSSRTPLSTTTSKKVDPSDFEKRLVNFCKHQIETDESPFFGDGFRKVNKMMASNNHSLKDTLKEIISISKTPQYSKL

SEQ ID NO: 82651 - protein, 1401 aa, Arabidopsis thaliana
  peptide (1)..(1401): Ceres Seq. ID no. 12666704
MSTDYDASCFIENFDEAFHKEGLHRLLKERIGKILKDEFDIESSYIMRPTLHRDKLYDKRILVVLDDVRDSLAAESFLKRLDWFGSGSLIIITSVDKQVFAFCQINQIYTVQGLNVHEALQLFSQSVFGINEPEQNDRKLSMKVIDYVNGNPLALSIYGRELMGKKSEMETAFFELKHCPPLKIQDVLKNAYSALSDNEKNIVLDIAFFFKGETVNYVMQLLEESHYFPRLAIDVLVDKCVLTISENTVQMNNLIQDTCQEIFNGEIETCTRMWEPSRIRYLLEYDELEGSGETKAMPKSGLVAEHIESIFLDTSNVKFDVKHDAFKNMFNLKFLKIYNSCSKYISGLNFPKGLDSLPYELRLLHWENYPLQSLPQDFDFGHLVKLSMPYSQLHKLGTRVKDLVMLKRLILSHSLQLVECDILIYAQNIELIDLQGCTGLQRFPDTSQLQNLRVVNLSGCTEIKCFSGVPPNIEELHLQGTRIREIPIFNATHPPKVKLDRKKLWNLLENFSDVEHIDLECVTNLATVTSNNHVMGKLVCLNMKYCSNLRGLPDMVSLESLKVLYLSGCSELEKIMGFPRNLKKLYVGGTAIRELPQLPNSLEFLNAHGCKHLKSINLDFEQLPRHFIFSNCYRFSSQVIAEFVEKGLVASLARAKQEELIKAPEVIICIPMDTRQRSSFRLQAGRNAMTDLVPWMQKPISGFSMSVVVSFQDDYHNDVGLRIRCVGTWKTWNNQPDRIVERFFQCWAPTEAPKVVADHIFVLYDTKMHPSDSEENHISMWAHEVKFEFHTVSGENNPLGASCKVTECGVEVITAATGDTSVSGIIRESETITIIEKEDTIIDEEDTPLLSRKPEETNRSRSSSELQKLSSTSSKVRSKGNVFWKWLGCFPLQPKNLRSRSRRTTALEEALEEALKEREKLEDTRELQIALIESKKIKKIKQADERDQIKHADEREQRKHSKDHEEEEIESNEKEERRHSKDYVIEELVLKGKGKRKQLDDDKADEKEQIKHSKDHVEEEVNPPLSKCKDCKSAIEDGISINAYGSVWHPQCFCCLRCREPIAMNEISDLRGMYHKPCYKELRHPNCYVCEKKIPRTAEGLKYHEHPFWMETYCPSHDGDGTPKCCSCERLEHCGTQYVMLADFRWLCRECMDSAIMDSDECQPLHFEIREFFEGLHMKIEEEFPVYLVEKNALNKAEKEEKIDKQGDQCLMVVRGICLSEEQIVTSVSQGVRRMLNKQILDTVTESQRVVRKCEVTAILILYGLPRLLTGYILAHEMMHAYLRLNGYRNLNMVLEEGLCQVLGYMWLECQTYVFDTATIASSSSSSRTPLSTTTSKKVDPSDFEKRLVNFCKHQIETDESPFFGDGFRKVNKMMASNNHSLKDTLKEIISISKTPQYSKL

SEQ ID NO: 82652 - DNA, 570 bp, Arabidopsis thaliana
  misc_feature (1)..(570): Ceres Seq. ID no. 12666741
  misc_feature (1)..(570): Ortholog of  Ceres SEQ ID NO 12611019 as cited in SEQ ID NO 56243
atgagaccaccacgtggcggcggcagcttcaggggaaggggaggaagagataacggcggacgtggacgtggacgtggacgtggacgtggacgctttggtggtggtaattatgacgaaggacctcccagcgaagtcgttgaagttgcaacttttctccatgcttgtgagggagatgctgtgttcaagctctccaatgtgaaaatcccacatttcaatgccccaatctacctacaaaacaagacccagattgggagagtagatgaaatctttggtcctattaatgaatctctattttctatcaaaatgagggaaggtattgtagctacctcatatagtcaaggcgataagttcttcattagccctgagaagcttttacctctatcaagattccttcctcaaccaaagggacaatcaggaggccgtggtgaaggaagagtccctccccgtggtagagggcctccccgtggtagaggcaatttcagaggtagaggtgctcccagaggtgctagcagagggtttcaaccaagaggtggtcctcgtggaggcttcagaggccgagggagggcctag

SEQ ID NO: 82653 - protein, 189 aa, Arabidopsis thaliana
  peptide (1)..(189): Ceres Seq. ID no. 12666742
MRPPRGGGSFRGRGGRDNGGRGRGRGRGRGRFGGGNYDEGPPSEVVEVATFLHACEGDAVFKLSNVKIPHFNAPIYLQNKTQIGRVDEIFGPINESLFSIKMREGIVATSYSQGDKFFISPEKLLPLSRFLPQPKGQSGGRGEGRVPPRGRGPPRGRGNFRGRGAPRGASRGFQPRGGPRGGFRGRGRA

SEQ ID NO: 82654 - DNA, 1467 bp, Arabidopsis thaliana
  misc_feature (1)..(1467): Ceres Seq. ID no. 12666749
  misc_feature (1)..(1467): Ortholog of  Ceres SEQ ID NO 13596816 as cited in SEQ ID NO 62287
atgagtaaccgacggaaacagagcaccactgccggcatcttcctctgcatcaccatagtatctttattatccggcgacgtctccgccttgggagtaaactggggaacgatgtcaactcaccagctccctccaaagacggtggtacagatgttaaaagacaacaacgtcaaaaaagtgaagcttttcgatgcggacacaaacaccatggtagctcttgccggctctggtatcgaagttatggttgcaatccctaacgatcagctcaaagccatgggaagttataacagagctaaagattgggttcgaagaaacatcactcgtttcaatgacgatgttaaaatcaaatatgtcgccgttggaaatgagccgtttttgacagcttataatggatcattcataaacttaacttatccagcactcttcaacatccaaaaagcattaaacgaagctggagttggagatttcatcaaagccaccgtacctttaaacgctgacgtctataattctccgctggaaaatccagttccttctgccggaagtttccgtcaagacatctttgaagagatgaaactaatagtcaacttcttagctcataacaaagctcccttcactgtcaacatttaccctttcctaagtctttaccttagcagcgatttcccttttgactatgccttcttcaatggccaaaacactgtcagcgataacggcgttatctatacaaatgttttcgacgccaatttcgataccctcttggcttcacttaaagctttgggtcatggagacatgactgttatagttggagaagttggttggccaacggatggtgacaagaatgctaacatcccaaacgcagaacgcttctacacaggtttgcttccaaagctagcagccaacagaggaacacctatgcgtccgggttacattgaagtttatctctttggattcatcgatgaagatgcaaagagtatagctcctggtaactttgaacgtcactgggggatattcaaatacgatggccaaccgaaatttccagcggatttgtcaggagcaggtcagaagaagatcttaaccggagctcaaaatgttcagtacttgcgaaaccagtggtgtatgttcaaccctaatgccctcactttcagcaacaacactaaccagctcggggataacgtaaactacgcatgtaccttctccgactgcacagctttgggctatggttcctcttgtggtaatcttgatgaggtcgggaatgcctcgtatgcattcaacatgtattttcaggtacagaatcaaaaggcagaggcttgtgactttgagggccttgcaattatcactaccaggaatatttctcgagaacagtgtaattttcctattcaaatcggagatccaacatccggacatagtgatcataaccaccggtttatcagcttctctctggtgagtatgttgctactctttacagcactatga

SEQ ID NO: 82655 - protein, 488 aa, Arabidopsis thaliana
  peptide (1)..(488): Ceres Seq. ID no. 12666750
MSNRRKQSTTAGIFLCITIVSLLSGDVSALGVNWGTMSTHQLPPKTVVQMLKDNNVKKVKLFDADTNTMVALAGSGIEVMVAIPNDQLKAMGSYNRAKDWVRRNITRFNDDVKIKYVAVGNEPFLTAYNGSFINLTYPALFNIQKALNEAGVGDFIKATVPLNADVYNSPLENPVPSAGSFRQDIFEEMKLIVNFLAHNKAPFTVNIYPFLSLYLSSDFPFDYAFFNGQNTVSDNGVIYTNVFDANFDTLLASLKALGHGDMTVIVGEVGWPTDGDKNANIPNAERFYTGLLPKLAANRGTPMRPGYIEVYLFGFIDEDAKSIAPGNFERHWGIFKYDGQPKFPADLSGAGQKKILTGAQNVQYLRNQWCMFNPNALTFSNNTNQLGDNVNYACTFSDCTALGYGSSCGNLDEVGNASYAFNMYFQVQNQKAEACDFEGLAIITTRNISREQCNFPIQIGDPTSGHSDHNHRFISFSLVSMLLLFTAL

SEQ ID NO: 82656 - protein, 452 aa, Arabidopsis thaliana
  peptide (1)..(452): Ceres Seq. ID no. 12666751
MSTHQLPPKTVVQMLKDNNVKKVKLFDADTNTMVALAGSGIEVMVAIPNDQLKAMGSYNRAKDWVRRNITRFNDDVKIKYVAVGNEPFLTAYNGSFINLTYPALFNIQKALNEAGVGDFIKATVPLNADVYNSPLENPVPSAGSFRQDIFEEMKLIVNFLAHNKAPFTVNIYPFLSLYLSSDFPFDYAFFNGQNTVSDNGVIYTNVFDANFDTLLASLKALGHGDMTVIVGEVGWPTDGDKNANIPNAERFYTGLLPKLAANRGTPMRPGYIEVYLFGFIDEDAKSIAPGNFERHWGIFKYDGQPKFPADLSGAGQKKILTGAQNVQYLRNQWCMFNPNALTFSNNTNQLGDNVNYACTFSDCTALGYGSSCGNLDEVGNASYAFNMYFQVQNQKAEACDFEGLAIITTRNISREQCNFPIQIGDPTSGHSDHNHRFISFSLVSMLLLFTAL

SEQ ID NO: 82657 - protein, 439 aa, Arabidopsis thaliana
  peptide (1)..(439): Ceres Seq. ID no. 12666752
MLKDNNVKKVKLFDADTNTMVALAGSGIEVMVAIPNDQLKAMGSYNRAKDWVRRNITRFNDDVKIKYVAVGNEPFLTAYNGSFINLTYPALFNIQKALNEAGVGDFIKATVPLNADVYNSPLENPVPSAGSFRQDIFEEMKLIVNFLAHNKAPFTVNIYPFLSLYLSSDFPFDYAFFNGQNTVSDNGVIYTNVFDANFDTLLASLKALGHGDMTVIVGEVGWPTDGDKNANIPNAERFYTGLLPKLAANRGTPMRPGYIEVYLFGFIDEDAKSIAPGNFERHWGIFKYDGQPKFPADLSGAGQKKILTGAQNVQYLRNQWCMFNPNALTFSNNTNQLGDNVNYACTFSDCTALGYGSSCGNLDEVGNASYAFNMYFQVQNQKAEACDFEGLAIITTRNISREQCNFPIQIGDPTSGHSDHNHRFISFSLVSMLLLFTAL

SEQ ID NO: 82658 - DNA, 1528 bp, Arabidopsis thaliana
  misc_feature (1)..(1528): Ceres Seq. ID no. 12666753
  misc_feature (1)..(1528): Ortholog of  Ceres SEQ ID NO 14311981 as cited in SEQ ID NO 55703
  misc_feature (1)..(1528): Ortholog of  Ceres SEQ ID NO 15226227 as cited in SEQ ID NO 63433
  misc_feature (1)..(1528): Ortholog of  Ceres SEQ ID NO 13599003 as cited in SEQ ID NO 0
gagagaccccggcctgagaaaaagagcataaataaggaaagcagcaaagacatcttcccaagttggtggagttgcaaaccatagtgtatctctgaactgagagtagcaggttgcaattaaaaactaaagattgtgtcagacagacttatgtattaccacaaccagcaccaaggaaagagcatcctctcttcatcgagaatgcccatttcttctgaaaggcatccgttcctcagaggaaatggcacaggagattctggactcattctctccactgatgcaaagccacgactaaaatggactccagatcttcacgagagatttgttgaagcggtcaaccagcttggaggaggagataaggctactcctaagacaatcatgaaagtcatgggcattccaggccttaccttataccatctcaagagtcatcttcagaaatataggctaagcaagaatcttaatggacaagctaacagcagtttaaacaagacaagtgtgatgaccatggtagaagaaaacccccctgaagtagacgaaagtcacagtgagagtttaagcattggaccacagccgagcatgaacttacccataagtgatgcccttcaaatgcaaatagaggtccagagacggctacacgagcaacttgaggtacagcgacatttgcagctcaggatagaggctcaaggaaagtacctgcaatcgattctggagaaagcacaagagactcttggaagacagaacctaggtgcagctgggattgaagcaacaaaagctcaactctcagaattagtatctaaagtatcagcagactatccagactctagtttcctcgaaccgaaagaactgcagaatctacaccatcaacagatgcaaaaaacgtatccacctaactcctccctggacagttgcctaacctcaagtgaaggaactcagaaagccccaaagatgcttgacaacagactgggattaagaacatatattggagattcaacttcagagcagaaagagataatggaagagccattcttccatagaatggagctcacatgggcagaagaagaaagcctcagagagaatcacaacaggccatatctttcaacaatggttaacaacgcagaaccgagaatctcgtcttcaagaagaagtcctggaagattgtcaataggagtgggattacatgaacacagaggaaggagtagcaacaacagtgagtatacagaagaaagattcaacgagaataatgaagattgcaagcttgaaacacacacaagaacagctctagatcttaacacacacgacgaaaactatggcacaacgcgtcctaaacagtttgatttaaatggtttcagctggaattgagaagaacaaataagctttagaagagtgcaacaacctttttatgataatcacacaggaaatgaaaagcctttgatttcctttgttagcttgagggattcgtctaaaaattgaattattagtcgaactcaaaagagacatcttgtgcaacaatgtacaacactattaatttgcg

SEQ ID NO: 82659 - protein, 402 aa, Arabidopsis thaliana
  peptide (1)..(402): Ceres Seq. ID no. 12666754
MYYHNQHQGKSILSSSRMPISSERHPFLRGNGTGDSGLILSTDAKPRLKWTPDLHERFVEAVNQLGGGDKATPKTIMKVMGIPGLTLYHLKSHLQKYRLSKNLNGQANSSLNKTSVMTMVEENPPEVDESHSESLSIGPQPSMNLPISDALQMQIEVQRRLHEQLEVQRHLQLRIEAQGKYLQSILEKAQETLGRQNLGAAGIEATKAQLSELVSKVSADYPDSSFLEPKELQNLHHQQMQKTYPPNSSLDSCLTSSEGTQKAPKMLDNRLGLRTYIGDSTSEQKEIMEEPFFHRMELTWAEEESLRENHNRPYLSTMVNNAEPRISSSRRSPGRLSIGVGLHEHRGRSSNNSEYTEERFNENNEDCKLETHTRTALDLNTHDENYGTTRPKQFDLNGFSWN

SEQ ID NO: 82660 - protein, 385 aa, Arabidopsis thaliana
  peptide (1)..(385): Ceres Seq. ID no. 12666755
MPISSERHPFLRGNGTGDSGLILSTDAKPRLKWTPDLHERFVEAVNQLGGGDKATPKTIMKVMGIPGLTLYHLKSHLQKYRLSKNLNGQANSSLNKTSVMTMVEENPPEVDESHSESLSIGPQPSMNLPISDALQMQIEVQRRLHEQLEVQRHLQLRIEAQGKYLQSILEKAQETLGRQNLGAAGIEATKAQLSELVSKVSADYPDSSFLEPKELQNLHHQQMQKTYPPNSSLDSCLTSSEGTQKAPKMLDNRLGLRTYIGDSTSEQKEIMEEPFFHRMELTWAEEESLRENHNRPYLSTMVNNAEPRISSSRRSPGRLSIGVGLHEHRGRSSNNSEYTEERFNENNEDCKLETHTRTALDLNTHDENYGTTRPKQFDLNGFSWN

SEQ ID NO: 82661 - protein, 326 aa, Arabidopsis thaliana
  peptide (1)..(326): Ceres Seq. ID no. 12666756
MKVMGIPGLTLYHLKSHLQKYRLSKNLNGQANSSLNKTSVMTMVEENPPEVDESHSESLSIGPQPSMNLPISDALQMQIEVQRRLHEQLEVQRHLQLRIEAQGKYLQSILEKAQETLGRQNLGAAGIEATKAQLSELVSKVSADYPDSSFLEPKELQNLHHQQMQKTYPPNSSLDSCLTSSEGTQKAPKMLDNRLGLRTYIGDSTSEQKEIMEEPFFHRMELTWAEEESLRENHNRPYLSTMVNNAEPRISSSRRSPGRLSIGVGLHEHRGRSSNNSEYTEERFNENNEDCKLETHTRTALDLNTHDENYGTTRPKQFDLNGFSWN

SEQ ID NO: 82662 - DNA, 1599 bp, Arabidopsis thaliana
  misc_feature (1)..(1599): Ceres Seq. ID no. 12666794
  misc_feature (1)..(1599): Ortholog of  Ceres SEQ ID NO 14311131 as cited in SEQ ID NO 53729
  misc_feature (1)..(1599): Ortholog of  Ceres SEQ ID NO 13594037 as cited in SEQ ID NO 55666
  misc_feature (1)..(1599): Ortholog of  Ceres SEQ ID NO 13657707 as cited in SEQ ID NO 66407
atgataaataatcatccaattagagaaaaaccaaaacacattattttcaacttactgtcactaatctttttcctaatcttcttatccaccgttgtttcatctcaatcaccatcatacaccactcacaaaacccagcgtttaaccgaaaccaaaaccatccccgagcttatcatcgcggacttaaacctaaccatcttaaaggttaatctcgcttcctccaacttctccgacctccaaacccgtctttttccaaacctaacccactatgaacgttgcgcattcgaagactgtctcgggctactcgatgacaccatctccgacctcgaaaccgcagtctccgatcttcgatcttcctctcttgagttcaacgacatcagcatgttgctcaccaacgtcatgacataccaagatacgtgtcttgatggtttctcgacaagtgacaatgagaataataatgatatgacgtatgaattgcctgagaacttgaaggagatcatcttagacatctctaacaaccttagcaactccctccatatgcttcaggtgatttccaggaagaaaccttccccgaaatcatcagaagttgacgttgagtacccgagttggctctcagagaatgaccagagactccttgaggctccggtacaagagaccaattacaatctctcggtggcgattgatggtaccggaaacttcacaaccattaatgatgccgtctttgctgctcccaacatgagcgaaactagatttattatctatataaaaggtggggaatattttgagaacgtcgaattacctaagaagaagacaatgataatgtttatcggagatggtatcggaaaaacagtcataaaagcaaaccgcagccgcattgatggatggtcaacatttcaaactcctaccgtaggcgtgaaaggtaaaggctacatagcaaaggacatatcattcgtgaattctgcaggaccggccaaagcacaggctgtggcctttcgaagcggctctgatcactctgccttttaccgttgtgagttcgatggttaccaagacaccctttatgttcattcagccaaacaattttatcgagaatgcgatatatatggtacaatcgatttcatattcggcaatgcggctgttgtgttccagaatagtagtctttatgctcgtaaacctaatcctggacataaaattgcattcaccgctcaaagccgcaatcagtcggaccagcccacgggtatatctatacttaattgtagaatcttggccgcacctgatttgatccctgtgaaagaaaacttcaaggcgtacttaggtcgaccatggagaaaatattctaggacggttatcataaaatcatttattgatgatcttatacatcccgctggatggttggaggggaaaaaagattttgcacttgaaactttatattatggagagtatatgaatgaagggcctggggcaaacatggcaaagcgagtcacatggcctggttttagacgcatcgaaaaccaaacggaggctacccaattcacagtcggtccatttatcgacggtagcacatggctaaattcaactggcatcccttttagtcttggtttctaa

SEQ ID NO: 82663 - protein, 532 aa, Arabidopsis thaliana
  peptide (1)..(532): Ceres Seq. ID no. 12666795
MINNHPIREKPKHIIFNLLSLIFFLIFLSTVVSSQSPSYTTHKTQRLTETKTIPELIIADLNLTILKVNLASSNFSDLQTRLFPNLTHYERCAFEDCLGLLDDTISDLETAVSDLRSSSLEFNDISMLLTNVMTYQDTCLDGFSTSDNENNNDMTYELPENLKEIILDISNNLSNSLHMLQVISRKKPSPKSSEVDVEYPSWLSENDQRLLEAPVQETNYNLSVAIDGTGNFTTINDAVFAAPNMSETRFIIYIKGGEYFENVELPKKKTMIMFIGDGIGKTVIKANRSRIDGWSTFQTPTVGVKGKGYIAKDISFVNSAGPAKAQAVAFRSGSDHSAFYRCEFDGYQDTLYVHSAKQFYRECDIYGTIDFIFGNAAVVFQNSSLYARKPNPGHKIAFTAQSRNQSDQPTGISILNCRILAAPDLIPVKENFKAYLGRPWRKYSRTVIIKSFIDDLIHPAGWLEGKKDFALETLYYGEYMNEGPGANMAKRVTWPGFRRIENQTEATQFTVGPFIDGSTWLNSTGIPFSLGF

SEQ ID NO: 82664 - protein, 406 aa, Arabidopsis thaliana
  peptide (1)..(406): Ceres Seq. ID no. 12666796
MLLTNVMTYQDTCLDGFSTSDNENNNDMTYELPENLKEIILDISNNLSNSLHMLQVISRKKPSPKSSEVDVEYPSWLSENDQRLLEAPVQETNYNLSVAIDGTGNFTTINDAVFAAPNMSETRFIIYIKGGEYFENVELPKKKTMIMFIGDGIGKTVIKANRSRIDGWSTFQTPTVGVKGKGYIAKDISFVNSAGPAKAQAVAFRSGSDHSAFYRCEFDGYQDTLYVHSAKQFYRECDIYGTIDFIFGNAAVVFQNSSLYARKPNPGHKIAFTAQSRNQSDQPTGISILNCRILAAPDLIPVKENFKAYLGRPWRKYSRTVIIKSFIDDLIHPAGWLEGKKDFALETLYYGEYMNEGPGANMAKRVTWPGFRRIENQTEATQFTVGPFIDGSTWLNSTGIPFSLGF

SEQ ID NO: 82665 - protein, 400 aa, Arabidopsis thaliana
  peptide (1)..(400): Ceres Seq. ID no. 12666797
MTYQDTCLDGFSTSDNENNNDMTYELPENLKEIILDISNNLSNSLHMLQVISRKKPSPKSSEVDVEYPSWLSENDQRLLEAPVQETNYNLSVAIDGTGNFTTINDAVFAAPNMSETRFIIYIKGGEYFENVELPKKKTMIMFIGDGIGKTVIKANRSRIDGWSTFQTPTVGVKGKGYIAKDISFVNSAGPAKAQAVAFRSGSDHSAFYRCEFDGYQDTLYVHSAKQFYRECDIYGTIDFIFGNAAVVFQNSSLYARKPNPGHKIAFTAQSRNQSDQPTGISILNCRILAAPDLIPVKENFKAYLGRPWRKYSRTVIIKSFIDDLIHPAGWLEGKKDFALETLYYGEYMNEGPGANMAKRVTWPGFRRIENQTEATQFTVGPFIDGSTWLNSTGIPFSLGF

SEQ ID NO: 82666 - DNA, 1894 bp, Arabidopsis thaliana
  misc_feature (1)..(1894): Ceres Seq. ID no. 12666802
  misc_feature (1)..(1894): Ortholog of  Ceres SEQ ID NO 14311131 as cited in SEQ ID NO 53729
  misc_feature (1)..(1894): Ortholog of  Ceres SEQ ID NO 13594037 as cited in SEQ ID NO 55666
  misc_feature (1)..(1894): Ortholog of  Ceres SEQ ID NO 13657707 as cited in SEQ ID NO 66407
aaacttttccaaaatcataccaaaaaaacatttagtaacatcaaaatttacaaaaaacaaaaaaacatgctatctctcaaactcttcctcgtaacactcttcttatctcttcaaacactcttcattgcttctcaaactcttcttccttcaaactcttcatcaaccatatgcaaaacaacacccgatccaaaattctgcaaatcagtgttcccacaaacatctcaaggcgacgttcgcgaatacggccgcttctccctccgcaaatcgctaacgcaatcgcggaaattcacacgcaccattgacagatacctcaaacgcaacaatgcactattatctcaatccgccgttggagctctccaagactgccgttacctagcaagcctcacaacagactatctcataacatcgttcgagacggtcaatatcactacatcatccaaaacgttgtcgttttccaaagccgacgaaatccaaacacttctctccgcggctttgactaacgagcaaacatgtcttgatggaatcaacaccgccgcttcctcttcatggactatacgaaacggtgtcgcattgcctctaatcaacgacacgaagctctttagtgtctcgctcgcattattcaccaaaggttgggttccaaagaagaagaaacaagtagccagttactcttgggcccatccaaagaacactcacagtcacacaaaaccattccgtcatttccgtaacggagctttaccgttaaagatgacggaacacacacgcgccgtttacgagtctttaagcaggaggaaactcgctgacgacgataatgacgtaaacacggtgcttgtaagcgacatcgtaacggtgaaccaaaacggaacggggaatttcacgaccataacggaagctgttaattcggcgccgaataaaactgacggtaccgccggttatttcgttatctacgtgacgtcaggtgtttatgaggaaaacgtagtgattgccaaaaacaaaagatatctaatgatgattggtgacggaataaaccgtacggtggttaccggtaaccggaatgtcgtcgacggttggaccactttcaactccgccacttttgctgttacatcgccgaacttcgttgccgtgaacatgactttccgaaataccgctggaccagagaagcaccaggccgtagctatgaggagcagtgcagatctttcaatcttctatagttgcagtttcgaagcttatcaagacactttatacacacattcactaagacagttctatagagaatgtgacatttatggaacagtcgatttcatattcggcaatgcagctgttgtgttccaagactgtaatctctatccaagacaaccgatgcagaaccagttcaacgctattacagctcaaggtcgtactgatccgaatcaaaacacgggaatttcgattcacaattgtacgattaaaccggcagatgatttggtttcgagtaactatacggttaaaacgtatttgggacgaccatggaaggagtattcacgtacggtttttatgcaatcgtacatagacgaggttgttgaaccggttggttggagagaatggaacggagatttcgcattgagtacgttgtactatgctgagtataacaataccggttccggttcaagtactacagatcgagtggtttggcccggttatcatgtgattaattctacggatgcgaataatttcacagtcgagaatttcttgttaggagatggttggatggttcagagtggtgtaccttatattagtggtttactttcgtaatttcttgtatctgattatttgttttagctattattatgggtaaattttggtcttaattttggtccattgttgtaatttggaacattctttaataaaataaagatct

SEQ ID NO: 82667 - protein, 595 aa, Arabidopsis thaliana
  peptide (1)..(595): Ceres Seq. ID no. 12666803
KLFQNHTKKTFSNIKIYKKQKNMLSLKLFLVTLFLSLQTLFIASQTLLPSNSSSTICKTTPDPKFCKSVFPQTSQGDVREYGRFSLRKSLTQSRKFTRTIDRYLKRNNALLSQSAVGALQDCRYLASLTTDYLITSFETVNITTSSKTLSFSKADEIQTLLSAALTNEQTCLDGINTAASSSWTIRNGVALPLINDTKLFSVSLALFTKGWVPKKKKQVASYSWAHPKNTHSHTKPFRHFRNGALPLKMTEHTRAVYESLSRRKLADDDNDVNTVLVSDIVTVNQNGTGNFTTITEAVNSAPNKTDGTAGYFVIYVTSGVYEENVVIAKNKRYLMMIGDGINRTVVTGNRNVVDGWTTFNSATFAVTSPNFVAVNMTFRNTAGPEKHQAVAMRSSADLSIFYSCSFEAYQDTLYTHSLRQFYRECDIYGTVDFIFGNAAVVFQDCNLYPRQPMQNQFNAITAQGRTDPNQNTGISIHNCTIKPADDLVSSNYTVKTYLGRPWKEYSRTVFMQSYIDEVVEPVGWREWNGDFALSTLYYAEYNNTGSGSSTTDRVVWPGYHVINSTDANNFTVENFLLGDGWMVQSGVPYISGLLS

SEQ ID NO: 82668 - protein, 573 aa, Arabidopsis thaliana
  peptide (1)..(573): Ceres Seq. ID no. 12666804
MLSLKLFLVTLFLSLQTLFIASQTLLPSNSSSTICKTTPDPKFCKSVFPQTSQGDVREYGRFSLRKSLTQSRKFTRTIDRYLKRNNALLSQSAVGALQDCRYLASLTTDYLITSFETVNITTSSKTLSFSKADEIQTLLSAALTNEQTCLDGINTAASSSWTIRNGVALPLINDTKLFSVSLALFTKGWVPKKKKQVASYSWAHPKNTHSHTKPFRHFRNGALPLKMTEHTRAVYESLSRRKLADDDNDVNTVLVSDIVTVNQNGTGNFTTITEAVNSAPNKTDGTAGYFVIYVTSGVYEENVVIAKNKRYLMMIGDGINRTVVTGNRNVVDGWTTFNSATFAVTSPNFVAVNMTFRNTAGPEKHQAVAMRSSADLSIFYSCSFEAYQDTLYTHSLRQFYRECDIYGTVDFIFGNAAVVFQDCNLYPRQPMQNQFNAITAQGRTDPNQNTGISIHNCTIKPADDLVSSNYTVKTYLGRPWKEYSRTVFMQSYIDEVVEPVGWREWNGDFALSTLYYAEYNNTGSGSSTTDRVVWPGYHVINSTDANNFTVENFLLGDGWMVQSGVPYISGLLS

SEQ ID NO: 82669 - protein, 347 aa, Arabidopsis thaliana
  peptide (1)..(347): Ceres Seq. ID no. 12666805
MTEHTRAVYESLSRRKLADDDNDVNTVLVSDIVTVNQNGTGNFTTITEAVNSAPNKTDGTAGYFVIYVTSGVYEENVVIAKNKRYLMMIGDGINRTVVTGNRNVVDGWTTFNSATFAVTSPNFVAVNMTFRNTAGPEKHQAVAMRSSADLSIFYSCSFEAYQDTLYTHSLRQFYRECDIYGTVDFIFGNAAVVFQDCNLYPRQPMQNQFNAITAQGRTDPNQNTGISIHNCTIKPADDLVSSNYTVKTYLGRPWKEYSRTVFMQSYIDEVVEPVGWREWNGDFALSTLYYAEYNNTGSGSSTTDRVVWPGYHVINSTDANNFTVENFLLGDGWMVQSGVPYISGLLS

SEQ ID NO: 82670 - DNA, 465 bp, Arabidopsis thaliana
  misc_feature (1)..(465): Ceres Seq. ID no. 12666806
  misc_feature (1)..(465): Ortholog of  Ceres SEQ ID NO 12609656 as cited in SEQ ID NO 51891
  misc_feature (1)..(465): Ortholog of  Ceres SEQ ID NO 13664337 as cited in SEQ ID NO 61267
  misc_feature (1)..(465): Ortholog of  Ceres SEQ ID NO 15224278 as cited in SEQ ID NO 63590
  misc_feature (1)..(465): Ortholog of  Ceres SEQ ID NO 12635152 as cited in SEQ ID NO 0
atgtcgctagacgcgaatacttgttctatcgtcttctttctattcttcactgtctctttcgccgtctccggccaaaagccaaccgcttacgacgccgtcaaactctataacttaccaccaggaatcctcccaaaaggagtggttgactatgagcttaacccaaaaacaggcaacttcaaagtctacttcaatgacacgtgtgaattcaccatccaatcctaccagctcaagtacaaatcaactatctccggcgttatatcacccggtcatgtcaagaatctgaaaggagttagtgttaaggttcttttcttctgggttaatattgctgaagtgtctcttgacggcgccgatctcgacttctccgtcggaatcgcgtcggcgagttttccggctgctaattttgaagagagtcctcagtgtggttgtgggtttgattgtaataatgggcttttattttcttcttga

SEQ ID NO: 82671 - protein, 154 aa, Arabidopsis thaliana
  peptide (1)..(154): Ceres Seq. ID no. 12666807
MSLDANTCSIVFFLFFTVSFAVSGQKPTAYDAVKLYNLPPGILPKGVVDYELNPKTGNFKVYFNDTCEFTIQSYQLKYKSTISGVISPGHVKNLKGVSVKVLFFWVNIAEVSLDGADLDFSVGIASASFPAANFEESPQCGCGFDCNNGLLFSS

SEQ ID NO: 82672 - DNA, 2184 bp, Arabidopsis thaliana
  misc_feature (1)..(2184): Ceres Seq. ID no. 12666808
  misc_feature (1)..(2184): Ortholog of  Ceres SEQ ID NO 13655640 as cited in SEQ ID NO 63844
aataatatctaaaccaaaagccaaaacacacaaaaacagagccatgttcttcaagctctttaccatcttcttcttcttcatcatcctactctctaaacccctaaactcctcttctcaaagtctcaacttcacttacaatagcttccatcgtccaccaactaacatatccatccaaggaattgccacagtcacatccaacggtatcttgaagctaacagacaaaacggttataagtacaggtcacgctttctacaccgaaccaatccggtttaaagattcaccaaacgatactgtctcgtccttctcaacaaccttcgtcatcggtatctactctgggatcccgacaattagcggccatggcatggcctttttcatcgctcctaaccccgtcctctcatcagccatggctagccaataccttggtctcttcagcagcaccaacaacggtaacgatacgaatcatatactcgctgtcgaatttgatacgatcatgaaccctgagtttgatgatacgaacgataaccatgtgggaatcaatataaatagtttgacctcggttaaaagctcgctggttgggtattgggatgagatcaatcagtttaataatctgactttgataagtcgtaaacggatgcaagtttgggttgactatgatgatcgtactaatcaaatcgatgtaactatggctccgtttggtgaggttaaacctaggaaagcgcttgtttctgttgttagagatctatcttctgttttcttgcaagacatgtacttaggtttctcggctgcgactggttatgttctgtcagaacattttgtttttgggtggagtttcatggtgaaagggaagacagctccgccgttgactttatcgaaagttccgaagtttccgagggtcgggccaacgagtttacagaggttttataagaacaggatgccgttattttccctcttgttgattccggtcttgtttgttgtctcgctcatcttcctcgtgcgctttatcgtgaggaggaggagaaagttcgcggaggagttcgaagattgggaaacagagtttgggaagaaccggttaaggtttaaggacttgtactatgctacaaaagggttcaaggataaggaccttcttggatcgggtgggtttggtagggtttatagaggtgtcatgccgacaacgaagaaagagatcgcggtgaagagagtgtcgaatgaatctcgacaagggttgaaagagtttgttgctgagattgtgagtattggtaggatgagtcatcggaacttagttcctctcttgggttattgtcgtcgtagagacgagcttcttttggtgtatgattacatgcctaatggtagcttagacaagtatttgtacgattgtcctgaggtaacacttgattggaaacagaggtttaatgtaattataggtgtggcctctggcttattctatctccacgaggaatgggaacaagtggtgattcaccgcgacatcaaagccagcaacgttttgttagacgcggagtacaacggaagactcggggattttggtttagctcggttgtgcgatcacggttcggatcctcaaactacgcgtgttgttggaacttggggatacctagccccggatcatgtcagaacaggacgggccacaaccgctactgatgtttttgcgtttggggtgctcctactagaagtggcttgcggtaggcgacctatagagattgagatcgagagtgatgagagcgtgttgctagtggattcggtttttggtttttggatagagggaaacatcttggatgctacggatccgaatctaggatcggtctatgaccaaagagaagtcgaaacggtattgaagctagggttgttatgctctcactccgacccacaagttagaccaacaatgagacaagtgctacagtatctaaggggagatgcaacgttaccagatttgtcgccgttggacttccgtgggagtgggaaaatgttgggaatgaaccacagatttagtgagtcatgcacattttccagtggatcttcgattgcttattctatagtctctggcgggaggtgattttggaatattagaacatgtatatgtcttacatagttacattacatatgtagaaagaatgtttttgcacatgatagagaccatgttgatatatatcattgaaactttattgaccg

SEQ ID NO: 82673 - protein, 688 aa, Arabidopsis thaliana
  peptide (1)..(688): Ceres Seq. ID no. 12666809
IISKPKAKTHKNRAMFFKLFTIFFFFIILLSKPLNSSSQSLNFTYNSFHRPPTNISIQGIATVTSNGILKLTDKTVISTGHAFYTEPIRFKDSPNDTVSSFSTTFVIGIYSGIPTISGHGMAFFIAPNPVLSSAMASQYLGLFSSTNNGNDTNHILAVEFDTIMNPEFDDTNDNHVGININSLTSVKSSLVGYWDEINQFNNLTLISRKRMQVWVDYDDRTNQIDVTMAPFGEVKPRKALVSVVRDLSSVFLQDMYLGFSAATGYVLSEHFVFGWSFMVKGKTAPPLTLSKVPKFPRVGPTSLQRFYKNRMPLFSLLLIPVLFVVSLIFLVRFIVRRRRKFAEEFEDWETEFGKNRLRFKDLYYATKGFKDKDLLGSGGFGRVYRGVMPTTKKEIAVKRVSNESRQGLKEFVAEIVSIGRMSHRNLVPLLGYCRRRDELLLVYDYMPNGSLDKYLYDCPEVTLDWKQRFNVIIGVASGLFYLHEEWEQVVIHRDIKASNVLLDAEYNGRLGDFGLARLCDHGSDPQTTRVVGTWGYLAPDHVRTGRATTATDVFAFGVLLLEVACGRRPIEIEIESDESVLLVDSVFGFWIEGNILDATDPNLGSVYDQREVETVLKLGLLCSHSDPQVRPTMRQVLQYLRGDATLPDLSPLDFRGSGKMLGMNHRFSESCTFSSGSSIAYSIVSGGR

SEQ ID NO: 82674 - protein, 674 aa, Arabidopsis thaliana
  peptide (1)..(674): Ceres Seq. ID no. 12666810
MFFKLFTIFFFFIILLSKPLNSSSQSLNFTYNSFHRPPTNISIQGIATVTSNGILKLTDKTVISTGHAFYTEPIRFKDSPNDTVSSFSTTFVIGIYSGIPTISGHGMAFFIAPNPVLSSAMASQYLGLFSSTNNGNDTNHILAVEFDTIMNPEFDDTNDNHVGININSLTSVKSSLVGYWDEINQFNNLTLISRKRMQVWVDYDDRTNQIDVTMAPFGEVKPRKALVSVVRDLSSVFLQDMYLGFSAATGYVLSEHFVFGWSFMVKGKTAPPLTLSKVPKFPRVGPTSLQRFYKNRMPLFSLLLIPVLFVVSLIFLVRFIVRRRRKFAEEFEDWETEFGKNRLRFKDLYYATKGFKDKDLLGSGGFGRVYRGVMPTTKKEIAVKRVSNESRQGLKEFVAEIVSIGRMSHRNLVPLLGYCRRRDELLLVYDYMPNGSLDKYLYDCPEVTLDWKQRFNVIIGVASGLFYLHEEWEQVVIHRDIKASNVLLDAEYNGRLGDFGLARLCDHGSDPQTTRVVGTWGYLAPDHVRTGRATTATDVFAFGVLLLEVACGRRPIEIEIESDESVLLVDSVFGFWIEGNILDATDPNLGSVYDQREVETVLKLGLLCSHSDPQVRPTMRQVLQYLRGDATLPDLSPLDFRGSGKMLGMNHRFSESCTFSSGSSIAYSIVSGGR

SEQ ID NO: 82675 - protein, 568 aa, Arabidopsis thaliana
  peptide (1)..(568): Ceres Seq. ID no. 12666811
MAFFIAPNPVLSSAMASQYLGLFSSTNNGNDTNHILAVEFDTIMNPEFDDTNDNHVGININSLTSVKSSLVGYWDEINQFNNLTLISRKRMQVWVDYDDRTNQIDVTMAPFGEVKPRKALVSVVRDLSSVFLQDMYLGFSAATGYVLSEHFVFGWSFMVKGKTAPPLTLSKVPKFPRVGPTSLQRFYKNRMPLFSLLLIPVLFVVSLIFLVRFIVRRRRKFAEEFEDWETEFGKNRLRFKDLYYATKGFKDKDLLGSGGFGRVYRGVMPTTKKEIAVKRVSNESRQGLKEFVAEIVSIGRMSHRNLVPLLGYCRRRDELLLVYDYMPNGSLDKYLYDCPEVTLDWKQRFNVIIGVASGLFYLHEEWEQVVIHRDIKASNVLLDAEYNGRLGDFGLARLCDHGSDPQTTRVVGTWGYLAPDHVRTGRATTATDVFAFGVLLLEVACGRRPIEIEIESDESVLLVDSVFGFWIEGNILDATDPNLGSVYDQREVETVLKLGLLCSHSDPQVRPTMRQVLQYLRGDATLPDLSPLDFRGSGKMLGMNHRFSESCTFSSGSSIAYSIVSGGR

SEQ ID NO: 82676 - DNA, 2010 bp, Arabidopsis thaliana
  misc_feature (1)..(2010): Ceres Seq. ID no. 12666812
  misc_feature (1)..(2010): Ortholog of  Ceres SEQ ID NO 13654989 as cited in SEQ ID NO 63117
  misc_feature (1)..(2010): Ortholog of  Ceres SEQ ID NO 13655640 as cited in SEQ ID NO 63844
atgttcttcatcaagctcttcaccatcttcttcttaagcttcttttggcaatccctaaagtcctcttcccaaattatcgacttcacttacaatggcttccgtcctccaccgacagacatatccatcctaggaattgccaccatcacaccaaacggtctcttaaagctaaccaacacaaccatgcagagcaccggtcacgccttctataccaaaccaatccggttcaaagattctccaaacggtaccgtatcgtctttctccactacctttgtcttcgctattcactctcagatacccattgcacacggcatggcctttgtcatcgctcctaaccctcgcctcccattcggcagccccttacaatacctcggtctcttcaatgtaacaaacaacggtaacgttaggaaccatgtattcgctgtcgaacttgacacgattatgaatatcgagttcaatgatacgaacaataaccatgttggaatcgatatcaatagcttgaactcggtgaaaagttctcctgctgggtactgggacgagaacgatcagtttcacaatctgactttgatcagtagtaaacggatgcaggtttgggtcgatttcgatggtcccacccatctaatcgatgtaaccatggctccgtttggtgaggttaaacctaggaaaccgcttgtttctatcgtcagagatctgtcctctgttcttttgcaagatatgttcgtaggtttctcgtctgcgaccggtaatattgtgtccgaaatttttgttcttgggtggagttttggagtgaatggggaagctcagccattggccttatcgaaacttccgagattgccggtgtgggacttaaaacctacaagagtctacagattctacaagaactgggtgccgttgatctccctcttgttgattcccttcttgcttataatcttcctcgtgcgcttcatcatgaagaggagaagaaagttcgcggaggaggtggaagattgggaaacagagttcgggaagaaccgactaaggttcaaggacttgtactatgcaacaaaagggttcaaggataagaacattcttggatcaggcgggttcgggagtgtttacaaaggtatcatgcccaagacgaagaaggagattgccgtgaaaagagtctcgaacgaatctagacaaggtttgaaagagttcgtggctgagatcgtgagtattggacagatgagtcaccggaacttggttcctctcgtgggttattgccgtcggagagacgagcttcttctggtgtacgattacatgcccaatggaagtttagacaagtatttgtacaatagtccagaggtaaccctcgattggaaacagaggtttaaagtcattaatggcgtggcctctgccttattttatctccacgaggagtgggaacaagtggtgattcaccgcgacgtcaaagccagcaacgtcttgttagatgcagagctcaatgggagactcggggatttcggtttagctcagttgtgtgatcacgggtctgatcctcaaactacgcgtgtagttggaacttggggatacctagcccccgatcacatcaggacaggacgggccacaaccactactgatgtttttgcatttggggtgctcctactagaagtggcgtgcggcagacgtcctatcgagattaataaccaaagtggtgagagggtcgtgctcgtggattgggtttttagattttggatggaggcaaacattttggatgctaaggatcctaatctagggtctgagtatgaccaaaaagaagtcgaaatggttttgaagctaggtttgttgtgctctcactccgacccactagctagaccaacaatgagacaagtgctacagtatctaaggggagatgcaatgttaccagatctgtcgccgttggacttgcgtgggagtgggatcatgttgggaacccacaacgggtctaatgagtcgggcatgtttaccagtggatcttctgttgcttattctctactctccagtgggaggtga

SEQ ID NO: 82677 - protein, 669 aa, Arabidopsis thaliana [sequence omitted]

SEQ ID NO: 82678 - protein, 609 aa, Arabidopsis thaliana
  peptide (1)..(609): Ceres Seq. ID no. 12666814
MQSTGHAFYTKPIRFKDSPNGTVSSFSTTFVFAIHSQIPIAHGMAFVIAPNPRLPFGSPLQYLGLFNVTNNGNVRNHVFAVELDTIMNIEFNDTNNNHVGIDINSLNSVKSSPAGYWDENDQFHNLTLISSKRMQVWVDFDGPTHLIDVTMAPFGEVKPRKPLVSIVRDLSSVLLQDMFVGFSSATGNIVSEIFVLGWSFGVNGEAQPLALSKLPRLPVWDLKPTRVYRFYKNWVPLISLLLIPFLLIIFLVRFIMKRRRKFAEEVEDWETEFGKNRLRFKDLYYATKGFKDKNILGSGGFGSVYKGIMPKTKKEIAVKRVSNESRQGLKEFVAEIVSIGQMSHRNLVPLVGYCRRRDELLLVYDYMPNGSLDKYLYNSPEVTLDWKQRFKVINGVASALFYLHEEWEQVVIHRDVKASNVLLDAELNGRLGDFGLAQLCDHGSDPQTTRVVGTWGYLAPDHIRTGRATTTTDVFAFGVLLLEVACGRRPIEINNQSGERVVLVDWVFRFWMEANILDAKDPNLGSEYDQKEVEMVLKLGLLCSHSDPLARPTMRQVLQYLRGDAMLPDLSPLDLRGSGIMLGTHNGSNESGMFTSGSSVAYSLLSSGR

SEQ ID NO: 82679 - protein, 566 aa, Arabidopsis thaliana
  peptide (1)..(566): Ceres Seq. ID no. 12666815
MAFVIAPNPRLPFGSPLQYLGLFNVTNNGNVRNHVFAVELDTIMNIEFNDTNNNHVGIDINSLNSVKSSPAGYWDENDQFHNLTLISSKRMQVWVDFDGPTHLIDVTMAPFGEVKPRKPLVSIVRDLSSVLLQDMFVGFSSATGNIVSEIFVLGWSFGVNGEAQPLALSKLPRLPVWDLKPTRVYRFYKNWVPLISLLLIPFLLIIFLVRFIMKRRRKFAEEVEDWETEFGKNRLRFKDLYYATKGFKDKNILGSGGFGSVYKGIMPKTKKEIAVKRVSNESRQGLKEFVAEIVSIGQMSHRNLVPLVGYCRRRDELLLVYDYMPNGSLDKYLYNSPEVTLDWKQRFKVINGVASALFYLHEEWEQVVIHRDVKASNVLLDAELNGRLGDFGLAQLCDHGSDPQTTRVVGTWGYLAPDHIRTGRATTTTDVFAFGVLLLEVACGRRPIEINNQSGERVVLVDWVFRFWMEANILDAKDPNLGSEYDQKEVEMVLKLGLLCSHSDPLARPTMRQVLQYLRGDAMLPDLSPLDLRGSGIMLGTHNGSNESGMFTSGSSVAYSLLSSGR

SEQ ID NO: 82680 - DNA, 1505 bp, Arabidopsis thaliana
  misc_feature (1)..(1505): Ceres Seq. ID no. 12666816
  misc_feature (1)..(1505): Ortholog of  Ceres SEQ ID NO 15172539 as cited in SEQ ID NO 57333
  misc_feature (1)..(1505): Ortholog of  Ceres SEQ ID NO 14315951 as cited in SEQ ID NO 57634
  misc_feature (1)..(1505): Ortholog of  Ceres SEQ ID NO 13597324 as cited in SEQ ID NO 64842
  misc_feature (1)..(1505): Ortholog of  Ceres SEQ ID NO 13658672 as cited in SEQ ID NO 66627
gcctttcttcttctcttccatcggaattttctctcaggaaagaaataaatgagcagccgttcgagtagaacgatttacgtcgggaaccttcccggcgatatccgtgaaagagaagttgaagacttgttcagtaagtatggacctgttgttcaaatcgatttgaagattccgccgaggcctccaggctatgcattcgtcgagtttgaggatgctcgtgatgctgatgatgcaatttatggccgtgatggttatgactttgatgggcatcatttacgggtggaactagctcatggtgggaggcgttcatcacatgatgcacgcggtagttatagtggtcgtggtcgtggcggtcgtggtggtggtgacggtggtggtcgtgaacgtggaccatctaggagatcagagtaccgcgttgtagtgtcaggtttgccttcatctgcgtcctggcaagacctcaaggatcacatgcgtaaaggaggagaagtttgtttttctcaagtgtttcgtgatggtagaggtacaactggaattgtagattataccagctacgaggacatgaaatatgcgataaaaaaagctcgatgacacagagtttcggaatgcgttttctcatgaatatgttcgggttagagaatatgattcaaggagggattcgaggagccccagccgtggaagatcctattctaagagccgcagccgtggacggagtcccagccgtagtcgtagccgcagcagaagcaggagcaagagcagaagtccaaaggctaaatctttgcgtagatcgcctgcaaaatctacatcgagatctcctcgctctcgctcccgctctaagtcgaggtcactgtctccacgaggatgggtaacagtggagagacattggatcgcattgatatagtgtcatcaaaatggacccatcgagctaggacagatattttcattacctgctaatcgacaagcgatctggattctcatggaaccgatgctgttctggacacagggtttgatagaattagatttgctttgatattctccatctctaccatctgttttaacgaaaagcaggcttgtgttggtttgattttctgctagaaatagtctgaagatatgtttttttcttttttgcttcttgtgattgtgttttgatgtctgacatggaatgaggcatcaagggtcttggtgaaacagctattaaacacggaaatattggatttttaaaactggatttgtttctcggacttttgcagatctcgttcaaggttcagaaggaagcaagtaagagccctagcaagcagctgagccctatccgtggtaggagcaagagcagaagcaggagtccatctcggtaaagaaacatctcatatcaggtaaaaagctgggtctgttggaagattctcataaagatgatctctcttatgtatgagaagttgaaaaactagttgtgtatttcattcttattagcttgggtttgcacatgggaatgatatatactcagtcatcatcagttt

SEQ ID NO: 82681 - protein, 178 aa, Arabidopsis thaliana
  peptide (1)..(178): Ceres Seq. ID no. 12666817
MSSRSSRTIYVGNLPGDIREREVEDLFSKYGPVVQIDLKIPPRPPGYAFVEFEDARDADDAIYGRDGYDFDGHHLRVELAHGGRRSSHDARGSYSGRGRGGRGGGDGGGRERGPSRRSEYRVVVSGLPSSASWQDLKDHMRKGGEVCFSQVFRDGRGTTGIVDYTSYEDMKYAIKKAR

SEQ ID NO: 82682 - protein, 93 aa, Arabidopsis thaliana
  peptide (1)..(93): Ceres Seq. ID no. 12666818
MTQSFGMRFLMNMFGLENMIQGGIRGAPAVEDPILRAAAVDGVPAVVVAAAEAGARAEVQRLNLCVDRLQNLHRDLLALAPALSRGHCLHEDG

SEQ ID NO: 82683 - DNA, 1782 bp, Arabidopsis thaliana
  misc_feature (1)..(1782): Ceres Seq. ID no. 12666826
  misc_feature (1)..(1782): Ortholog of  Ceres SEQ ID NO 13639120 as cited in SEQ ID NO 56708
agtaagtaactttggtaattaacagtgttattatcaaattcgaatctcttacattaatggaaactcagatcttctcttaaaaacacataaagcacagatcttttacagagaatcttgtaagaagaaagaagatgattgagaggtgtttaggagcttaccggtgccggagaatccaaagagctttacgccaattaaaggtaacgattctctgtcttcttcttaccgttgttgtcctacgtagcacaatcggcgccggtaaattcggaactccggagcaagatcttgacgagatccgtcaacatttccacgcacgcaaacgaggtgagcctcaccgtgtcctcgaagaaattcagaccggaggagattcttcttccggtgacggtggaggtaattccggtgggagtaataactacgagacgtttgacatcaacaagattttcgttgacgaaggtgaagaagagaaacccgacccgaataaaccttacactctcggacccaagatatcagattgggatgagcagagatctgattggttagctaagaaccctagcttccctaatttcatcggacctaacaagccacgtgttcttttggtgactggttcggcgccaaaaccatgtgagaatcctgtcggtgatcattacctcttgaaatcgatcaagaacaagatcgattactgtaggttacatgggatcgagatcttctacaacatggctcttctcgatgcagagatggctggtttttgggcaaagcttccattgattaggaagcttttgttgtcacatcctgagattgagtttctttggtggatggatagtgatgctatgtttacagatatggcttttgagcttccatgggagaggtataaagattacaatctggtgatgcatggatggaatgagatggtttatgatcagaagaattggattgggttgaatacagggagtttcttgcttaggaacaatcaatgggcacttgatttgcttgatacttgggctcccatgggtcctaaagggaagatccgtgaagaagcgggtaaggttttgacccgtgagctcaaggatagaccggtgttcgaagctgatgatcagtctgctatggtttatctgttggctactcagcgagacgcttggggcaataaggtgtacctagaaagtggatactatcttcacggttactgggggattcttgtggacagatatgaagaaatgatagaaaactaccacccgggtctaggagatcacagatggccattggtgactcactttgtcggttgcaaaccgtgtgggaaatttggtgattacccggtggaacggtgtctaaaacaaatggacagagcctttaactttggagataaccagattctgcaaatctatggtttcactcacaaatctttggctagtcgtaaagtcaagagagtgcggaacgagactagcaatccgttggagatgaaagacgagctcgggttgcttcatccggcgtttaaggcggttaaggtacaaaccaatcaagtttgaatcggttttgcgtttaggatttgtgttatgtttctcgctatatttatgtcttgtgtctttgcttgttgttgtactaagatggatgataaagtattgtgcagagacatcagttaattctttggttttactttgtctctacgtctagagttctattacgaaatcaaaatgttgtttttcttcctttttgttctttgtaatccattagaacttgagattttgtagcttcatggatcaataatctgtgttaattcaagaactttttttt

SEQ ID NO: 82684 - protein, 461 aa, Arabidopsis thaliana
  peptide (1)..(461): Ceres Seq. ID no. 12666827
MIERCLGAYRCRRIQRALRQLKVTILCLLLTVVVLRSTIGAGKFGTPEQDLDEIRQHFHARKRGEPHRVLEEIQTGGDSSSGDGGGNSGGSNNYETFDINKIFVDEGEEEKPDPNKPYTLGPKISDWDEQRSDWLAKNPSFPNFIGPNKPRVLLVTGSAPKPCENPVGDHYLLKSIKNKIDYCRLHGIEIFYNMALLDAEMAGFWAKLPLIRKLLLSHPEIEFLWWMDSDAMFTDMAFELPWERYKDYNLVMHGWNEMVYDQKNWIGLNTGSFLLRNNQWALDLLDTWAPMGPKGKIREEAGKVLTRELKDRPVFEADDQSAMVYLLATQRDAWGNKVYLESGYYLHGYWGILVDRYEEMIENYHPGLGDHRWPLVTHFVGCKPCGKFGDYPVERCLKQMDRAFNFGDNQILQIYGFTHKSLASRKVKRVRNETSNPLEMKDELGLLHPAFKAVKVQTNQV

SEQ ID NO: 82685 - protein, 268 aa, Arabidopsis thaliana
  peptide (1)..(268): Ceres Seq. ID no. 12666828
MALLDAEMAGFWAKLPLIRKLLLSHPEIEFLWWMDSDAMFTDMAFELPWERYKDYNLVMHGWNEMVYDQKNWIGLNTGSFLLRNNQWALDLLDTWAPMGPKGKIREEAGKVLTRELKDRPVFEADDQSAMVYLLATQRDAWGNKVYLESGYYLHGYWGILVDRYEEMIENYHPGLGDHRWPLVTHFVGCKPCGKFGDYPVERCLKQMDRAFNFGDNQILQIYGFTHKSLASRKVKRVRNETSNPLEMKDELGLLHPAFKAVKVQTNQV

SEQ ID NO: 82686 - protein, 261 aa, Arabidopsis thaliana
  peptide (1)..(261): Ceres Seq. ID no. 12666829
MAGFWAKLPLIRKLLLSHPEIEFLWWMDSDAMFTDMAFELPWERYKDYNLVMHGWNEMVYDQKNWIGLNTGSFLLRNNQWALDLLDTWAPMGPKGKIREEAGKVLTRELKDRPVFEADDQSAMVYLLATQRDAWGNKVYLESGYYLHGYWGILVDRYEEMIENYHPGLGDHRWPLVTHFVGCKPCGKFGDYPVERCLKQMDRAFNFGDNQILQIYGFTHKSLASRKVKRVRNETSNPLEMKDELGLLHPAFKAVKVQTNQV

SEQ ID NO: 82687 - DNA, 777 bp, Arabidopsis thaliana
  misc_feature (1)..(777): Ceres Seq. ID no. 12666949
  misc_feature (1)..(777): Ortholog of  Ceres SEQ ID NO 13661768 as cited in SEQ ID NO 61427
atgtcttcatccttcataccaaaacgcatcgctttggtccttaacttggccatggtagccatacaagtcttctttatacgcagtgtttcgtccatgaacgagaccaactcatatctataccacaaatgctccgaggctgaagggaaatacaagtccaagagcccgtacgaaggaaacctcaactttctcaccaatgacatgtataaagacacttttgtaagaggttttgtctatgcctatcatggtgacgatcccaataccgtctacatcttgctccagtgccggggtgactcctacggctccaagtgtggttcctgcctctccactgccacctccgagctgcgtagaagatgtcctatgaacaaggcgggaatagtatggtttgataaatgtcttctcaagatttctccaaccgctttcttcgagaagatcgatgacaagaacaagttctatatgtacagcacaaagaaagtaagcgatccagcgttgttcaatgtgaagacaaaggctctactcactgagctgaccgcaaaggctactcgcagatcagataagttattgttgtacgagacaggggagatgaaactcgggaagatgaagctttacggaatggtgcagtgtagacgggatttatggtttacggtttgtaagacgtgtttggataagattataggggagcttcctaaatgttgtgatggtaaagaaggagggagagttttgagtgggagttgtaactttagatatgagatttacccttttcttgacactgttcgatga

SEQ ID NO: 82688 - protein, 258 aa, Arabidopsis thaliana
  peptide (1)..(258): Ceres Seq. ID no. 12666950
MSSSFIPKRIALVLNLAMVAIQVFFIRSVSSMNETNSYLYHKCSEAEGKYKSKSPYEGNLNFLTNDMYKDTFVRGFVYAYHGDDPNTVYILLQCRGDSYGSKCGSCLSTATSELRRRCPMNKAGIVWFDKCLLKISPTAFFEKIDDKNKFYMYSTKKVSDPALFNVKTKALLTELTAKATRRSDKLLLYETGEMKLGKMKLYGMVQCRRDLWFTVCKTCLDKIIGELPKCCDGKEGGRVLSGSCNFRYEIYPFLDTVR

SEQ ID NO: 82689 - protein, 241 aa, Arabidopsis thaliana
  peptide (1)..(241): Ceres Seq. ID no. 12666951
MVAIQVFFIRSVSSMNETNSYLYHKCSEAEGKYKSKSPYEGNLNFLTNDMYKDTFVRGFVYAYHGDDPNTVYILLQCRGDSYGSKCGSCLSTATSELRRRCPMNKAGIVWFDKCLLKISPTAFFEKIDDKNKFYMYSTKKVSDPALFNVKTKALLTELTAKATRRSDKLLLYETGEMKLGKMKLYGMVQCRRDLWFTVCKTCLDKIIGELPKCCDGKEGGRVLSGSCNFRYEIYPFLDTVR

SEQ ID NO: 82690 - protein, 227 aa, Arabidopsis thaliana
  peptide (1)..(227): Ceres Seq. ID no. 12666952
MNETNSYLYHKCSEAEGKYKSKSPYEGNLNFLTNDMYKDTFVRGFVYAYHGDDPNTVYILLQCRGDSYGSKCGSCLSTATSELRRRCPMNKAGIVWFDKCLLKISPTAFFEKIDDKNKFYMYSTKKVSDPALFNVKTKALLTELTAKATRRSDKLLLYETGEMKLGKMKLYGMVQCRRDLWFTVCKTCLDKIIGELPKCCDGKEGGRVLSGSCNFRYEIYPFLDTVR

SEQ ID NO: 82691 - DNA, 936 bp, Arabidopsis thaliana
  misc_feature (1)..(936): Ceres Seq. ID no. 12666991
  misc_feature (1)..(936): Ortholog of  Ceres SEQ ID NO 14314312 as cited in SEQ ID NO 57283
atggacaccgtcaacgattccttttcgccgggatcttcccgaccttcgccggcgacgctttctcgtgaagattgctggagcgaggaagcgaccttcacgctcatccaagcctggggtaatcgctacgtcgacctcagccgaggtaatctccgtcagaaacactggcaagaggtggctaacgccgttaacgaccgtcactacaacaccggtcgaaacgtttccgccgccaaatcgcagccgtatcgcaccgacgttcagtgtaaaaaccggatcgatactctgaagaagaagtacaaagtcgagaaggctagggtttcggaatccaatcccggtgcctacatcagcccttggcctttcttctccgctctcgatgaccttctccgggaaagctttccgacgtctagtaatcctgattcaactgataacatcccgcaccagaggctatcacttccgatgtccattaatccagttccggtcgctccacgatcggcgatccccagacgtccggcgacatcgccggcgattatacctcacgccggtgacgatttactcggatttcgcgggaatctcaacgcattcgcggcagccgcagcggcggcggcgtgtccggcgtctgaagatgactcggaaggttcaaggtctagatcgagcggtcgtagcgggagtaacaagaagcgggagaggaaaattgagaagaagcaaggctacaaggaagttgccgacgcaattgagaggcttggacagatatacgagagagtcgaggagaagaagaggaaggaaatggttgaattggagaagcagagaatgagattcgctaaggaattggaatgccataggatgcaactgttcacggagatgcaggtacgtcttcataagctccggcgtacctctggctccaaaggaccgacttcctccgcctccgccggtgagacctga

SEQ ID NO: 82692 - protein, 311 aa, Arabidopsis thaliana
  peptide (1)..(311): Ceres Seq. ID no. 12666992
MDTVNDSFSPGSSRPSPATLSREDCWSEEATFTLIQAWGNRYVDLSRGNLRQKHWQEVANAVNDRHYNTGRNVSAAKSQPYRTDVQCKNRIDTLKKKYKVEKARVSESNPGAYISPWPFFSALDDLLRESFPTSSNPDSTDNIPHQRLSLPMSINPVPVAPRSAIPRRPATSPAIIPHAGDDLLGFRGNLNAFAAAAAAAACPASEDDSEGSRSRSSGRSGSNKKRERKIEKKQGYKEVADAIERLGQIYERVEEKKRKEMVELEKQRMRFAKELECHRMQLFTEMQVRLHKLRRTSGSKGPTSSASAGET

SEQ ID NO: 82693 - protein, 160 aa, Arabidopsis thaliana; identical to SEQ ID NO: 48722
  peptide (1)..(160): Ceres Seq. ID no. 12666993

SEQ ID NO: 82694 - DNA, 819 bp, Arabidopsis thaliana
  misc_feature (1)..(819): Ceres Seq. ID no. 12666998
  misc_feature (1)..(819): Ortholog of  Ceres SEQ ID NO 12635696 as cited in SEQ ID NO 0
atgcatcgtagagcagcaattcaagaatcggatgacgaagaagatgagacttacaacgacgtcgttcctgaatctccttcttcttgtgaagactcaaagatctcaaaaccaactccaaagaaaagtaggaggaacgtagagaagagagttgtctcagttccgatagctgacgtggaaggatctaagagcagaggcgaagtatatccaccgtccgattcatgggcctggagaaagtacggacaaaaaccgatcaaaggctcgccttatcccaggggatattacagatgtagtagctcaaaaggatgtccggcgaggaagcaggtggagagaagccgtgtggacccttctaagcttatgattacttacgcctgcgaccacaatcaccctttcccttcctcctccgctaacaccaaatcccaccaccgctcctccgtcgtcctcaaaaccgcaaagaaagaggaagaatacgaagaggaggaagaagaactaaccgtcaccgccgcagaggaaccaccggcgggacttgatctaagccacgtagactcaccgttgctattaggcggctgctacagcgaaatcggagagttcgggtggttctacgacgcgtcgatctcatcatcatctggttcttcgaatttcctcgacgtaactctagagagaggtttttcagtaggccaagaggaagatgagtctttgttcggtgatctcggtgatttacctgattgcgcctccgtgttccgccgtgggactgttgcgacggaggagcaacatcgaagatgtgattttggcgccattcctttctgtgatagttctagatga

SEQ ID NO: 82695 - protein, 272 aa, Arabidopsis thaliana; identical to SEQ ID NO: 38750
  peptide (1)..(272): Ceres Seq. ID no. 12666999

SEQ ID NO: 82696 - protein, 154 aa, Arabidopsis thaliana; identical to SEQ ID NO: 38751
  peptide (1)..(154): Ceres Seq. ID no. 12667000

SEQ ID NO: 82697 - DNA, 1621 bp, Arabidopsis thaliana
  misc_feature (1)..(1621): Ceres Seq. ID no. 12667009
  misc_feature (1)..(1621): Ortholog of  Ceres SEQ ID NO 15176822 as cited in SEQ ID NO 1160
  misc_feature (1)..(1621): Ortholog of  Ceres SEQ ID NO 13593889 as cited in SEQ ID NO 53305
atgacgattaagcctaaatcgccggcgagattcaagctaggtaggcagtcttcgcttgcgccggaatcaagaaccccgattgatacgttaacggaagatgaggacgacgacttggctgcggcggctacagctgggatcggggatccgacgattcgtttaatgtatttagccaacgaaggtgatatcgatggcatcaataagatgcttgattcgggtactaatgttgattaccgtgacatcgatgcccgtactgctcttcacgtcgccgcttgtcaaggacgaaccgatgtcgttgagctgctgcttagccgtggtgctaaggttgatacgaaggaccgatggggtagtacgcctcttgcagatgcagtgtattacaaaaatcatgatgtgattaaacttttggagaaacatggtgctaagcctacgattgctcctatgcatgtcctaactgataaagaagttccagagtacgagattcatcctacagagcttgatttttccaactctgtcaaaatttcaaagggtacctttaacaaggcttcatggcgtggaattgacgtggctgttaaaacctttggagaggaaatgttcactgatgaagacaaagtgaatgcatttagggacgaacttgcactgcttcaaaagatacgccatccgaatgttgttcagtttctaggggcagttactcagagtacccccatgatgattgtcaccgagtatttaccaaagggagatcttcgacaatatctagacaggaaaggacctctaatgccagcacacgcagtgaagttcgcccttgaaattgctaggttaagtggctatttcctgggaatgaattatttgcacgaacataaacctgaagcaataatccattgcgacctagaacctccaaacatactgcgggatgattcgggacatctgaaagttgcagactttggagtcagcaagctgctggtagttaagaagacagttaaaaaagacagacctgttgttacatgcttggacagttcatggcgatatatggctccagaggtttataggaatgaagagtatgatacaaaagtagatgtattctctttcgctttaatcttacaagagatgatagaaggttgtgaaccatttcatgagatagaagaccgcgaagttcctaaagcatatattgaagatgaacgtccaccattcaatgctccaacaaaatcatatcctttcgggttacaagagctaatccaggattgttgggacaaagaagcatcaaaaagaccaacatttagagtaatcatctctactttggagttgataagtgatcgaattgcacgcaaaaggagctggaaggtgatgctaggaagatgccttccaagattcagattgtttacaaagcgagattatgtgaatcccggtggtagtaaccgctcatcaggctcattcaacagatgagtgactgcaaagagctttgggtttgtttttctttaattgccttaaaaggatgaaaaaatgtcaaatactttttaggtcttttgtatttatatatgacatcatgactgtttttcttaaccagaatgaacacggtggtgtgtattattttttacgcagtggcgaagtaaaataatgagatctctgagct

SEQ ID NO: 82698 - protein, 477 aa, Arabidopsis thaliana
  peptide (1)..(477): Ceres Seq. ID no. 12667010
MTIKPKSPARFKLGRQSSLAPESRTPIDTLTEDEDDDLAAAATAGIGDPTIRLMYLANEGDIDGINKMLDSGTNVDYRDIDARTALHVAACQGRTDVVELLLSRGAKVDTKDRWGSTPLADAVYYKNHDVIKLLEKHGAKPTIAPMHVLTDKEVPEYEIHPTELDFSNSVKISKGTFNKASWRGIDVAVKTFGEEMFTDEDKVNAFRDELALLQKIRHPNVVQFLGAVTQSTPMMIVTEYLPKGDLRQYLDRKGPLMPAHAVKFALEIARLSGYFLGMNYLHEHKPEAIIHCDLEPPNILRDDSGHLKVADFGVSKLLVVKKTVKKDRPVVTCLDSSWRYMAPEVYRNEEYDTKVDVFSFALILQEMIEGCEPFHEIEDREVPKAYIEDERPPFNAPTKSYPFGLQELIQDCWDKEASKRPTFRVIISTLELISDRIARKRSWKVMLGRCLPRFRLFTKRDYVNPGGSNRSSGSFNR

SEQ ID NO: 82699 - protein, 424 aa, Arabidopsis thaliana
  peptide (1)..(424): Ceres Seq. ID no. 12667011
MYLANEGDIDGINKMLDSGTNVDYRDIDARTALHVAACQGRTDVVELLLSRGAKVDTKDRWGSTPLADAVYYKNHDVIKLLEKHGAKPTIAPMHVLTDKEVPEYEIHPTELDFSNSVKISKGTFNKASWRGIDVAVKTFGEEMFTDEDKVNAFRDELALLQKIRHPNVVQFLGAVTQSTPMMIVTEYLPKGDLRQYLDRKGPLMPAHAVKFALEIARLSGYFLGMNYLHEHKPEAIIHCDLEPPNILRDDSGHLKVADFGVSKLLVVKKTVKKDRPVVTCLDSSWRYMAPEVYRNEEYDTKVDVFSFALILQEMIEGCEPFHEIEDREVPKAYIEDERPPFNAPTKSYPFGLQELIQDCWDKEASKRPTFRVIISTLELISDRIARKRSWKVMLGRCLPRFRLFTKRDYVNPGGSNRSSGSFNR

SEQ ID NO: 82700 - protein, 410 aa, Arabidopsis thaliana
  peptide (1)..(410): Ceres Seq. ID no. 12667012
MLDSGTNVDYRDIDARTALHVAACQGRTDVVELLLSRGAKVDTKDRWGSTPLADAVYYKNHDVIKLLEKHGAKPTIAPMHVLTDKEVPEYEIHPTELDFSNSVKISKGTFNKASWRGIDVAVKTFGEEMFTDEDKVNAFRDELALLQKIRHPNVVQFLGAVTQSTPMMIVTEYLPKGDLRQYLDRKGPLMPAHAVKFALEIARLSGYFLGMNYLHEHKPEAIIHCDLEPPNILRDDSGHLKVADFGVSKLLVVKKTVKKDRPVVTCLDSSWRYMAPEVYRNEEYDTKVDVFSFALILQEMIEGCEPFHEIEDREVPKAYIEDERPPFNAPTKSYPFGLQELIQDCWDKEASKRPTFRVIISTLELISDRIARKRSWKVMLGRCLPRFRLFTKRDYVNPGGSNRSSGSFNR

SEQ ID NO: 82701 - DNA, 2356 bp, Arabidopsis thaliana
  misc_feature (1)..(2356): Ceres Seq. ID no. 12667013
  misc_feature (1)..(2356): Ortholog of  Ceres SEQ ID NO 14315469 as cited in SEQ ID NO 57169
  misc_feature (1)..(2356): Ortholog of  Ceres SEQ ID NO 13657008 as cited in SEQ ID NO 69164
aggaataatattggtgaaatattatcttttacaaaaatgcatttattttggtaagcatatgtccgcttggcttctttagaaaaattcattcctctttgaatgttgttttttattcccgtcgtacagatcaaaaaccaaacagtccctctcgacctactggattcgcgttttgcttttgatcacatcttcgtcattgagcttcttcttcttctcgatccctgttggttttggttgttgtttttgatgaactgatagtggagatcagagatctggaaaacagagccgtgtgttactgttttggattgatggaactgaagaaacgttgtgagaaagttagggaaactgtgaagaaatgaagttttacatatcagcgacggggattaagaaggttacgatatcaaatcccggcgtcggaatcggtaaaggaagcggaggatgtgcggctgcagcggcggcgttagcagcgcggagattctctagtcgcacgttgttactgttgctgctgctgctcgctatcgtcctcccttttatcttcgtcaggttcgcgtttctcgtcctcgaatctgcctccgtttgcgattcaccactcgattgcatgggactcagacttttccgtgggggcgacacatctctgaaaattggggaagagttgacacgggctctagtggaagagacgacagatcatcaggacgttaatggaagaggaacgaagggatcattggagtcattcgacgaccttgttaaggagatgacgttaaaacgccgtgacataagggcgtttgcttccgtgactaagaagatgctgttgcagatggaacgtaaagtccaatcagcgaaacatcatgagttagtgtactggcatttagcctctcacggtattcctaaaagcctccattgcctttccctcagattaactgaagagtactctgtaaatgcaatggctcgaatgcgtttgcctccgcctgagtccgtatcacgtctgaccgacccatcttttcatcatattgtcctcctgactgacaatgtccttgctgcctctgtcgtcatatcgtctactgtacaaaacgctgtgaatcccgagaagtttgtctttcatattgttaccgataagaaaacctatacccctatgcatgcttggtttgctatcaactctgcttcatcaccagttgttgaagtaaagggacttcatcagtatgattggcctcaagaagtgaacttcaaagttagagagatgctggacattcaccgcttaatttggagacgacattatcaaaatttgaaagactctgattttagttttgttgagggtactcatgagcagtccttgcaagctctaaatcctagctgccttgcccttttgaaccatcttcgcatttacattcccaagctttttccagatctcaacaagatagtgttgttggatgatgatgtagtagtacagagcgatctttcgtctttatgggaaacggatctcaacggtaaagttgttggtgctgtcgttgattcgtggtgcggagacaactgttgccccggaagaaaatacaaagactatttcaacttctcacatcctttgatctcatcaaacttagttcaagaagactgtgcttggctttctggtatgaatgtctttgatctcaaagcctggagacaaaccaatattactgaagcttactctacatggctaagactcagtgttaggtcaggactacaattatggcaaccaggggctttaccaccgacattacttgctttcaaaggacttacacagtctcttgaaccatcatggcacgtcgctggactaggttctcgatccgtaaaatcccctcaagagattctgaaatctgcttcggttttacatttcagcggtccagcaaaaccgtggctagagatcagtaaccctgaggtacgatctctttggtatagatacgtaaattcctccgacatcttcgttagaaaatgcaaaatcatgaactgagactaaaaaacagattagaaaacaaatataaagaaaagagaaaactgagtgatgaagccaatacttgcggctgtgtgagagaacagagggaagaaggtttaagccttcagcctctgctcatatttctctcatgtccatatactaaacagtaatttagataaaggacagtatcaaattagactttaagcgtatgaagcttctttttgagatcattatctcaagtagtaactatagtaaaaaatgtaattttgtttaattatagctacacattaatttatcacattatagatcttttgtaagtttttatttttgtaatccataattaatttatggacatgttgtaatgattttatgatcaatgtttatagttttgcttgtctc

SEQ ID NO: 82702 - protein, 540 aa, Arabidopsis thaliana
  peptide (1)..(540): Ceres Seq. ID no. 12667014
MKFYISATGIKKVTISNPGVGIGKGSGGCAAAAAALAARRFSSRTLLLLLLLLAIVLPFIFVRFAFLVLESASVCDSPLDCMGLRLFRGGDTSLKIGEELTRALVEETTDHQDVNGRGTKGSLESFDDLVKEMTLKRRDIRAFASVTKKMLLQMERKVQSAKHHELVYWHLASHGIPKSLHCLSLRLTEEYSVNAMARMRLPPPESVSRLTDPSFHHIVLLTDNVLAASVVISSTVQNAVNPEKFVFHIVTDKKTYTPMHAWFAINSASSPVVEVKGLHQYDWPQEVNFKVREMLDIHRLIWRRHYQNLKDSDFSFVEGTHEQSLQALNPSCLALLNHLRIYIPKLFPDLNKIVLLDDDVVVQSDLSSLWETDLNGKVVGAVVDSWCGDNCCPGRKYKDYFNFSHPLISSNLVQEDCAWLSGMNVFDLKAWRQTNITEAYSTWLRLSVRSGLQLWQPGALPPTLLAFKGLTQSLEPSWHVAGLGSRSVKSPQEILKSASVLHFSGPAKPWLEISNPEVRSLWYRYVNSSDIFVRKCKIMN

SEQ ID NO: 82703 - protein, 459 aa, Arabidopsis thaliana
  peptide (1)..(459): Ceres Seq. ID no. 12667015
MGLRLFRGGDTSLKIGEELTRALVEETTDHQDVNGRGTKGSLESFDDLVKEMTLKRRDIRAFASVTKKMLLQMERKVQSAKHHELVYWHLASHGIPKSLHCLSLRLTEEYSVNAMARMRLPPPESVSRLTDPSFHHIVLLTDNVLAASVVISSTVQNAVNPEKFVFHIVTDKKTYTPMHAWFAINSASSPVVEVKGLHQYDWPQEVNFKVREMLDIHRLIWRRHYQNLKDSDFSFVEGTHEQSLQALNPSCLALLNHLRIYIPKLFPDLNKIVLLDDDVVVQSDLSSLWETDLNGKVVGAVVDSWCGDNCCPGRKYKDYFNFSHPLISSNLVQEDCAWLSGMNVFDLKAWRQTNITEAYSTWLRLSVRSGLQLWQPGALPPTLLAFKGLTQSLEPSWHVAGLGSRSVKSPQEILKSASVLHFSGPAKPWLEISNPEVRSLWYRYVNSSDIFVRKCKIMN

SEQ ID NO: 82704 - protein, 408 aa, Arabidopsis thaliana
  peptide (1)..(408): Ceres Seq. ID no. 12667016
MTLKRRDIRAFASVTKKMLLQMERKVQSAKHHELVYWHLASHGIPKSLHCLSLRLTEEYSVNAMARMRLPPPESVSRLTDPSFHHIVLLTDNVLAASVVISSTVQNAVNPEKFVFHIVTDKKTYTPMHAWFAINSASSPVVEVKGLHQYDWPQEVNFKVREMLDIHRLIWRRHYQNLKDSDFSFVEGTHEQSLQALNPSCLALLNHLRIYIPKLFPDLNKIVLLDDDVVVQSDLSSLWETDLNGKVVGAVVDSWCGDNCCPGRKYKDYFNFSHPLISSNLVQEDCAWLSGMNVFDLKAWRQTNITEAYSTWLRLSVRSGLQLWQPGALPPTLLAFKGLTQSLEPSWHVAGLGSRSVKSPQEILKSASVLHFSGPAKPWLEISNPEVRSLWYRYVNSSDIFVRKCKIMN

SEQ ID NO: 82705 - DNA, 1137 bp, Arabidopsis thaliana
  misc_feature (1)..(1137): Ceres Seq. ID no. 12667017
  misc_feature (1)..(1137): Ortholog of  Ceres SEQ ID NO 13655988 as cited in SEQ ID NO 65557
atgaaagaccatattcatgagcatgaccacatggttcagatttgtggggaagtttcatcaggagaaacaagcttggtgggcatcaagaagacatgtggagaagcgccttgcggattctcagatgccaagaccagttcaatagaagctcaagagcgtgcagcatcaatgagaaagctattaatagctgttcttctctgtgccattttcatagttgtagaagtcgttggaggaatcaaggccaacagtcttgcgattctcacagatgcagctcatctgttatctgatgttgcagcctttgcaatatctttgttctcgctctgggcttcgggatggaaggcaaaccctcagcaatcttatgggtttttcagaatagagattcttggtgctcttgtctccattcaaatgatttggcttcttgctggtatcttggtttatgaagccattgttagacttaacaacggtagtggtgaagtggagggatctcttatgtttgctgtctctgcagttggcttacttgtgaacattgcaatggctattctgttaggtcatgaccatggtcatggtcatggtcatagtcatgacaatggtcacggtcatagtcatgatcatggccatggaatagccgcaaccgagcatcatcatgactctggtcatgatgaatcacaactatctgatgtcttaatcgagcaaaagaagcagcgtaatgtaaatattcaaggggcttatcttcacgtgctgggagattcgatacagagcgtaggagtgatgataggaggagcaatcatatggtataagccggagtggaagatccttgatttgatatgcacattggttttctctgtgattgtgttagggacaacaattgggatgcttaggaacattctagaggttttaatggagtcaacaccacgagagattgacccgacaatgcttgaaaagggagtgtgtgaaattgaagaagtggtggctgttcatgagcttcacatttgggcgattactgtcggcaaacttttgttggcatgtcatgttaaaatcagacctgaggcagaggcagatatggttttggacaagattatcgattacattaagagggaacacaacattagtcacgtgactattcagatcgaacgtcaatga

SEQ ID NO: 82706 - protein, 378 aa, Arabidopsis thaliana
  peptide (1)..(378): Ceres Seq. ID no. 12667018
MKDHIHEHDHMVQICGEVSSGETSLVGIKKTCGEAPCGFSDAKTSSIEAQERAASMRKLLIAVLLCAIFIVVEVVGGIKANSLAILTDAAHLLSDVAAFAISLFSLWASGWKANPQQSYGFFRIEILGALVSIQMIWLLAGILVYEAIVRLNNGSGEVEGSLMFAVSAVGLLVNIAMAILLGHDHGHGHGHSHDNGHGHSHDHGHGIAATEHHHDSGHDESQLSDVLIEQKKQRNVNIQGAYLHVLGDSIQSVGVMIGGAIIWYKPEWKILDLICTLVFSVIVLGTTIGMLRNILEVLMESTPREIDPTMLEKGVCEIEEVVAVHELHIWAITVGKLLLACHVKIRPEAEADMVLDKIIDYIKREHNISHVTIQIERQ

SEQ ID NO: 82707 - protein, 368 aa, Arabidopsis thaliana
  peptide (1)..(368): Ceres Seq. ID no. 12667019
MVQICGEVSSGETSLVGIKKTCGEAPCGFSDAKTSSIEAQERAASMRKLLIAVLLCAIFIVVEVVGGIKANSLAILTDAAHLLSDVAAFAISLFSLWASGWKANPQQSYGFFRIEILGALVSIQMIWLLAGILVYEAIVRLNNGSGEVEGSLMFAVSAVGLLVNIAMAILLGHDHGHGHGHSHDNGHGHSHDHGHGIAATEHHHDSGHDESQLSDVLIEQKKQRNVNIQGAYLHVLGDSIQSVGVMIGGAIIWYKPEWKILDLICTLVFSVIVLGTTIGMLRNILEVLMESTPREIDPTMLEKGVCEIEEVVAVHELHIWAITVGKLLLACHVKIRPEAEADMVLDKIIDYIKREHNISHVTIQIERQ

SEQ ID NO: 82708 - protein, 323 aa, Arabidopsis thaliana
  peptide (1)..(323): Ceres Seq. ID no. 12667020
MRKLLIAVLLCAIFIVVEVVGGIKANSLAILTDAAHLLSDVAAFAISLFSLWASGWKANPQQSYGFFRIEILGALVSIQMIWLLAGILVYEAIVRLNNGSGEVEGSLMFAVSAVGLLVNIAMAILLGHDHGHGHGHSHDNGHGHSHDHGHGIAATEHHHDSGHDESQLSDVLIEQKKQRNVNIQGAYLHVLGDSIQSVGVMIGGAIIWYKPEWKILDLICTLVFSVIVLGTTIGMLRNILEVLMESTPREIDPTMLEKGVCEIEEVVAVHELHIWAITVGKLLLACHVKIRPEAEADMVLDKIIDYIKREHNISHVTIQIERQ

SEQ ID NO: 82709 - DNA, 4087 bp, Arabidopsis thaliana
  misc_feature (1)..(4087): Ceres Seq. ID no. 12667035
  misc_feature (1)..(4087): Ortholog of  Ceres SEQ ID NO 13590699 as cited in SEQ ID NO 65085
aagaagtagcagaacaatggcgacttctcagcaatttttaaaccctacactcttcaaatccttagcttcctcaaacaaaaactcatgtactctctgcccatctcctttcttgcaactcaagtccgcctccacaattttcaattacaaaccacttacttcctcctccgccacgatcatcacacgcgtcgctgcatcatcctccgattcaggcgagtcaataaccagagagactttccacggcctctgcttcgtcttgaaagacaacatcgacaccgatcaaataatccccgccgagtacggcactctcatcccttcgattccagaagatcgcgagaaactcggctctttcgcgcttaacggcttaccaaaattctacaacgaacgtttcgttgttccaggagagatgaaatcaaagtactcagtcatcatcggcggcgataatttcggttgcggatcttcccgcgaacacgctccagtttgtctcggcgcggcgggagctaaagctgtggtggcggaatcgtacgctaggatctttttcaggaactgtgtagctacaggtgagattttcccgttggaatcggaggttaggatttgcgacgagtgcaaaacaggggatgtggtgacaatcgaacacaaggaagacggtagtagtttgctgatcaatcatacgacgaggaaagaatacaaactgaaaccgctcggtgatgccggtccggtgatcgacgccggtggaatcttcgcttatgcaagaaaagccggcatgattccttctgcttgaatgtaatcggatccataatttatcggttctgagtttaatccggtttggtttatttggttcgagaaccggtactaacgaaataaattattaccaaaccaaaatttcttctggttcgactttgtttgccacgtggaaacagcgatataaacaagtgcccaaaaaggcttgcaatggtttttgtacaagaccttcgttttcttcaatgttcctcttttcttagatgcatttgcatgtcctctcgaactgaaagtttaaggttcttcttctgccttcgcatctgtactaagtgggtgaatgttagttgaatttgtggtttgaagtctcaattgaaattaactgagtagtgaaaggggttttctagggtttgacaagaggatggataggattagcaatctaccaaatgagatcatttgtcacattgtatctttcctttcggcaaaggaagctgctttcgcatcgattctgtcaaagaggtggcggaatctctttaccattgtaataaaacttcagtttgatgactcagtcaagaatgaagggagtttgaaggattttgtcgatggagtattggctctgcctaccagttctcgtgtaaggagttgctctctagaatgtcgaagagagtttgatccgactcattatgatgatttcaatcgttgtatatgtgctttgctgaagcgtggtatcttggatcttaaactagacatatgtgctgggagacgatattcactaccacttgaggttttcacttgcaaaacactcgttaagctggaacttgggagtgattttggtggctttgttgttgatcttgtccctgaggatgcttttctaccagcgcttgagaccctccttcttaactatattcggtttaaagatctccgccgttgtgcgtttgaaaagcttctttctgcttgccttgtgctcaaggaactagtcatacataatatggagtgggaacgttggaaatggtctggcaacatatccagtccaacccttgaaagacttactattagtcatgtagatctctatgagtgtgagtttacgagaataaatttagatactccgaatcttacctatttagagttgtctgatgctgtaccggatgactatccaattgttaatcttgactcccttgttgaagttaagctcgatcttacgttgatggtagatcacaagtaccatggatatgtagatgacaacgacacgatttctagcaatccaacaaatctgattaatgggttaagaaatgttgaaatcatgaacttgcaatctcctaatacttttcaggcattttcttacttccatgaagcaataccggtgtttaaaaacctttatcatttaactatcacaaataatgatactgtaattgggttctgttgggaatttctaccatttgtgataaagaagtgtccaaatctaaagactcttgtcatcgatggtccattgcactacaatgaagaccgacccaaatctgtttgccactgtttgtcgggatattctttcttattgtcatgtcctttagaggtcttacagataaccgactatagtggaactcctggagaggtggagcaattgaagcattttctagagaaactgtccggtctcaagttggtgaaacttcattctcttacaagatttggtagcgacaagaaaaagttattaatgcttcccagagcttcctctaagtgcaagatcaagcattatgattctctagagaatgctcttcttccatcgctcaagactctcattcttgattcagttaagttctatgatcgttgtggttgttgtgcattccaaaagcttctttctgcttgccctgtgcttgtggaatcagtgatgcgtaatctggaatgggaagattgggaatggtctggctgtgcgtccagtcaaacccttgagagacttactattgaccatagatattgggctgaacataacttggagagctttacttttgatactccgagtcttacctacttagactacaatgctcatgttccgggatcgtatccaactgttaatcttgactcccttgtcgaggctaagctcaatcttggttttacaactgatcttgtagaagatgatgacgatccctttaccagcgatccaaccaatctaatcaaagggttaagaaatgttgagatcttgagactatggatcgtcgtttgtaacgagtttaaatctcgtgtacagaaggtggatcttgtcagcaatctacctgaagaggttcggtgccatatcttgtccttccttcccaccaagcacgctgctttgacttcggttctctcaaagagctggctcaatctgtggaaactagtccctaatcttgacatcgatgactctgaatttcttcttccagaagaggaaatccctgagatattcctcagtaggacactagttgagctgaaaataagaagtgaacgttatgttgattggtggcgtagagatagaggcactgtcttaccaatgcttaagactcttgacattgactcagaatctattcattgtggtacgattgatatgtttctaccttctttccctgtgcttgagtatttacgaatggctaatatggagtggacagagtcggatgaaaccgtgtcaagtgcaaccatcaagctgctaagtattcatggcaccgttgccgaggactatccattagttaacatgaaggcattatttgaggctcgaatcaactttatagttactgaaaaacaaatcaagcgagtaagagcaccaaatgaagattggttacaagatgatgaagttgatgttgttctccgattcagcaatgtggtgaagctcatgaatggcatacaaaatgttcagaaactttacttaactgctgatactatcgaggtgctttctctgtgctgtgaatcggtgccgctgttcaacaacctcaaaacattaggtatcacgagtgaggagggacgaggatggcaagcgatgccagttcttggtctcttacactatatgacggataaatgtggggatgcttgtgattgcatttctcgggaagacaaaggtcgttcgcttacatcttgtccagtgaagaagttagagattcgagggtttagaggaacaatgaaagagatgacaatgataaagcatttcttggtctactttccgtgtctgaaggagatgaacatctatgttgaggagtatgatcctacagagctcagattccctcaagtgtctaaagttatcatacagatgatggaagagtacaacaagttatcgagttgcaatgttcagctccttataactgattatttgtctgaaaagtggactgcagcaggaagaattctctga

SEQ ID NO: 82710 - protein, 977 aa, Arabidopsis thaliana
  peptide (1)..(977): Ceres Seq. ID no. 12667036
MDRISNLPNEIICHIVSFLSAKEAAFASILSKRWRNLFTIVIKLQFDDSVKNEGSLKDFVDGVLALPTSSRVRSCSLECRREFDPTHYDDFNRCICALLKRGILDLKLDICAGRRYSLPLEVFTCKTLVKLELGSDFGGFVVDLVPEDAFLPALETLLLNYIRFKDLRRCAFEKLLSACLVLKELVIHNMEWERWKWSGNISSPTLERLTISHVDLYECEFTRINLDTPNLTYLELSDAVPDDYPIVNLDSLVEVKLDLTLMVDHKYHGYVDDNDTISSNPTNLINGLRNVEIMNLQSPNTFQAFSYFHEAIPVFKNLYHLTITNNDTVIGFCWEFLPFVIKKCPNLKTLVIDGPLHYNEDRPKSVCHCLSGYSFLLSCPLEVLQITDYSGTPGEVEQLKHFLEKLSGLKLVKLHSLTRFGSDKKKLLMLPRASSKCKIKHYDSLENALLPSLKTLILDSVKFYDRCGCCAFQKLLSACPVLVESVMRNLEWEDWEWSGCASSQTLERLTIDHRYWAEHNLESFTFDTPSLTYLDYNAHVPGSYPTVNLDSLVEAKLNLGFTTDLVEDDDDPFTSDPTNLIKGLRNVEILRLWIVVCNEFKSRVQKVDLVSNLPEEVRCHILSFLPTKHAALTSVLSKSWLNLWKLVPNLDIDDSEFLLPEEEIPEIFLSRTLVELKIRSERYVDWWRRDRGTVLPMLKTLDIDSESIHCGTIDMFLPSFPVLEYLRMANMEWTESDETVSSATIKLLSIHGTVAEDYPLVNMKALFEARINFIVTEKQIKRVRAPNEDWLQDDEVDVVLRFSNVVKLMNGIQNVQKLYLTADTIEVLSLCCESVPLFNNLKTLGITSEEGRGWQAMPVLGLLHYMTDKCGDACDCISREDKGRSLTSCPVKKLEIRGFRGTMKEMTMIKHFLVYFPCLKEMNIYVEEYDPTELRFPQVSKVIIQMMEEYNKLSSCNVQLLITDYLSEKWTAAGRIL

SEQ ID NO: 82711 - protein, 788 aa, Arabidopsis thaliana
  peptide (1)..(788): Ceres Seq. ID no. 12667037
MEWERWKWSGNISSPTLERLTISHVDLYECEFTRINLDTPNLTYLELSDAVPDDYPIVNLDSLVEVKLDLTLMVDHKYHGYVDDNDTISSNPTNLINGLRNVEIMNLQSPNTFQAFSYFHEAIPVFKNLYHLTITNNDTVIGFCWEFLPFVIKKCPNLKTLVIDGPLHYNEDRPKSVCHCLSGYSFLLSCPLEVLQITDYSGTPGEVEQLKHFLEKLSGLKLVKLHSLTRFGSDKKKLLMLPRASSKCKIKHYDSLENALLPSLKTLILDSVKFYDRCGCCAFQKLLSACPVLVESVMRNLEWEDWEWSGCASSQTLERLTIDHRYWAEHNLESFTFDTPSLTYLDYNAHVPGSYPTVNLDSLVEAKLNLGFTTDLVEDDDDPFTSDPTNLIKGLRNVEILRLWIVVCNEFKSRVQKVDLVSNLPEEVRCHILSFLPTKHAALTSVLSKSWLNLWKLVPNLDIDDSEFLLPEEEIPEIFLSRTLVELKIRSERYVDWWRRDRGTVLPMLKTLDIDSESIHCGTIDMFLPSFPVLEYLRMANMEWTESDETVSSATIKLLSIHGTVAEDYPLVNMKALFEARINFIVTEKQIKRVRAPNEDWLQDDEVDVVLRFSNVVKLMNGIQNVQKLYLTADTIEVLSLCCESVPLFNNLKTLGITSEEGRGWQAMPVLGLLHYMTDKCGDACDCISREDKGRSLTSCPVKKLEIRGFRGTMKEMTMIKHFLVYFPCLKEMNIYVEEYDPTELRFPQVSKVIIQMMEEYNKLSSCNVQLLITDYLSEKWTAAGRIL

SEQ ID NO: 82712 - protein, 716 aa, Arabidopsis thaliana
  peptide (1)..(716): Ceres Seq. ID no. 12667038
MVDHKYHGYVDDNDTISSNPTNLINGLRNVEIMNLQSPNTFQAFSYFHEAIPVFKNLYHLTITNNDTVIGFCWEFLPFVIKKCPNLKTLVIDGPLHYNEDRPKSVCHCLSGYSFLLSCPLEVLQITDYSGTPGEVEQLKHFLEKLSGLKLVKLHSLTRFGSDKKKLLMLPRASSKCKIKHYDSLENALLPSLKTLILDSVKFYDRCGCCAFQKLLSACPVLVESVMRNLEWEDWEWSGCASSQTLERLTIDHRYWAEHNLESFTFDTPSLTYLDYNAHVPGSYPTVNLDSLVEAKLNLGFTTDLVEDDDDPFTSDPTNLIKGLRNVEILRLWIVVCNEFKSRVQKVDLVSNLPEEVRCHILSFLPTKHAALTSVLSKSWLNLWKLVPNLDIDDSEFLLPEEEIPEIFLSRTLVELKIRSERYVDWWRRDRGTVLPMLKTLDIDSESIHCGTIDMFLPSFPVLEYLRMANMEWTESDETVSSATIKLLSIHGTVAEDYPLVNMKALFEARINFIVTEKQIKRVRAPNEDWLQDDEVDVVLRFSNVVKLMNGIQNVQKLYLTADTIEVLSLCCESVPLFNNLKTLGITSEEGRGWQAMPVLGLLHYMTDKCGDACDCISREDKGRSLTSCPVKKLEIRGFRGTMKEMTMIKHFLVYFPCLKEMNIYVEEYDPTELRFPQVSKVIIQMMEEYNKLSSCNVQLLITDYLSEKWTAAGRIL

SEQ ID NO: 82713 - DNA, 2032 bp, Arabidopsis thaliana
  misc_feature (1)..(2032): Ceres Seq. ID no. 12667043
  misc_feature (1)..(2032): Ortholog of  Ceres SEQ ID NO 15169466 as cited in SEQ ID NO 66135
actctgttctttcctcttcttcttcttcttcttcttcttccctctctctaagctttcttaattctcctctattccttcagaaatcaaaatcttaacagtcgaaactaattaaatctttccgaagtaaagacaacttctgcttctgattctgtcacttttagttaacttttctttcccggcgactcaaagcttaattgtcgccggcgattttttgttctcaagcattgatcctaatgttttccaagtacagtttcattctttgtcttattttcttcttcgtcacagcattttccggcgactccagagctcttgctggaaacaatgagcagaagaacatctctggcttttctgggattgactttccaaatccaatgcgtttcggttctgcttcttcttccacaagcaacgattgcggcttctcttcccctgagaaagaacccaccaaggaacggaccggagaaaacaagacggtgaagtttcacttaaagcgccgggagactacgactacagagaaggcaacaacaaattcagttcttgagcttcaaatccgagatctcacaagaattcagacgcttcacaaaagagttttggagaagaacaaccaaaacactgtttcgcagaagcagaagaagaatgataaagaagttgttaccactactccggtggcttcttccgtggaggagcaggctggtcaattggtggcaacacttgagtctggtatgactctcggttctggcgagtacttcatggacgtgttggttggttcgccaccaaaacacttctccttgattcttgatacagggagtgacttaaactggattcaatgcttgccttgctacgactgtttccagcaaaacggtgcgttttatgaccctaaagcctctgcttcttacaagaacataacttgcaatgaccaaagatgcaacctagtctcatcacctgaccctccaatgccctgcaaatcagataaccaatcatgcccttactactactggtatggggatagctccaacactaccggagattttgcagtagagactttcacggttaacctcacgacaaatggagggagctcggagttgtataatgttgaaaatatgatgttcggttgcggtcattggaaccgaggtctcttccatggtgctgcaggcttgcttggtttaggaagaggcccgctttcgttttcctctcagcttcagtctctttatggtcattccttctcttattgccttgtcgacagaaacagcgataccaacgttagtagcaaactgattttcggagaagacaaggatttgttaagtcacccgaatctgaacttcacttcttttgtcgctgggaaagaaaacctcgtcgacacattttactacgtacaaatcaaatccattctagtcgcgggagaagttctaaacatacctgaagaaacatggaatatctcatcagatggagctggagggacgatcattgattcaggtacaaccttaagttacttcgcagaacctgcatatgaattcatcaagaacaagattgctgagaaagctaaagggaagtatccggtctatagagattttccaatcctagatccttgcttcaacgtctctggcattcataacgttcagctgccagagcttgggattgcttttgcagatggcgctgtttggaacttcccgacagagaattctttcatatggttgaatgaggatttggtttgcttggcaatgctaggaactcccaaatcagcattttcaatcattggaaactaccagcagcagaattttcatatactctatgatacaaagaggtctaggctcgggtatgcacctacaaagtgtgcagatatataatctttcttgtcgatttttaagtccatcaaagcaactgaacacacaataagaacagattcatttttttccctttagattttttcattctttaggatattccttcaaacatgtaatgtatttgctgtagaacaaagatcataccaaactaatgtacttattcaaattcatttctgaatacaaagtgatttaat

SEQ ID NO: 82714 - protein, 535 aa, Arabidopsis thaliana
  peptide (1)..(535): Ceres Seq. ID no. 12667044
MFSKYSFILCLIFFFVTAFSGDSRALAGNNEQKNISGFSGIDFPNPMRFGSASSSTSNDCGFSSPEKEPTKERTGENKTVKFHLKRRETTTTEKATTNSVLELQIRDLTRIQTLHKRVLEKNNQNTVSQKQKKNDKEVVTTTPVASSVEEQAGQLVATLESGMTLGSGEYFMDVLVGSPPKHFSLILDTGSDLNWIQCLPCYDCFQQNGAFYDPKASASYKNITCNDQRCNLVSSPDPPMPCKSDNQSCPYYYWYGDSSNTTGDFAVETFTVNLTTNGGSSELYNVENMMFGCGHWNRGLFHGAAGLLGLGRGPLSFSSQLQSLYGHSFSYCLVDRNSDTNVSSKLIFGEDKDLLSHPNLNFTSFVAGKENLVDTFYYVQIKSILVAGEVLNIPEETWNISSDGAGGTIIDSGTTLSYFAEPAYEFIKNKIAEKAKGKYPVYRDFPILDPCFNVSGIHNVQLPELGIAFADGAVWNFPTENSFIWLNEDLVCLAMLGTPKSAFSIIGNYQQQNFHILYDTKRSRLGYAPTKCADI

SEQ ID NO: 82715 - protein, 489 aa, Arabidopsis thaliana
  peptide (1)..(489): Ceres Seq. ID no. 12667045
MRFGSASSSTSNDCGFSSPEKEPTKERTGENKTVKFHLKRRETTTTEKATTNSVLELQIRDLTRIQTLHKRVLEKNNQNTVSQKQKKNDKEVVTTTPVASSVEEQAGQLVATLESGMTLGSGEYFMDVLVGSPPKHFSLILDTGSDLNWIQCLPCYDCFQQNGAFYDPKASASYKNITCNDQRCNLVSSPDPPMPCKSDNQSCPYYYWYGDSSNTTGDFAVETFTVNLTTNGGSSELYNVENMMFGCGHWNRGLFHGAAGLLGLGRGPLSFSSQLQSLYGHSFSYCLVDRNSDTNVSSKLIFGEDKDLLSHPNLNFTSFVAGKENLVDTFYYVQIKSILVAGEVLNIPEETWNISSDGAGGTIIDSGTTLSYFAEPAYEFIKNKIAEKAKGKYPVYRDFPILDPCFNVSGIHNVQLPELGIAFADGAVWNFPTENSFIWLNEDLVCLAMLGTPKSAFSIIGNYQQQNFHILYDTKRSRLGYAPTKCADI

SEQ ID NO: 82716 - protein, 373 aa, Arabidopsis thaliana
  peptide (1)..(373): Ceres Seq. ID no. 12667046
MTLGSGEYFMDVLVGSPPKHFSLILDTGSDLNWIQCLPCYDCFQQNGAFYDPKASASYKNITCNDQRCNLVSSPDPPMPCKSDNQSCPYYYWYGDSSNTTGDFAVETFTVNLTTNGGSSELYNVENMMFGCGHWNRGLFHGAAGLLGLGRGPLSFSSQLQSLYGHSFSYCLVDRNSDTNVSSKLIFGEDKDLLSHPNLNFTSFVAGKENLVDTFYYVQIKSILVAGEVLNIPEETWNISSDGAGGTIIDSGTTLSYFAEPAYEFIKNKIAEKAKGKYPVYRDFPILDPCFNVSGIHNVQLPELGIAFADGAVWNFPTENSFIWLNEDLVCLAMLGTPKSAFSIIGNYQQQNFHILYDTKRSRLGYAPTKCADI

SEQ ID NO: 82717 - DNA, 3392 bp, Arabidopsis thaliana
  misc_feature (1)..(3392): Ceres Seq. ID no. 12667101
  misc_feature (1)..(3392): Ortholog of  Ceres SEQ ID NO 13654989 as cited in SEQ ID NO 63117
  misc_feature (1)..(3392): Ortholog of  Ceres SEQ ID NO 13584744 as cited in SEQ ID NO 69137
ctctagctcctactttcattacccaattactctctcaacacttctttagtcggcagaaaagattttttttttgagaagcttagcttcaaagggtctttggaggatgttatgatgttgttaccttgcggtctgagatctgaaaggagtaagtgtttttgttttcgttgcagaagaacagagagacaagaggtccttctttgacttggttgtctgaattttccacttcaagattgtttcctacatctccggagattgtctggctgacgagtcctttgtttcttcgtcactaattcagctctcattgtttgtaatttctattcttttagttattgcatgcccttgattgcagttccacagtttttgtgaacttcgtgtgactcgtttgctatttactaatcaagggtcatactcttagtcactctgtggaatgtctcagaaagtgaagacagtaactaagaagcgtgtgtgttgactttgaaaagaatgagaatgttcgaaacgagagcaagggaatggattctccttgtaaagcttgtgcttttcactagtatatggcagcttgcttcagctcttggttcaatgtcttcaattgcaatttcttatggagaaggtggttctgtattctgtggtctgaagtctgatgggtctcatcttgtggtttgctacggatcgaactcagcaatcctctatgggactcctggtcatctccagttcatcggtttaacgggtggagatgggtttatgtgtgggcttctgatgctatctcatcagccttattgttggggaaacagtgcatttattcaaatgggagttcctcaaccaatgaccaaaggagctgagtatttagaagttagtgctggtgattaccatctttgtggtttgaggaagccaatagtgggaagaagaaagaacagcaacattatttcctcttctcttgttgattgttggggttacaatatgacaagaaactttgtctttgataagcagttacattcgctttcggctggttcggagttcaactgcgcgctgtcctctaaagataagtcggttttctgttggggagatgagaatagtagtcaagtaatcagtttaatccccaaggaaaaaaagtttcagaaaattgcagctggtggataccatgtttgtggcattcttgacgggttggaatcgcgagtgctatgttggggaaagagcttagagttcgaagaggaggttacagggacttctacagaagaaaagattcttgatttaccaccaaaagagccactcttagcagtggtaggtgggaagttttatgcttgtggaatcaaacgctatgatcatagtgcggtctgttggggttttttcgtgaacaggagtacacctgctcctacaggtatcggcttttatgatcttgcagcggggaattacttcacttgcggagttctcacagggacttctatgtcacctgtttgttggggtcttggtttccctgcttctatccctttagctgtctcaccaggactctgtatagacactccttgtccaccaggaactcatgaactcagtaaccaagaaaactcgccttgcaaatttactggctctcacatttgcttgccctgtagcaccagttgccctcctggaatgtatcagaaaagcgtatgcacagagagatctgatcaagtttgtgtttacaactgctccagttgttcctcacatgattgctcctcaaactgctcttcttcggctaccagtggaggcaaggaaaaaggaaagttttggtcactgcagctacctattgcaactgcagagattggatttgctctatttttggtagcggttgtctcgataacagcggctttatacattaggtacagattgaggaattgtaggtgctcagaaaatgatacaaggtcttctaaagattcagcctttacgaaagataatggcaaaatccgtccggatcttgatgagctgcaaaagcgcagaagggctagagttttcacttatgaggaacttgaaaaagccgctgatggattcaaagaagaatcaatagtggggaaagggagtttctcatgtgtgtacaaaggagtactgagagatggaaccactgttgcagtgaagagagcgataatgtcatcagacaaacagaagaattcaaatgagtttcgcacggagcttgatctgttatcaagactcaaccatgctcatcttcttagccttcttggatactgtgaagaatgtggagaaaggcttttagtttatgagtttatggcacacggctcactgcacaaccatcttcatggaaagaacaaggccttgaaagagcaactagattgggtcaaaagagtaacgattgctgtccaagctgctagaggaatcgaatacttgcatggttacgcttgccctcccgtgattcaccgggatattaaatcatcaaacattcttatagatgaagaacacaatgctcgagtagctgattttggtctctccttacttggtcctgtcgatagcggctctcctttggcagaactaccagcaggaactctcggttaccttgatcccgagtactatcgacttcactatctcacaaccaaatccgatgtctacagctttggagtcctgcttctcgagatcctaagcggaagaaaagccattgacatgcactacgaagaagggaacatagtagaatgggcagttcctttgatcaaagcaggagatataaacgcactcttggacccggtcttgaaacatccatctgaaatcgaagctttgaaaagaatcgtgagtgtggcttgcaaatgcgtgagaatgagagggaaagatagaccatcaatggataaagtgacaacagcattggaacgagcgcttgcacagctaatgggaaacccgagcagtgagcagccaatattaccaacagaagtggttcttgggagcagcagaatgcacaagaagtcatggaggatcggttcaaaaaggtctggttccgagaacacggaattcagaggcggatcatggataacattcccgagcgtgacatcatcgcagaggaggaaatcatcggcatctgaaggagatgtcgcagaggaggaggatgaagggaggaagcaacaagaagcattgaggagtcttgaggaagagatagggccagcttctcctggacagagcttgttcttgcatcataatttctgaaaacaagtgtctgttttctcaagtctttagtaactaatgacatatataagatattttactctgatgtataatgtgttccttaaggcaggaaagtaacaaagaggcagagagactcttcaagcaagaatgtatcaagtttttttttcaactaattattacaaagttcttttgtataagtgaacctggttatttattattgtactagtggtttttacctgttg

SEQ ID NO: 82718 - protein, 895 aa, Arabidopsis thaliana
  peptide (1)..(895): Ceres Seq. ID no. 12667102
MRMFETRAREWILLVKLVLFTSIWQLASALGSMSSIAISYGEGGSVFCGLKSDGSHLVVCYGSNSAILYGTPGHLQFIGLTGGDGFMCGLLMLSHQPYCWGNSAFIQMGVPQPMTKGAEYLEVSAGDYHLCGLRKPIVGRRKNSNIISSSLVDCWGYNMTRNFVFDKQLHSLSAGSEFNCALSSKDKSVFCWGDENSSQVISLIPKEKKFQKIAAGGYHVCGILDGLESRVLCWGKSLEFEEEVTGTSTEEKILDLPPKEPLLAVVGGKFYACGIKRYDHSAVCWGFFVNRSTPAPTGIGFYDLAAGNYFTCGVLTGTSMSPVCWGLGFPASIPLAVSPGLCIDTPCPPGTHELSNQENSPCKFTGSHICLPCSTSCPPGMYQKSVCTERSDQVCVYNCSSCSSHDCSSNCSSSATSGGKEKGKFWSLQLPIATAEIGFALFLVAVVSITAALYIRYRLRNCRCSENDTRSSKDSAFTKDNGKIRPDLDELQKRRRARVFTYEELEKAADGFKEESIVGKGSFSCVYKGVLRDGTTVAVKRAIMSSDKQKNSNEFRTELDLLSRLNHAHLLSLLGYCEECGERLLVYEFMAHGSLHNHLHGKNKALKEQLDWVKRVTIAVQAARGIEYLHGYACPPVIHRDIKSSNILIDEEHNARVADFGLSLLGPVDSGSPLAELPAGTLGYLDPEYYRLHYLTTKSDVYSFGVLLLEILSGRKAIDMHYEEGNIVEWAVPLIKAGDINALLDPVLKHPSEIEALKRIVSVACKCVRMRGKDRPSMDKVTTALERALAQLMGNPSSEQPILPTEVVLGSSRMHKKSWRIGSKRSGSENTEFRGGSWITFPSVTSSQRRKSSASEGDVAEEEDEGRKQQEALRSLEEEIGPASPGQSLFLHHNF

SEQ ID NO: 82719 - protein, 893 aa, Arabidopsis thaliana
  peptide (1)..(893): Ceres Seq. ID no. 12667103
MFETRAREWILLVKLVLFTSIWQLASALGSMSSIAISYGEGGSVFCGLKSDGSHLVVCYGSNSAILYGTPGHLQFIGLTGGDGFMCGLLMLSHQPYCWGNSAFIQMGVPQPMTKGAEYLEVSAGDYHLCGLRKPIVGRRKNSNIISSSLVDCWGYNMTRNFVFDKQLHSLSAGSEFNCALSSKDKSVFCWGDENSSQVISLIPKEKKFQKIAAGGYHVCGILDGLESRVLCWGKSLEFEEEVTGTSTEEKILDLPPKEPLLAVVGGKFYACGIKRYDHSAVCWGFFVNRSTPAPTGIGFYDLAAGNYFTCGVLTGTSMSPVCWGLGFPASIPLAVSPGLCIDTPCPPGTHELSNQENSPCKFTGSHICLPCSTSCPPGMYQKSVCTERSDQVCVYNCSSCSSHDCSSNCSSSATSGGKEKGKFWSLQLPIATAEIGFALFLVAVVSITAALYIRYRLRNCRCSENDTRSSKDSAFTKDNGKIRPDLDELQKRRRARVFTYEELEKAADGFKEESIVGKGSFSCVYKGVLRDGTTVAVKRAIMSSDKQKNSNEFRTELDLLSRLNHAHLLSLLGYCEECGERLLVYEFMAHGSLHNHLHGKNKALKEQLDWVKRVTIAVQAARGIEYLHGYACPPVIHRDIKSSNILIDEEHNARVADFGLSLLGPVDSGSPLAELPAGTLGYLDPEYYRLHYLTTKSDVYSFGVLLLEILSGRKAIDMHYEEGNIVEWAVPLIKAGDINALLDPVLKHPSEIEALKRIVSVACKCVRMRGKDRPSMDKVTTALERALAQLMGNPSSEQPILPTEVVLGSSRMHKKSWRIGSKRSGSENTEFRGGSWITFPSVTSSQRRKSSASEGDVAEEEDEGRKQQEALRSLEEEIGPASPGQSLFLHHNF

SEQ ID NO: 82720 - protein, 863 aa, Arabidopsis thaliana
  peptide (1)..(863): Ceres Seq. ID no. 12667104
MSSIAISYGEGGSVFCGLKSDGSHLVVCYGSNSAILYGTPGHLQFIGLTGGDGFMCGLLMLSHQPYCWGNSAFIQMGVPQPMTKGAEYLEVSAGDYHLCGLRKPIVGRRKNSNIISSSLVDCWGYNMTRNFVFDKQLHSLSAGSEFNCALSSKDKSVFCWGDENSSQVISLIPKEKKFQKIAAGGYHVCGILDGLESRVLCWGKSLEFEEEVTGTSTEEKILDLPPKEPLLAVVGGKFYACGIKRYDHSAVCWGFFVNRSTPAPTGIGFYDLAAGNYFTCGVLTGTSMSPVCWGLGFPASIPLAVSPGLCIDTPCPPGTHELSNQENSPCKFTGSHICLPCSTSCPPGMYQKSVCTERSDQVCVYNCSSCSSHDCSSNCSSSATSGGKEKGKFWSLQLPIATAEIGFALFLVAVVSITAALYIRYRLRNCRCSENDTRSSKDSAFTKDNGKIRPDLDELQKRRRARVFTYEELEKAADGFKEESIVGKGSFSCVYKGVLRDGTTVAVKRAIMSSDKQKNSNEFRTELDLLSRLNHAHLLSLLGYCEECGERLLVYEFMAHGSLHNHLHGKNKALKEQLDWVKRVTIAVQAARGIEYLHGYACPPVIHRDIKSSNILIDEEHNARVADFGLSLLGPVDSGSPLAELPAGTLGYLDPEYYRLHYLTTKSDVYSFGVLLLEILSGRKAIDMHYEEGNIVEWAVPLIKAGDINALLDPVLKHPSEIEALKRIVSVACKCVRMRGKDRPSMDKVTTALERALAQLMGNPSSEQPILPTEVVLGSSRMHKKSWRIGSKRSGSENTEFRGGSWITFPSVTSSQRRKSSASEGDVAEEEDEGRKQQEALRSLEEEIGPASPGQSLFLHHNF

SEQ ID NO: 82721 - DNA, 588 bp, Arabidopsis thaliana
  misc_feature (1)..(588): Ceres Seq. ID no. 12667105
  misc_feature (1)..(588): Ortholog of  Ceres SEQ ID NO 13594974 as cited in SEQ ID NO 56010
  misc_feature (1)..(588): Ortholog of  Ceres SEQ ID NO 13661512 as cited in SEQ ID NO 61464
atggtgagagtctttcttctctacaacctctttaactcctttcttctttgtttagttcccaagaagcttagagttttcttccctccttcttggtacatcgacgacaagaacccaccaccgcctgatgaatcggaaactgaatctccggtagatctaaaacgagtgtttcagatgttcgacaagaacggagatggacgcatcacaaaggaagagctgaacgattctctagagaatctaggaatctttatgcctgacaaagatctgatccagatgatccagaagatggatgcaaatggagatgggtgtgtagacataaacgagtttgagtctctttatggttcgattgtggaggaaaaggaggaaggggacatgagagacgcgttcaatgtgtttgatcaagacggtgatggatttatcactgttgaggagttgaattctgtgatgacttccttggggctcaagcaaggtaaaaccctagaatgttgtaaagagatgattatgcaagtggatgaagatggagatggtagagtcaattacaaggaattccttcagatgatgaaaagtggtgactttagcaatagatcatga

SEQ ID NO: 82722 - protein, 195 aa, Arabidopsis thaliana
  peptide (1)..(195): Ceres Seq. ID no. 12667106
MVRVFLLYNLFNSFLLCLVPKKLRVFFPPSWYIDDKNPPPPDESETESPVDLKRVFQMFDKNGDGRITKEELNDSLENLGIFMPDKDLIQMIQKMDANGDGCVDINEFESLYGSIVEEKEEGDMRDAFNVFDQDGDGFITVEELNSVMTSLGLKQGKTLECCKEMIMQVDEDGDGRVNYKEFLQMMKSGDFSNRS

SEQ ID NO: 82723 - protein, 138 aa, Arabidopsis thaliana
  peptide (1)..(138): Ceres Seq. ID no. 12667107
MFDKNGDGRITKEELNDSLENLGIFMPDKDLIQMIQKMDANGDGCVDINEFESLYGSIVEEKEEGDMRDAFNVFDQDGDGFITVEELNSVMTSLGLKQGKTLECCKEMIMQVDEDGDGRVNYKEFLQMMKSGDFSNRS

SEQ ID NO: 82724 - protein, 113 aa, Arabidopsis thaliana
  peptide (1)..(113): Ceres Seq. ID no. 12667108
MPDKDLIQMIQKMDANGDGCVDINEFESLYGSIVEEKEEGDMRDAFNVFDQDGDGFITVEELNSVMTSLGLKQGKTLECCKEMIMQVDEDGDGRVNYKEFLQMMKSGDFSNRS

SEQ ID NO: 82725 - DNA, 1260 bp, Arabidopsis thaliana
  misc_feature (1)..(1260): Ceres Seq. ID no. 12667113
  misc_feature (1)..(1260): Ortholog of  Ceres SEQ ID NO 14316144 as cited in SEQ ID NO 52397
atggctgtcaaaatactaccatcttcttcttctgcttcttcttccttagtattcatcatgtccttgttctttctacttctttcacttattgtcccttcatcagttctatcagccactcttcgatctgatattcaagctctagagtctataatacgcagcgttgatccaagttccatctctccatcctcttacctcagcacatgggacttctctgaagacccgtgtgaaggctcagggacgttcttgggagttatgtgttctttccctctggagaacacaactagccgggttatagagatcgatcttgatgatgacggttatgacggtttcctctctgatgaagtaggaaacctaactgagctcactgtccttagcctcaacaaaaacagattccgcggtccagtaccagaatctgtgttccagctccggaaacttaccaaactctcactagcagaaaatttcttcactggagacataccagcagaaatcacgcggctcaaggagctcaaaaccatcgacctgtcgaaaaacagtatcgccggtgaaatccctccaaggatctcagccttgagaagtttgactcacctggtcctatcaaacaaccatctcgatggaagaatacctgcgctcaacggcttgtggaagctacaagtattagaactcggtaacaatcatctttatggaatgcttcctaagcttcccccaagtctaagaactctatcactctgtttcaatagccttgcaggacgtatatcacccttgcataggctaaaacagcttgtgtctttagatgtgagccagaacagattctcaggcaccgttggccatgaaatcctaacattccctgagattgcacgcatcaatgtgtcttttaaccagttcatatccatagaggttattaaagttacaggatcacgcctgcgcatgcttgatgctgaaggaaaccatttacaggggcaccttccgctgaacctggcaacttatgaaaacctaaaggatatcaatctacggagcaacatgttctctggcgatattcctaggatttatgggaaaagactggagaattcatggagaagcttatacttggagaacaactacctgtcaggtatacttcctgaggagtttcaaaagattaccaaacagatcagaggaaacctatcgaacaactgtctgcaatgtcctaagaatgttcaaatctgccaaggaacacaaaagccaaaatcacaatgcaccaatgcaatgctggggagcttggagtag

SEQ ID NO: 82726 - protein, 419 aa, Arabidopsis thaliana
  peptide (1)..(419): Ceres Seq. ID no. 12667114
MAVKILPSSSSASSSLVFIMSLFFLLLSLIVPSSVLSATLRSDIQALESIIRSVDPSSISPSSYLSTWDFSEDPCEGSGTFLGVMCSFPLENTTSRVIEIDLDDDGYDGFLSDEVGNLTELTVLSLNKNRFRGPVPESVFQLRKLTKLSLAENFFTGDIPAEITRLKELKTIDLSKNSIAGEIPPRISALRSLTHLVLSNNHLDGRIPALNGLWKLQVLELGNNHLYGMLPKLPPSLRTLSLCFNSLAGRISPLHRLKQLVSLDVSQNRFSGTVGHEILTFPEIARINVSFNQFISIEVIKVTGSRLRMLDAEGNHLQGHLPLNLATYENLKDINLRSNMFSGDIPRIYGKRLENSWRSLYLENNYLSGILPEEFQKITKQIRGNLSNNCLQCPKNVQICQGTQKPKSQCTNAMLGSLE

SEQ ID NO: 82727 - protein, 400 aa, Arabidopsis thaliana
  peptide (1)..(400): Ceres Seq. ID no. 12667115
MSLFFLLLSLIVPSSVLSATLRSDIQALESIIRSVDPSSISPSSYLSTWDFSEDPCEGSGTFLGVMCSFPLENTTSRVIEIDLDDDGYDGFLSDEVGNLTELTVLSLNKNRFRGPVPESVFQLRKLTKLSLAENFFTGDIPAEITRLKELKTIDLSKNSIAGEIPPRISALRSLTHLVLSNNHLDGRIPALNGLWKLQVLELGNNHLYGMLPKLPPSLRTLSLCFNSLAGRISPLHRLKQLVSLDVSQNRFSGTVGHEILTFPEIARINVSFNQFISIEVIKVTGSRLRMLDAEGNHLQGHLPLNLATYENLKDINLRSNMFSGDIPRIYGKRLENSWRSLYLENNYLSGILPEEFQKITKQIRGNLSNNCLQCPKNVQICQGTQKPKSQCTNAMLGSLE

SEQ ID NO: 82728 - protein, 335 aa, Arabidopsis thaliana
  peptide (1)..(335): Ceres Seq. ID no. 12667116
MCSFPLENTTSRVIEIDLDDDGYDGFLSDEVGNLTELTVLSLNKNRFRGPVPESVFQLRKLTKLSLAENFFTGDIPAEITRLKELKTIDLSKNSIAGEIPPRISALRSLTHLVLSNNHLDGRIPALNGLWKLQVLELGNNHLYGMLPKLPPSLRTLSLCFNSLAGRISPLHRLKQLVSLDVSQNRFSGTVGHEILTFPEIARINVSFNQFISIEVIKVTGSRLRMLDAEGNHLQGHLPLNLATYENLKDINLRSNMFSGDIPRIYGKRLENSWRSLYLENNYLSGILPEEFQKITKQIRGNLSNNCLQCPKNVQICQGTQKPKSQCTNAMLGSLE

SEQ ID NO: 82729 - DNA, 1212 bp, Arabidopsis thaliana
  misc_feature (1)..(1212): Ceres Seq. ID no. 12667121
  misc_feature (1)..(1212): Ortholog of  Ceres SEQ ID NO 13664220 as cited in SEQ ID NO 61151
  misc_feature (1)..(1212): Ortholog of  Ceres SEQ ID NO 13597477 as cited in SEQ ID NO 65160
atggagaagaaaggccagcatggtacatatgaatcaatgatgactcatcatccgatcctctgtatcattgctttatctgtacttttcatagcaatcgacccctttcacatgagtccaatcgggggtcgtgagttcaaacccgtgaagcatgaggttgctccatataaggaagtcatgggaagctggcctagagacaaccttagtcgactgggtaatcatgggaaactggagttcgtggaccaagtctttggtccagagtcattagagtttgatagtttaggtcgtggtccatacacagggttggctgatggaagagtggttagatggatgggtgaagcaatcggatgggagacattttcggtggtaacatcaaaatggtcagaggaagcttgtgtgagaggtgtggattcaacaacaaacaagcaatggaagcacgagaagctgtgtgggaggcctcttggactgagatttcataaagagacaggaaatttgtatattgcagacgcttactatggtctacttgtggttggtcctgaaggagggattgctacgcctttagctactcatgtggaaggaaagcctatactctttgccaatgaccttgacatccatagaaatggctccatcttcttcactgacaccagcaaaagatatgacagagcgaatcatttctttatattactggaaggagaatcaacaggaaggcttctaagatatgacccacctaccaaaacaacacacattgtgctggagggtttggcttttcccaatggaattcaactctctaaagaccaatctttcctcctcttcaccgaaacaaccaattgcagattggtgaagtactggctggagggtccaaagatgggtgaagtcgaggtggtggcagatctcccgggattcccagacaatgtaagaataaatgaagagggtcagttttgggttgcaattgattgttgcagaacaccggcacaagaggttcttacaaacaacccttggataagaagcatctactttcggttgccaataccgatgaagctgcttgcgaaaacgatggggatgagaatgtacactgtgatatcgagattcgacgaggaaggtaaagtcctggaggtgctcgaggatagacaagggaaggtaatgaagctttggattggaacagtggctcataaccacattgccactctaccttatcctttgacaatgaatcaatga

SEQ ID NO: 82730 - protein, 403 aa, Arabidopsis thaliana
  peptide (1)..(403): Ceres Seq. ID no. 12667122
MEKKGQHGTYESMMTHHPILCIIALSVLFIAIDPFHMSPIGGREFKPVKHEVAPYKEVMGSWPRDNLSRLGNHGKLEFVDQVFGPESLEFDSLGRGPYTGLADGRVVRWMGEAIGWETFSVVTSKWSEEACVRGVDSTTNKQWKHEKLCGRPLGLRFHKETGNLYIADAYYGLLVVGPEGGIATPLATHVEGKPILFANDLDIHRNGSIFFTDTSKRYDRANHFFILLEGESTGRLLRYDPPTKTTHIVLEGLAFPNGIQLSKDQSFLLFTETTNCRLVKYWLEGPKMGEVEVVADLPGFPDNVRINEEGQFWVAIDCCRTPAQEVLTNNPWIRSIYFRLPIPMKLLAKTMGMRMYTVISRFDEEGKVLEVLEDRQGKVMKLWIGTVAHNHIATLPYPLTMNQ

SEQ ID NO: 82731 - protein, 391 aa, Arabidopsis thaliana
  peptide (1)..(391): Ceres Seq. ID no. 12667123
MMTHHPILCIIALSVLFIAIDPFHMSPIGGREFKPVKHEVAPYKEVMGSWPRDNLSRLGNHGKLEFVDQVFGPESLEFDSLGRGPYTGLADGRVVRWMGEAIGWETFSVVTSKWSEEACVRGVDSTTNKQWKHEKLCGRPLGLRFHKETGNLYIADAYYGLLVVGPEGGIATPLATHVEGKPILFANDLDIHRNGSIFFTDTSKRYDRANHFFILLEGESTGRLLRYDPPTKTTHIVLEGLAFPNGIQLSKDQSFLLFTETTNCRLVKYWLEGPKMGEVEVVADLPGFPDNVRINEEGQFWVAIDCCRTPAQEVLTNNPWIRSIYFRLPIPMKLLAKTMGMRMYTVISRFDEEGKVLEVLEDRQGKVMKLWIGTVAHNHIATLPYPLTMNQ

SEQ ID NO: 82732 - protein, 390 aa, Arabidopsis thaliana
  peptide (1)..(390): Ceres Seq. ID no. 12667124
MTHHPILCIIALSVLFIAIDPFHMSPIGGREFKPVKHEVAPYKEVMGSWPRDNLSRLGNHGKLEFVDQVFGPESLEFDSLGRGPYTGLADGRVVRWMGEAIGWETFSVVTSKWSEEACVRGVDSTTNKQWKHEKLCGRPLGLRFHKETGNLYIADAYYGLLVVGPEGGIATPLATHVEGKPILFANDLDIHRNGSIFFTDTSKRYDRANHFFILLEGESTGRLLRYDPPTKTTHIVLEGLAFPNGIQLSKDQSFLLFTETTNCRLVKYWLEGPKMGEVEVVADLPGFPDNVRINEEGQFWVAIDCCRTPAQEVLTNNPWIRSIYFRLPIPMKLLAKTMGMRMYTVISRFDEEGKVLEVLEDRQGKVMKLWIGTVAHNHIATLPYPLTMNQ

SEQ ID NO: 82733 - DNA, 909 bp, Arabidopsis thaliana
  misc_feature (1)..(909): Ceres Seq. ID no. 12667146
  misc_feature (1)..(909): Ortholog of  Ceres SEQ ID NO 13655124 as cited in SEQ ID NO 62896
  misc_feature (1)..(909): Ortholog of  Ceres SEQ ID NO 14313540 as cited in SEQ ID NO 68110
  misc_feature (1)..(909): Ortholog of  Ceres SEQ ID NO 14301898 as cited in SEQ ID NO 69243
atggacgttgtcacgttgatgtatggtttgataacttacatcatttacgcttacggcattattcacgagtggtggtcggaagaaacaacagcggtcgtgaccggagcaaacaaaggtataggttttgcggtggtgaagaggttattagagcttggactaactgtagttttaactgcccgaaacgccgaaaatggaagccaagccgctgaatccctccgccgcattggctttggaaacgttcatttttgctgcctcgacatctccgatccttcttccatcgccgcgttcgcctcttggttcggtcgcaacttaggaatactcgacattctggtgaacaatgccgccgtttcatttaacgcggtgggcgagaatttaatcaaagagccagagacaatcatcaagaccaatttctacggtgccaagcttttaacggaggcgcttttgccgttgtttcggcgttccgtctccgttagtcgcatccttaacatgagttcaaggcttggcacattaaataaactgagaagccctagtataagacgaatcctagaaagtgaagaccttaccaatgaacaaatcgatgcgacattgactcaatttctgcaggacgtgaagagcgggacttgggagaagcaaggatggccggagaactggccggactacgccatctcaaagttggccttaaacgcttactctagggttttggctcgacgttacgacggcaaaaaactgagtgtgaattgtttatgccctggtttcactcgtacgtctatgaccggtggtcaggggactcacacggcggatgaggctgctgccattgtagccaagttggtgttgcttcctccggagaagctggctaccggaaagttctatatatgcgtagagtctaaaaaacttatttccaagttgtga

SEQ ID NO: 82734 - protein, 302 aa, Arabidopsis thaliana
  peptide (1)..(302): Ceres Seq. ID no. 12667147
MDVVTLMYGLITYIIYAYGIIHEWWSEETTAVVTGANKGIGFAVVKRLLELGLTVVLTARNAENGSQAAESLRRIGFGNVHFCCLDISDPSSIAAFASWFGRNLGILDILVNNAAVSFNAVGENLIKEPETIIKTNFYGAKLLTEALLPLFRRSVSVSRILNMSSRLGTLNKLRSPSIRRILESEDLTNEQIDATLTQFLQDVKSGTWEKQGWPENWPDYAISKLALNAYSRVLARRYDGKKLSVNCLCPGFTRTSMTGGQGTHTADEAAAIVAKLVLLPPEKLATGKFYICVESKKLISKL

SEQ ID NO: 82735 - protein, 296 aa, Arabidopsis thaliana
  peptide (1)..(296): Ceres Seq. ID no. 12667148
MYGLITYIIYAYGIIHEWWSEETTAVVTGANKGIGFAVVKRLLELGLTVVLTARNAENGSQAAESLRRIGFGNVHFCCLDISDPSSIAAFASWFGRNLGILDILVNNAAVSFNAVGENLIKEPETIIKTNFYGAKLLTEALLPLFRRSVSVSRILNMSSRLGTLNKLRSPSIRRILESEDLTNEQIDATLTQFLQDVKSGTWEKQGWPENWPDYAISKLALNAYSRVLARRYDGKKLSVNCLCPGFTRTSMTGGQGTHTADEAAAIVAKLVLLPPEKLATGKFYICVESKKLISKL

SEQ ID NO: 82736 - DNA, 1881 bp, Arabidopsis thaliana
  misc_feature (1)..(1881): Ceres Seq. ID no. 12667153
  misc_feature (1)..(1881): Ortholog of  Ceres SEQ ID NO 13654989 as cited in SEQ ID NO 63117
  misc_feature (1)..(1881): Ortholog of  Ceres SEQ ID NO 13655640 as cited in SEQ ID NO 63844
atgcctagtgaactcaaagtcttgcatatagttcttgttctgctctatactctgtcttcatctacttacaactccaatggaaactggaccctggagggctctgcagctgacaactccattggtgacaccattttaacgaacaccaagaagcattcctgcggtcaaactttcaacaacgaatccattcccataaaagattcgtctttcagcttccacttcctctttggaatagtacctgagcatacacagtccggttcacatggcatgtctttcgttatctctcctacagcaggccttccaggagcttcctccgatcagtacctcggattattcaatgaaacaaccaacggtaaatcatcaaaccacgttatagctatcgagttagatatacaaaaagaccaagagttcggagatattgatgataatcatgttgcaatggtaatgcggctttctatcgtttatagtcatcctgatcaacagctcaatgttactttattcccggctgagatccctgttccgccacggaaaccactgctgtctttgaatcgagatctctccccgtattttttggaggagatgtattatggctacacggcatcgactggatccattggagcatttcattatatgttgagttcgtacgctactccaaaagttgagaatccaacatgggagttcatcgtagtcccaacccttcctccatatccgaagaaatcgtctgacagaacaaagaagattttagcggtctgcttaacgcttgctgtgttcgctgtgtttgtcgcctcgggaatctgttttgtcttctatacgaggcataagaaggttaaggaggttcttgaggaatgggagattcaatatggacctcataggtttgcctataaggagcttctcaatgccacaaaggatttcaaggagaaacaacttcttggaaaaggaggctttggtcaagtctttaaaggaacgctcccgggttccaatgcagagatcgctgtaaaacggacttctcatgattcaagacaaggcatgagcgagtttctagccgagatatcgaccattggtcgtctcaggcatccaaatctagtcaggcttctgggatattgtaggcataaggagaatctctacttggtttatgactttacgcccaatggaagccttgacaagtatctagaccgtaatgagaatcaagaacggctcacttgggaacaacgtttcaagatcatcaaagatgttgcatctgctctactacacctgcatcaagaatgggtacaaatcatcattcatagagatatcaaaccagctaatgtcctaatcgaccacgaaatgaatgcaaggatcggggatttcggattggcaaagctgtatgatcagggacttgaccctcagacatctagagtagcgggaacatttggttatatcgcacctgagctcctaagaacaggaagagcgaccacaagcactgatgtttatgcctttgggttggtaatgcttgaagttgtttgtggtagaagaatgattgagcgacgtgcaccggaaaatgaagaagttcttgtggattggatcttagagctttgggaaagtgggaaacttttcgatgcagctgaggaaagtatccgtcaagaacaaaacaggggagaaatcgagcttcttttgaagctaggtctgttgtgtgcacatcacactgaactgattagaccgaacatgagtgcggttatgcagatcttgaatggcgtttcgcagcttccagataatcttcttgatgtcgtaagagctgagaacttgagaggaatgcctgaaacatcaatcgaagtactacttggtcttaatctgtattcagttggtacaatgacattaacaaattctttcttgtcccatggacgctga

SEQ ID NO: 82737 - protein, 626 aa, Arabidopsis thaliana
  peptide (1)..(626): Ceres Seq. ID no. 12667154
MPSELKVLHIVLVLLYTLSSSTYNSNGNWTLEGSAADNSIGDTILTNTKKHSCGQTFNNESIPIKDSSFSFHFLFGIVPEHTQSGSHGMSFVISPTAGLPGASSDQYLGLFNETTNGKSSNHVIAIELDIQKDQEFGDIDDNHVAMVMRLSIVYSHPDQQLNVTLFPAEIPVPPRKPLLSLNRDLSPYFLEEMYYGYTASTGSIGAFHYMLSSYATPKVENPTWEFIVVPTLPPYPKKSSDRTKKILAVCLTLAVFAVFVASGICFVFYTRHKKVKEVLEEWEIQYGPHRFAYKELLNATKDFKEKQLLGKGGFGQVFKGTLPGSNAEIAVKRTSHDSRQGMSEFLAEISTIGRLRHPNLVRLLGYCRHKENLYLVYDFTPNGSLDKYLDRNENQERLTWEQRFKIIKDVASALLHLHQEWVQIIIHRDIKPANVLIDHEMNARIGDFGLAKLYDQGLDPQTSRVAGTFGYIAPELLRTGRATTSTDVYAFGLVMLEVVCGRRMIERRAPENEEVLVDWILELWESGKLFDAAEESIRQEQNRGEIELLLKLGLLCAHHTELIRPNMSAVMQILNGVSQLPDNLLDVVRAENLRGMPETSIEVLLGLNLYSVGTMTLTNSFLSHGR

SEQ ID NO: 82738 - protein, 538 aa, Arabidopsis thaliana
  peptide (1)..(538): Ceres Seq. ID no. 12667155
MSFVISPTAGLPGASSDQYLGLFNETTNGKSSNHVIAIELDIQKDQEFGDIDDNHVAMVMRLSIVYSHPDQQLNVTLFPAEIPVPPRKPLLSLNRDLSPYFLEEMYYGYTASTGSIGAFHYMLSSYATPKVENPTWEFIVVPTLPPYPKKSSDRTKKILAVCLTLAVFAVFVASGICFVFYTRHKKVKEVLEEWEIQYGPHRFAYKELLNATKDFKEKQLLGKGGFGQVFKGTLPGSNAEIAVKRTSHDSRQGMSEFLAEISTIGRLRHPNLVRLLGYCRHKENLYLVYDFTPNGSLDKYLDRNENQERLTWEQRFKIIKDVASALLHLHQEWVQIIIHRDIKPANVLIDHEMNARIGDFGLAKLYDQGLDPQTSRVAGTFGYIAPELLRTGRATTSTDVYAFGLVMLEVVCGRRMIERRAPENEEVLVDWILELWESGKLFDAAEESIRQEQNRGEIELLLKLGLLCAHHTELIRPNMSAVMQILNGVSQLPDNLLDVVRAENLRGMPETSIEVLLGLNLYSVGTMTLTNSFLSHGR

SEQ ID NO: 82739 - protein, 481 aa, Arabidopsis thaliana
  peptide (1)..(481): Ceres Seq. ID no. 12667156
MVMRLSIVYSHPDQQLNVTLFPAEIPVPPRKPLLSLNRDLSPYFLEEMYYGYTASTGSIGAFHYMLSSYATPKVENPTWEFIVVPTLPPYPKKSSDRTKKILAVCLTLAVFAVFVASGICFVFYTRHKKVKEVLEEWEIQYGPHRFAYKELLNATKDFKEKQLLGKGGFGQVFKGTLPGSNAEIAVKRTSHDSRQGMSEFLAEISTIGRLRHPNLVRLLGYCRHKENLYLVYDFTPNGSLDKYLDRNENQERLTWEQRFKIIKDVASALLHLHQEWVQIIIHRDIKPANVLIDHEMNARIGDFGLAKLYDQGLDPQTSRVAGTFGYIAPELLRTGRATTSTDVYAFGLVMLEVVCGRRMIERRAPENEEVLVDWILELWESGKLFDAAEESIRQEQNRGEIELLLKLGLLCAHHTELIRPNMSAVMQILNGVSQLPDNLLDVVRAENLRGMPETSIEVLLGLNLYSVGTMTLTNSFLSHGR

SEQ ID NO: 82740 - DNA, 944 bp, Arabidopsis thaliana
  misc_feature (1)..(944): Ceres Seq. ID no. 12667157
  misc_feature (1)..(944): Ortholog of  Ceres SEQ ID NO 13660094 as cited in SEQ ID NO 60820
ctttttttagttcccaaaagatcgaacttggcgctactttcattttctcatctctgtttttccaacatcctaagaacagagttcgttgctccttttgttttctttaaagaaaaagtcagattcagatacatacatactctgaagaacatgtcgacgcgaagacgaactttactcaaagttataattcttggagacagcggggttggcaaaacatcgttgatgaatcaatatgtgaataacaagtttagtcaacagtacaaagctacgatcggagctgattttgtcactaaggagcttcaaattgatgacaggcttgtcacattgcaaatatgggacactgctgggcaagagaggtttcaaagtcttggtgttgctttctatagaggtgcagattgttgtgttcttgtctatgatgtgaatcacttgaagtcatttgaatctctcgacaattggcacaacgagtttcttacacgggctagtccacgtgacccaatggcattcccttttatacttcttggtaataaggttgatattgatggaggaaatagccgagtggtatctgagaagaaggctagagaatggtgtgctgaaaagggaaacatagtctatttcgagacatcggctaaagaagattacaatgtcgatgactccttcttgtgcatcacaaaacttgcccttgcaaatgaacgcgaccaagatatatatttccagccagatactggttcggtgcctgagcaaagaggaggttgtgcttgctgaatgctgaagaaacatttcttactctcttgatttatgcattacttgttgtgtgtgtctataatcttaatgctgagaaggaccaataaaacttgtattgttccctaagtaaggttttgttacctttctggttcttcatctttgacatttggtggttcacgatttgtatgtaacaacagttcaagtgt

SEQ ID NO: 82741 - protein, 252 aa, Arabidopsis thaliana
  peptide (1)..(252): Ceres Seq. ID no. 12667158
LFLVPKRSNLALLSFSHLCFSNILRTEFVAPFVFFKEKVRFRYIHTLKNMSTRRRTLLKVIILGDSGVGKTSLMNQYVNNKFSQQYKATIGADFVTKELQIDDRLVTLQIWDTAGQERFQSLGVAFYRGADCCVLVYDVNHLKSFESLDNWHNEFLTRASPRDPMAFPFILLGNKVDIDGGNSRVVSEKKAREWCAEKGNIVYFETSAKEDYNVDDSFLCITKLALANERDQDIYFQPDTGSVPEQRGGCAC

SEQ ID NO: 82742 - protein, 203 aa, Arabidopsis thaliana
  peptide (1)..(203): Ceres Seq. ID no. 12667159
MSTRRRTLLKVIILGDSGVGKTSLMNQYVNNKFSQQYKATIGADFVTKELQIDDRLVTLQIWDTAGQERFQSLGVAFYRGADCCVLVYDVNHLKSFESLDNWHNEFLTRASPRDPMAFPFILLGNKVDIDGGNSRVVSEKKAREWCAEKGNIVYFETSAKEDYNVDDSFLCITKLALANERDQDIYFQPDTGSVPEQRGGCAC

SEQ ID NO: 82743 - protein, 179 aa, Arabidopsis thaliana
  peptide (1)..(179): Ceres Seq. ID no. 12667160
MNQYVNNKFSQQYKATIGADFVTKELQIDDRLVTLQIWDTAGQERFQSLGVAFYRGADCCVLVYDVNHLKSFESLDNWHNEFLTRASPRDPMAFPFILLGNKVDIDGGNSRVVSEKKAREWCAEKGNIVYFETSAKEDYNVDDSFLCITKLALANERDQDIYFQPDTGSVPEQRGGCAC

SEQ ID NO: 82744 - DNA, 1474 bp, Arabidopsis thaliana
  misc_feature (1)..(1474): Ceres Seq. ID no. 12667177
  misc_feature (1)..(1474): Ortholog of  Ceres SEQ ID NO 15178173 as cited in SEQ ID NO 54139
  misc_feature (1)..(1474): Ortholog of  Ceres SEQ ID NO 14301836 as cited in SEQ ID NO 67386
aaaaaaaacttatcttatgaatctattaagtagatctctaatctctttcctactatttatatagactccttttgttgtagcctacttcttgcatattaaccccttgtgtctctcacaatcccactagtactgaaacatagagatagacttagctcaagataagctaatttgttttcactctaatatagagagagagagaaagagatcggagaggaaaaaatggcgggaggaatagggctgggagacacgacatacacgaaggtgtttgtgggaggattagcttgggagacgcataaggagacgatgaagaagcactttgagcagtttggagagattttggaagccgtagtcatcaccgacaaggcctccggtagatccaagggctacggattcgtgacattcagggaagcggaggcggcgaggagtgcttgtgtggatgctactccggtgatcgacgggagaagagcaaattgcaacctcgcctctctcggtcttcaaagatccaaaccctccactcctaaccatggaggaggaggcaggattaacaatatgagagtgatgatgagcacaatgcagactggttttggaccacctccaccaccacaaccacccaccttcactcactatccccatctccctctcaatctctttgggtactctccatactcgccagactactcatcattccctacgaacttatacggcatgtacggctgcacttctggaggacaatacggagtctatggaaacagaaacagcggaggcggtggactaaccgcagcagccgcatccgctactcctttttatccttgtggtggaggacatggtggggtccagttctctcaaccacaaccattttatcatcacttgtcttcttataaccctcaccattactctcctccgaccttttctatgcaacaaggcgtaacaggctttccgcttcaaccacctcttattccttaccgttaaagaagcttagagtctttggtagctatcaagcttcatatcatcatcttcttcttctcaggtcaagagccattctatggtttaaaggatgctcctggctaatctcagcacttagtttctctccctctgctctaaaagctaccccattttatggaatttggaggtggctttttaagcagatcccaatgggatctcctgtttcagatggtgatcatgtcgtatttgtcatctctcaccttcttgcaattgcatcttctcgagagaatgggtttctctttgagagatattgctaatggagcatcatcatcatcaatcactcatgtgccaatctcaagctgatgcatgtatcagcttaattagtttatgttgttttagcctaaggatggctaatcaacaagacaaagaaaatgtctgttaggataatgtaaaaaaaaaatcaagcaccaaaacaattttctgtttgaaagactgaaaaaacgattgcataattaagcaaaatgatcagcac

SEQ ID NO: 82745 - protein, 249 aa, Arabidopsis thaliana
  peptide (1)..(249): Ceres Seq. ID no. 12667178
MAGGIGLGDTTYTKVFVGGLAWETHKETMKKHFEQFGEILEAVVITDKASGRSKGYGFVTFREAEAARSACVDATPVIDGRRANCNLASLGLQRSKPSTPNHGGGGRINNMRVMMSTMQTGFGPPPPPQPPTFTHYPHLPLNLFGYSPYSPDYSSFPTNLYGMYGCTSGGQYGVYGNRNSGGGGLTAAAASATPFYPCGGGHGGVQFSQPQPFYHHLSSYNPHHYSPPTFSMQQGVTGFPLQPPLIPYR

SEQ ID NO: 82746 - protein, 221 aa, Arabidopsis thaliana
  peptide (1)..(221): Ceres Seq. ID no. 12667179
MKKHFEQFGEILEAVVITDKASGRSKGYGFVTFREAEAARSACVDATPVIDGRRANCNLASLGLQRSKPSTPNHGGGGRINNMRVMMSTMQTGFGPPPPPQPPTFTHYPHLPLNLFGYSPYSPDYSSFPTNLYGMYGCTSGGQYGVYGNRNSGGGGLTAAAASATPFYPCGGGHGGVQFSQPQPFYHHLSSYNPHHYSPPTFSMQQGVTGFPLQPPLIPYR

SEQ ID NO: 82747 - protein, 139 aa, Arabidopsis thaliana
  peptide (1)..(139): Ceres Seq. ID no. 12667180
MRVMMSTMQTGFGPPPPPQPPTFTHYPHLPLNLFGYSPYSPDYSSFPTNLYGMYGCTSGGQYGVYGNRNSGGGGLTAAAASATPFYPCGGGHGGVQFSQPQPFYHHLSSYNPHHYSPPTFSMQQGVTGFPLQPPLIPYR

SEQ ID NO: 82748 - DNA, 2157 bp, Arabidopsis thaliana
  misc_feature (1)..(2157): Ceres Seq. ID no. 12667185
  misc_feature (1)..(2157): Ortholog of  Ceres SEQ ID NO 13657677 as cited in SEQ ID NO 66119
atgatcctatgtctccgtctctgtctcagagcttcgagatctttcttctctatttctactaccaacaacaacaataacctctcacgcttcctctttcgattctctactcttcctcattgcgctgcatcgtcttcttcttcatcttccaatctcgagtcttattacgctaatctcattttgagctctcacggagatagtaataaacctaatcggaagtggtcttctcatcagtttcgtcttcttctaactgatccaaatttgcttattagagtcctcaatatgattcgggtcaaacccgaaatcgcgtttcggtttttcaattggatacagagacagagcgatgtgaagcagtcaaggcaagcttttgctgcgatgttggagattttagctgagaatgatttgatgagtgaagcttatttggttgctgagaggagtattgatcttggtatgcacgaaattgatgatcttttgattgatgggagctttgataagttgattgctctcaagcttttagatctgttgttgtgggtttacactaagaaatctatggcggagaagtttttgttgagttttgagaagatgattaggaaagggtttttacctagtgttagaaattgtaacatagttttgaaggttcttagggattcaaggatgatgaataaggcttcagcggtttatgagacgatgattgagcatggtattatgcctacggttattacatttaatactatgttggattcttgtttcaaggctggtgatttggagcgagttgacaagatttggttagagatgaagagaagaaatattgaatttagtgaggtgacttacaatatactgatcaatggattttccaagaatggtaaaatggaggaagctagacggtttcatggagatatgcggagatcggggttcgctgttacaccttactcgtttaacccgttgattgaagggtattgcaaacaaggcttgtttgatgatgcttggggagttacagacgaaatgctcaatgcgggtatttatccaaccacatccacgtataatatttatatatgtgctctctgcgattttggaagaatagatgatgccagagagctgttatctagtatggctgctccagatgttgtgtcttataacactctgatgcatggatacatcaagatggggaagtttgtagaggcttctctcttgtttgatgacttgagagctggggatatccatcccagtattgtgacctataatactctaatagatggtctttgtgagtcagggaacttggaaggtgctcagcggttaaaagaagagatgaccacccaactgatatttcctgatgtgattacgtacacaactcttgtaaaaggatttgttaagaatgggaatctttccatggctactgaagtttatgacgagatgctgaggaaagggattaaacctgatggttatgcatacactacaagggctgttggtgaattgcgacttggagattcagacaaagcatttcgtctgcacgaagagatggtggcaacggatcatcatgctccagatctgaccatctataacgttcgtatagatggactctgcaaggttgggaatctggtaaaagcgattgagtttcagcgtaagattttcagagttggtcttgtcccagatcatgttacttacaccacggttattcgcggttatttggagaatggccagtttaagatggccagaaacttgtatgatgaaatgctgagaaaaaggttatatccctctgtgattacctactttgtgttgatttatggtcatgcaaaagctggaaggctagaacaggccttccagtactccaccgagatgaaaaagagaggcgttcgtccaaatgtcatgacgcacaatgctcttttatatggcatgtgcaaagctggtaatatagatgaagcttacagatacttgtgcaagatggaagaagaagggattccaccaaataaatatagctacactatgcttataagcaagaactgtgattttgaaaagtgggaagaggttgttaaattgtataaagagatgctagataaagagattgagccagatggttacacacatagagccttgttcaaacatttggagaaagaccacgagtcacgagaggttgagttccttgaaaggctattactcagttga

SEQ ID NO: 82749 - protein, 718 aa, Arabidopsis thaliana
  peptide (1)..(718): Ceres Seq. ID no. 12667186
MILCLRLCLRASRSFFSISTTNNNNNLSRFLFRFSTLPHCAASSSSSSSNLESYYANLILSSHGDSNKPNRKWSSHQFRLLLTDPNLLIRVLNMIRVKPEIAFRFFNWIQRQSDVKQSRQAFAAMLEILAENDLMSEAYLVAERSIDLGMHEIDDLLIDGSFDKLIALKLLDLLLWVYTKKSMAEKFLLSFEKMIRKGFLPSVRNCNIVLKVLRDSRMMNKASAVYETMIEHGIMPTVITFNTMLDSCFKAGDLERVDKIWLEMKRRNIEFSEVTYNILINGFSKNGKMEEARRFHGDMRRSGFAVTPYSFNPLIEGYCKQGLFDDAWGVTDEMLNAGIYPTTSTYNIYICALCDFGRIDDARELLSSMAAPDVVSYNTLMHGYIKMGKFVEASLLFDDLRAGDIHPSIVTYNTLIDGLCESGNLEGAQRLKEEMTTQLIFPDVITYTTLVKGFVKNGNLSMATEVYDEMLRKGIKPDGYAYTTRAVGELRLGDSDKAFRLHEEMVATDHHAPDLTIYNVRIDGLCKVGNLVKAIEFQRKIFRVGLVPDHVTYTTVIRGYLENGQFKMARNLYDEMLRKRLYPSVITYFVLIYGHAKAGRLEQAFQYSTEMKKRGVRPNVMTHNALLYGMCKAGNIDEAYRYLCKMEEEGIPPNKYSYTMLISKNCDFEKWEEVVKLYKEMLDKEIEPDGYTHRALFKHLEKDHESREVEFLERLLLS

SEQ ID NO: 82750 - protein, 625 aa, Arabidopsis thaliana
  peptide (1)..(625): Ceres Seq. ID no. 12667187
MIRVKPEIAFRFFNWIQRQSDVKQSRQAFAAMLEILAENDLMSEAYLVAERSIDLGMHEIDDLLIDGSFDKLIALKLLDLLLWVYTKKSMAEKFLLSFEKMIRKGFLPSVRNCNIVLKVLRDSRMMNKASAVYETMIEHGIMPTVITFNTMLDSCFKAGDLERVDKIWLEMKRRNIEFSEVTYNILINGFSKNGKMEEARRFHGDMRRSGFAVTPYSFNPLIEGYCKQGLFDDAWGVTDEMLNAGIYPTTSTYNIYICALCDFGRIDDARELLSSMAAPDVVSYNTLMHGYIKMGKFVEASLLFDDLRAGDIHPSIVTYNTLIDGLCESGNLEGAQRLKEEMTTQLIFPDVITYTTLVKGFVKNGNLSMATEVYDEMLRKGIKPDGYAYTTRAVGELRLGDSDKAFRLHEEMVATDHHAPDLTIYNVRIDGLCKVGNLVKAIEFQRKIFRVGLVPDHVTYTTVIRGYLENGQFKMARNLYDEMLRKRLYPSVITYFVLIYGHAKAGRLEQAFQYSTEMKKRGVRPNVMTHNALLYGMCKAGNIDEAYRYLCKMEEEGIPPNKYSYTMLISKNCDFEKWEEVVKLYKEMLDKEIEPDGYTHRALFKHLEKDHESREVEFLERLLLS

SEQ ID NO: 82751 - protein, 594 aa, Arabidopsis thaliana
  peptide (1)..(594): Ceres Seq. ID no. 12667188
MLEILAENDLMSEAYLVAERSIDLGMHEIDDLLIDGSFDKLIALKLLDLLLWVYTKKSMAEKFLLSFEKMIRKGFLPSVRNCNIVLKVLRDSRMMNKASAVYETMIEHGIMPTVITFNTMLDSCFKAGDLERVDKIWLEMKRRNIEFSEVTYNILINGFSKNGKMEEARRFHGDMRRSGFAVTPYSFNPLIEGYCKQGLFDDAWGVTDEMLNAGIYPTTSTYNIYICALCDFGRIDDARELLSSMAAPDVVSYNTLMHGYIKMGKFVEASLLFDDLRAGDIHPSIVTYNTLIDGLCESGNLEGAQRLKEEMTTQLIFPDVITYTTLVKGFVKNGNLSMATEVYDEMLRKGIKPDGYAYTTRAVGELRLGDSDKAFRLHEEMVATDHHAPDLTIYNVRIDGLCKVGNLVKAIEFQRKIFRVGLVPDHVTYTTVIRGYLENGQFKMARNLYDEMLRKRLYPSVITYFVLIYGHAKAGRLEQAFQYSTEMKKRGVRPNVMTHNALLYGMCKAGNIDEAYRYLCKMEEEGIPPNKYSYTMLISKNCDFEKWEEVVKLYKEMLDKEIEPDGYTHRALFKHLEKDHESREVEFLERLLLS

SEQ ID NO: 82752 - DNA, 672 bp, Arabidopsis thaliana
  misc_feature (1)..(672): Ceres Seq. ID no. 12667197
  misc_feature (1)..(672): Ortholog of  Ceres SEQ ID NO 15177004 as cited in SEQ ID NO 57554
  misc_feature (1)..(672): Ortholog of  Ceres SEQ ID NO 13662587 as cited in SEQ ID NO 63275
  misc_feature (1)..(672): Ortholog of  Ceres SEQ ID NO 13599500 as cited in SEQ ID NO 0
agctctctccctctccctctccctctccatctctctgctcgcttgtgacagtaaacatgggagctctcaattatctttctgagtatttctctaaccatttctacgtctcaatacgaaaacggaagaaacgtaaagtcatgcagacggtgaatattaaggtgaagatcgactgtgacggatgcgaacgcaaaatcaagaacgctgtttcctccatcaaaggagcaaaatcagtggaagtgaacagaaagatgcacaaagtaacggtgagtggctacgttgatcccaagaaagtgctgaagacagtgcagagcactgggaaaaagaaagctgagctgtggccgtatgttccatacacaatggtggcttatccatatgccgccggagcttacgacaagagagccccgccgggttttgtgaggaagtcggagcaggctcaggcgcagccgggaagtactgacgataagctcatgtccctctttagcgacgagaaccctaacgcctgcaccgttatgtgaataagtatagatagcatgagccgatgttataatttgtaatgtataacgttttatgaagttaaagtactggaaccttttttgttactgtattatgtgagaagcaacgcaacatatagtaattactctgcgtttaactagtagattatttaatgatata

SEQ ID NO: 82753 - protein, 170 aa, Arabidopsis thaliana
  peptide (1)..(170): Ceres Seq. ID no. 12667198
LSPSPSPSPSLCSLVTVNMGALNYLSEYFSNHFYVSIRKRKKRKVMQTVNIKVKIDCDGCERKIKNAVSSIKGAKSVEVNRKMHKVTVSGYVDPKKVLKTVQSTGKKKAELWPYVPYTMVAYPYAAGAYDKRAPPGFVRKSEQAQAQPGSTDDKLMSLFSDENPNACTVM

SEQ ID NO: 82754 - protein, 152 aa, Arabidopsis thaliana
  peptide (1)..(152): Ceres Seq. ID no. 12667199
MGALNYLSEYFSNHFYVSIRKRKKRKVMQTVNIKVKIDCDGCERKIKNAVSSIKGAKSVEVNRKMHKVTVSGYVDPKKVLKTVQSTGKKKAELWPYVPYTMVAYPYAAGAYDKRAPPGFVRKSEQAQAQPGSTDDKLMSLFSDENPNACTVM

SEQ ID NO: 82755 - protein, 125 aa, Arabidopsis thaliana
  peptide (1)..(125): Ceres Seq. ID no. 12667200
MQTVNIKVKIDCDGCERKIKNAVSSIKGAKSVEVNRKMHKVTVSGYVDPKKVLKTVQSTGKKKAELWPYVPYTMVAYPYAAGAYDKRAPPGFVRKSEQAQAQPGSTDDKLMSLFSDENPNACTVM

SEQ ID NO: 82756 - DNA, 498 bp, Arabidopsis thaliana
  misc_feature (1)..(498): Ceres Seq. ID no. 12667216
  misc_feature (1)..(498): Ortholog of  Ceres SEQ ID NO 13596338 as cited in SEQ ID NO 68005
atggagaatctggtgggacttcttagaatcagagtgaaaagagggattaatcttgttagtcgtgattctaataccagcgaccctttcgtcgtcgtaaccatgggttctcagaaattgaagacacgtggtgtggaaaatagctgcaaccctgagtgggacgatgaattgacgcttggaatcaatgatcctaatcaacatgtgactctcgaagtgtatgataaagatacgttcacttcccatgacccgatgggagatgcggaaatagacatcaagccgtttttcgaggttcaaggaacggatattcaagaactcactaatggaaccgagatccgtagagtgaagccgagtggagataactgtttggctgaagagagtaggatcatcttcagtaatggaaagattcttcaagacatgattctccagctgagaaatgtagagagtggtgaggttgagatccaaatcgagtggatcaatgttactggttcaagcgatttttga

SEQ ID NO: 82757 - protein, 165 aa, Arabidopsis thaliana
  peptide (1)..(165): Ceres Seq. ID no. 12667217
MENLVGLLRIRVKRGINLVSRDSNTSDPFVVVTMGSQKLKTRGVENSCNPEWDDELTLGINDPNQHVTLEVYDKDTFTSHDPMGDAEIDIKPFFEVQGTDIQELTNGTEIRRVKPSGDNCLAEESRIIFSNGKILQDMILQLRNVESGEVEIQIEWINVTGSSDF

SEQ ID NO: 82758 - protein, 132 aa, Arabidopsis thaliana
  peptide (1)..(132): Ceres Seq. ID no. 12667218
MGSQKLKTRGVENSCNPEWDDELTLGINDPNQHVTLEVYDKDTFTSHDPMGDAEIDIKPFFEVQGTDIQELTNGTEIRRVKPSGDNCLAEESRIIFSNGKILQDMILQLRNVESGEVEIQIEWINVTGSSDF

SEQ ID NO: 82759 - protein, 83 aa, Arabidopsis thaliana
  peptide (1)..(83): Ceres Seq. ID no. 12667219
MGDAEIDIKPFFEVQGTDIQELTNGTEIRRVKPSGDNCLAEESRIIFSNGKILQDMILQLRNVESGEVEIQIEWINVTGSSDF

SEQ ID NO: 82760 - DNA, 1821 bp, Arabidopsis thaliana
  misc_feature (1)..(1821): Ceres Seq. ID no. 12667224
  misc_feature (1)..(1821): Ortholog of  Ceres SEQ ID NO 13594037 as cited in SEQ ID NO 55666
  misc_feature (1)..(1821): Ortholog of  Ceres SEQ ID NO 13657707 as cited in SEQ ID NO 66407
aatatcccacatctctactcatccacattagtcaaagatctctattggtacttctcaaatggatcacaaaatcctactaacacctcccaaatctttatacaccaaatgtatcataaccatcatttacgtcgtatcaatatctcatctaaatgcccatttcataacttcatgcaaacaaaccccataccctagcgtctgcgaccaccacatgtctaattcacctctcaaaactttagacgaccaaacggatgggttcactttccacgaccttgtggtcagctccaccatggaccaggccgtgcaactacaccgccttgtctcttccttgaaacagcatcattctctccacaaacacgcaacatcagctttgtttgactgcttggagctctacgaagacactatagaccaactcaaccactctcggagatcgtacggtcaatattcttcgccacatgatagacaaacctcgttaagcgcggccatagctaatcaagacacttgcagaaacggatttagagattttaagttaacctcttcgtattcaaagtatttcccggtacaatttcacaggaatctcactaagtctattagcaactctttggcagttactaaggctgctgctgaggctgaggcggttgccgagaaatatccatcgacggggttcactaaattcagcaaacaaagaagtagtgccggaggtggtagccaccggagattattgttgttttccgacgagaaatttccatcgtggttccctctttccgaccgtaaactactggaagattccaaaactacggcaaaagccgatcttgtggtggctaaggacggttcgggtcactacacaagcattcaacaagcggtaaacgcagctgccaaacttcctcggagaaaccagagacttgtgatatacgttaaagccggcgtttacagagaaaacgtggtaatcaagaaatcgatcaagaacgtgatggttatcggagatggcatcgattctaccatcgtcaccggtaataggaacgttcaagatggcacgacgacgtttaggtccgcaacttttgctgtttccggcaacggttttatcgcacaaggcataacattcgagaacacggcaggaccggagaaacatcaggcggtggctctccgatcaagttcagacttctccgtcttctacgcctgctctttcaaaggctatcaagacactctctaccttcattctagtcgtcagttcttgagaaactgcaatatttacggaaccgtcgatttcatcttcggagacgcaaccgccatcctccaaaactgtaacatctacgctcgtaagccgatgagcggccagaaaaacacgatcaccgctcaatcacgcaaagaacccgacgagactactggcttcgtcatccagagctcgacggtggctactgcgtcggaaacttatttaggacggccgtggagatcgcattcgaggacggttttcatgaaatgtaatcttggagcgttggtgagtccggcgggatggttgccttggagtggtagttttgctcttagcactctttattacggtgagtatggtaataccggcgccggagcaagtgtctccggtagagttaagtggccaggttatcatgttataaagacggtgacagaggcggaaaaattcacggtggagaatttcttggacggaaactattggattacggctacgggagtaccggtcaacgatggactttgatttttttcttaaaagaattaattttgttagtgtggtctttgttgattttatgttttttttgtttgttggcgtataattgttatatatagctttatttc

SEQ ID NO: 82761 - protein, 554 aa, Arabidopsis thaliana
  peptide (1)..(554): Ceres Seq. ID no. 12667225
MDHKILLTPPKSLYTKCIITIIYVVSISHLNAHFITSCKQTPYPSVCDHHMSNSPLKTLDDQTDGFTFHDLVVSSTMDQAVQLHRLVSSLKQHHSLHKHATSALFDCLELYEDTIDQLNHSRRSYGQYSSPHDRQTSLSAAIANQDTCRNGFRDFKLTSSYSKYFPVQFHRNLTKSISNSLAVTKAAAEAEAVAEKYPSTGFTKFSKQRSSAGGGSHRRLLLFSDEKFPSWFPLSDRKLLEDSKTTAKADLVVAKDGSGHYTSIQQAVNAAAKLPRRNQRLVIYVKAGVYRENVVIKKSIKNVMVIGDGIDSTIVTGNRNVQDGTTTFRSATFAVSGNGFIAQGITFENTAGPEKHQAVALRSSSDFSVFYACSFKGYQDTLYLHSSRQFLRNCNIYGTVDFIFGDATAILQNCNIYARKPMSGQKNTITAQSRKEPDETTGFVIQSSTVATASETYLGRPWRSHSRTVFMKCNLGALVSPAGWLPWSGSFALSTLYYGEYGNTGAGASVSGRVKWPGYHVIKTVTEAEKFTVENFLDGNYWITATGVPVNDGL

SEQ ID NO: 82762 - protein, 504 aa, Arabidopsis thaliana
  peptide (1)..(504): Ceres Seq. ID no. 12667226
MSNSPLKTLDDQTDGFTFHDLVVSSTMDQAVQLHRLVSSLKQHHSLHKHATSALFDCLELYEDTIDQLNHSRRSYGQYSSPHDRQTSLSAAIANQDTCRNGFRDFKLTSSYSKYFPVQFHRNLTKSISNSLAVTKAAAEAEAVAEKYPSTGFTKFSKQRSSAGGGSHRRLLLFSDEKFPSWFPLSDRKLLEDSKTTAKADLVVAKDGSGHYTSIQQAVNAAAKLPRRNQRLVIYVKAGVYRENVVIKKSIKNVMVIGDGIDSTIVTGNRNVQDGTTTFRSATFAVSGNGFIAQGITFENTAGPEKHQAVALRSSSDFSVFYACSFKGYQDTLYLHSSRQFLRNCNIYGTVDFIFGDATAILQNCNIYARKPMSGQKNTITAQSRKEPDETTGFVIQSSTVATASETYLGRPWRSHSRTVFMKCNLGALVSPAGWLPWSGSFALSTLYYGEYGNTGAGASVSGRVKWPGYHVIKTVTEAEKFTVENFLDGNYWITATGVPVNDGL

SEQ ID NO: 82763 - protein, 478 aa, Arabidopsis thaliana
  peptide (1)..(478): Ceres Seq. ID no. 12667227
MDQAVQLHRLVSSLKQHHSLHKHATSALFDCLELYEDTIDQLNHSRRSYGQYSSPHDRQTSLSAAIANQDTCRNGFRDFKLTSSYSKYFPVQFHRNLTKSISNSLAVTKAAAEAEAVAEKYPSTGFTKFSKQRSSAGGGSHRRLLLFSDEKFPSWFPLSDRKLLEDSKTTAKADLVVAKDGSGHYTSIQQAVNAAAKLPRRNQRLVIYVKAGVYRENVVIKKSIKNVMVIGDGIDSTIVTGNRNVQDGTTTFRSATFAVSGNGFIAQGITFENTAGPEKHQAVALRSSSDFSVFYACSFKGYQDTLYLHSSRQFLRNCNIYGTVDFIFGDATAILQNCNIYARKPMSGQKNTITAQSRKEPDETTGFVIQSSTVATASETYLGRPWRSHSRTVFMKCNLGALVSPAGWLPWSGSFALSTLYYGEYGNTGAGASVSGRVKWPGYHVIKTVTEAEKFTVENFLDGNYWITATGVPVNDGL

SEQ ID NO: 82764 - DNA, 528 bp, Arabidopsis thaliana
  misc_feature (1)..(528): Ceres Seq. ID no. 12667232
  misc_feature (1)..(528): Ortholog of  Ceres SEQ ID NO 14309113 as cited in SEQ ID NO 0
atgtgtccttctttgaccgaaacggtgacggcattgtttatccatgagaaacctaccaagggatttagagcactcgggacagggcgtttcatgtcggcttttgttgctgtcttcttcaacatgggactcagccagaaaactcgtccggttcaactattcggatatatcttaccattgtttttgaaaccatttgtatgcacggtagtgacaaccgacgtctacgacaaagacggaagatttgtggaatcaaaattcgaggagatattcaacaagcatgctcgcacacataaagatgctctcactgcaaaggaaattaaacaaatgcttaagactaacagagaaccttacgatttcatcggatggctttcagattttatagaatggaaaatattacatacgttagctcaagacaatggtttgttgacggaagatgcagtaagaggcgtctacgatggtagccttttccaacaactggagaaaaaaagatcatcttcttcatctcgtggcaagaaacaaaaactaccttaa

SEQ ID NO: 82765 - protein, 175 aa, Arabidopsis thaliana
  peptide (1)..(175): Ceres Seq. ID no. 12667233
MCPSLTETVTALFIHEKPTKGFRALGTGRFMSAFVAVFFNMGLSQKTRPVQLFGYILPLFLKPFVCTVVTTDVYDKDGRFVESKFEEIFNKHARTHKDALTAKEIKQMLKTNREPYDFIGWLSDFIEWKILHTLAQDNGLLTEDAVRGVYDGSLFQQLEKKRSSSSSRGKKQKLP

SEQ ID NO: 82766 - protein, 145 aa, Arabidopsis thaliana
  peptide (1)..(145): Ceres Seq. ID no. 12667234
MSAFVAVFFNMGLSQKTRPVQLFGYILPLFLKPFVCTVVTTDVYDKDGRFVESKFEEIFNKHARTHKDALTAKEIKQMLKTNREPYDFIGWLSDFIEWKILHTLAQDNGLLTEDAVRGVYDGSLFQQLEKKRSSSSSRGKKQKLP

SEQ ID NO: 82767 - protein, 135 aa, Arabidopsis thaliana
  peptide (1)..(135): Ceres Seq. ID no. 12667235
MGLSQKTRPVQLFGYILPLFLKPFVCTVVTTDVYDKDGRFVESKFEEIFNKHARTHKDALTAKEIKQMLKTNREPYDFIGWLSDFIEWKILHTLAQDNGLLTEDAVRGVYDGSLFQQLEKKRSSSSSRGKKQKLP

SEQ ID NO: 82768 - DNA, 1794 bp, Arabidopsis thaliana
  misc_feature (1)..(1794): Ceres Seq. ID no. 12667271
  misc_feature (1)..(1794): Ortholog of  Ceres SEQ ID NO 14303043 as cited in SEQ ID NO 67110
atcaatggcgattgtagcatcactaagagatattaatctcttctcttcacttccttcaacgcctccaatggcggattcatcatcaggaacattccggccagctccgccgataccgattcccaaatacgcaccatccaatagaaatcgtaatcagaaaactaatcatcaaaccgatacaaacccgaagaaaccacaatcaaatccagctcttaagcttccgcatcaccgaaccagatactacaaaccggttaaggaaggagttatctcctcagacggtgaccgcacaatcttaatcggcgattccggcgtctcgtatcagcttcccggtgcaccgttcgagtttcaattcagctattctgagacaccgaaagttaaaccggttgggattcgtgaaccggcttttatgccgtttgctccaccgacgatgccgagaccgtggactgggaaagcaccgttgaagaaatcgaagaagaagattccattgtttgattcttttaatccaccgccggcgggaaaatctggagttaagtatgtagaaatgcctgggccgttaccgtttgggaggtatccaaaggaaggaatgaatagagaagaggttttaggagagccattgaagagatgggagaaaggaatgttgattaagcctcatatgcatgataatcgtcaggttaatttgggtagagatggatttacacataatatgttggaattgatacattcgcattggaagagacgacgtgtttgtaaagttcgatgtaaaggagttcctactgtggatatgaataacgtgtgtcgtgttcttgaggaaaagacaggaggagagatcattcatagagttggaggtgtggtgtaccttttcaggggtaggaattacaattaccgtacacgtccgcagtacccattgatgttgtggaaaccagcagctcctgtttatccaaagcttattcaagaagttcctgaaggattgacgaaagaggaagctcatgagttcagggtgaagggaaagtctcttaggcctatatgcaagttgtctaaaaatggagtttacgtgtcgctagtcaaagatgtgagggatgcctttgaactgagttcattggtgaaagtcgactgcccagggcttgaaccaagtgattataagaaaattggcgctaagctcaaggagttagttccttgtgtgcttctgtctttcgatgatgagcaaatactcatgtggagaggacgagaatggaagtcgcggtttgtagacaatcctctaattccaagcctttctgagaccaacacaacgaacgaacttgatccctcagacaaacctagtgaagaacaaactgtggctaatccaagtacaacgatctcaagccccaaaatgatctcgctctggcaacgagcgttggaatcgtcgaaggctgtgattcttgaagagcttgacctcggtccagacgatctattgaagaaggtggaagagttagaaggcacttcactggctgcagaacacacttacacagctatggtcttgtcaaatactgatggtgcagcagaggattacgtggatgaaaaggaccggtccgaagagtattatagtgacatagacgatgactttgatgacgagtgttccgatgatgagtcgctagatccggttggtccagtgggatctttacccgttgacaagatagttaggaagttgagggaaagactaaaatagagcaaaagtgttactgtattctcatcattgttttgtgtaaatgttgtaaacatacatactaaaaacccaagtgccataacgaagtacttctagag

SEQ ID NO: 82769 - protein, 565 aa, Arabidopsis thaliana
  peptide (1)..(565): Ceres Seq. ID no. 12667272
SMAIVASLRDINLFSSLPSTPPMADSSSGTFRPAPPIPIPKYAPSNRNRNQKTNHQTDTNPKKPQSNPALKLPHHRTRYYKPVKEGVISSDGDRTILIGDSGVSYQLPGAPFEFQFSYSETPKVKPVGIREPAFMPFAPPTMPRPWTGKAPLKKSKKKIPLFDSFNPPPAGKSGVKYVEMPGPLPFGRYPKEGMNREEVLGEPLKRWEKGMLIKPHMHDNRQVNLGRDGFTHNMLELIHSHWKRRRVCKVRCKGVPTVDMNNVCRVLEEKTGGEIIHRVGGVVYLFRGRNYNYRTRPQYPLMLWKPAAPVYPKLIQEVPEGLTKEEAHEFRVKGKSLRPICKLSKNGVYVSLVKDVRDAFELSSLVKVDCPGLEPSDYKKIGAKLKELVPCVLLSFDDEQILMWRGREWKSRFVDNPLIPSLSETNTTNELDPSDKPSEEQTVANPSTTISSPKMISLWQRALESSKAVILEELDLGPDDLLKKVEELEGTSLAAEHTYTAMVLSNTDGAAEDYVDEKDRSEEYYSDIDDDFDDECSDDESLDPVGPVGSLPVDKIVRKLRERLK

SEQ ID NO: 82770 - protein, 564 aa, Arabidopsis thaliana
  peptide (1)..(564): Ceres Seq. ID no. 12667273
MAIVASLRDINLFSSLPSTPPMADSSSGTFRPAPPIPIPKYAPSNRNRNQKTNHQTDTNPKKPQSNPALKLPHHRTRYYKPVKEGVISSDGDRTILIGDSGVSYQLPGAPFEFQFSYSETPKVKPVGIREPAFMPFAPPTMPRPWTGKAPLKKSKKKIPLFDSFNPPPAGKSGVKYVEMPGPLPFGRYPKEGMNREEVLGEPLKRWEKGMLIKPHMHDNRQVNLGRDGFTHNMLELIHSHWKRRRVCKVRCKGVPTVDMNNVCRVLEEKTGGEIIHRVGGVVYLFRGRNYNYRTRPQYPLMLWKPAAPVYPKLIQEVPEGLTKEEAHEFRVKGKSLRPICKLSKNGVYVSLVKDVRDAFELSSLVKVDCPGLEPSDYKKIGAKLKELVPCVLLSFDDEQILMWRGREWKSRFVDNPLIPSLSETNTTNELDPSDKPSEEQTVANPSTTISSPKMISLWQRALESSKAVILEELDLGPDDLLKKVEELEGTSLAAEHTYTAMVLSNTDGAAEDYVDEKDRSEEYYSDIDDDFDDECSDDESLDPVGPVGSLPVDKIVRKLRERLK

SEQ ID NO: 82771 - protein, 543 aa, Arabidopsis thaliana
  peptide (1)..(543): Ceres Seq. ID no. 12667274
MADSSSGTFRPAPPIPIPKYAPSNRNRNQKTNHQTDTNPKKPQSNPALKLPHHRTRYYKPVKEGVISSDGDRTILIGDSGVSYQLPGAPFEFQFSYSETPKVKPVGIREPAFMPFAPPTMPRPWTGKAPLKKSKKKIPLFDSFNPPPAGKSGVKYVEMPGPLPFGRYPKEGMNREEVLGEPLKRWEKGMLIKPHMHDNRQVNLGRDGFTHNMLELIHSHWKRRRVCKVRCKGVPTVDMNNVCRVLEEKTGGEIIHRVGGVVYLFRGRNYNYRTRPQYPLMLWKPAAPVYPKLIQEVPEGLTKEEAHEFRVKGKSLRPICKLSKNGVYVSLVKDVRDAFELSSLVKVDCPGLEPSDYKKIGAKLKELVPCVLLSFDDEQILMWRGREWKSRFVDNPLIPSLSETNTTNELDPSDKPSEEQTVANPSTTISSPKMISLWQRALESSKAVILEELDLGPDDLLKKVEELEGTSLAAEHTYTAMVLSNTDGAAEDYVDEKDRSEEYYSDIDDDFDDECSDDESLDPVGPVGSLPVDKIVRKLRERLK

SEQ ID NO: 82772 - DNA, 1925 bp, Arabidopsis thaliana
  misc_feature (1)..(1925): Ceres Seq. ID no. 12667275
  misc_feature (1)..(1925): Ortholog of  Ceres SEQ ID NO 14309715 as cited in SEQ ID NO 55353
  misc_feature (1)..(1925): Ortholog of  Ceres SEQ ID NO 13595521 as cited in SEQ ID NO 59840
actcaggacacaaaccaagatctcgtgtagaggaaaaaaaacctttcctccatgtttaagttttgagcttctggttggtttcaagtcctgtggagaaaaatgtcaccatttttgaagttctttctctttctctatgattatctttcaccttcctctttctttctggtccaaagaaataccttaggagcatcattagatactacagatggggttgtgagaagtggcataattggagagattatatacatttggaagcagacaagaatctttgtctttataccaatcttgaaatgcttagtgacaatatgtttggtaatgtcccttttgttgttcatagaaagagtttatatgagcatagtagtagtgtttgtgaaattacttagacgaacacctgagaaagtacacaagtgggaacctataaacgatgatgaccttgagcttgccaatacaaactacccaatggttctcattcagatcccaatgtacaatgaaaaagaggtttgtcagttatctataggagcagcctgtagactttcttggccattggatcgaatgatagttcaagtacttgatgattccacagatccagctagtaaggaattggtgaatgcggaatgtgataaatgggcgaggaaaggtataaacataatgtcagagattagagacaacagaattggatacaaagcaggagcattaaaggcaggaatgatgcacaactatgtgaaacaatgcgaattcgtcgccattttcgatgctgattttcagcctgatcctgactttcttgaacgaaccattccttttcttattcacaaccatgaaatctctcttgttcaatgccgttggaagtttgtgaatgcaaacgagtgcttaatgacaagaatgcaagagatgtcactaaactaccattttgtggctgagcaagaatctggatcttcaatacatgctttctttggattcaatggaaccgcgggtgtatggagaatcgcagctttaaacgaagctggaggatggaaagatcgaacaaccgtagaagatatggatttagcagtaagagcttgtcttcatggttggaaatttgtctatgtccatgacgtcgaggtgaaaaatgaattgccaagtacattcaaagcatacaggtttcagcaacatagatggtcttgtggaccagctaatctatggaggaagatgacaatggaaatcttacagaacaagaaagtgtcggcctggaagaaattgtatctcatatacaatttcttcttcataaggaagattgtagtacacatcttcacatttgtcttctactgtctgatattaccaacaactgtgctattccctgagctccaagttcctaaatgggcaactgtttattttcctactacaatcactatccttaacgcaatcgctacacctcgatcactccatcttcttgtcttttggatcttattcgagaatgtaatgtcgatgcatcgcacaaaagcgacattcatcgggttactagaggcaggacgggttaacgaatgggttgttactgaaaaattaggtgacactctcaagtctaagttaataggtaaagctacaactaagctttataccagatttggacaaagactcaactggagagaactcgttgttggattatatatattcttctgcggatgttacgatttcgcatatggaggatcatacttttatgtttatctgtttttacagtcttgtgcattttttgttgctggagttggttatattggcacatttgttccaactgtttagattagacttttgtatttgagagcaaatgtgtttttgctatttgattagaccaaattagagattggatcttggttacttaaaccaagttaactcttccaatattcatactcaaaatgtaattttttaaatggtgttatgatcttaaaatttggtta

SEQ ID NO: 82773 - protein, 556 aa, Arabidopsis thaliana
  peptide (1)..(556): Ceres Seq. ID no. 12667276
MSPFLKFFLFLYDYLSPSSFFLVQRNTLGASLDTTDGVVRSGIIGEIIYIWKQTRIFVFIPILKCLVTICLVMSLLLFIERVYMSIVVVFVKLLRRTPEKVHKWEPINDDDLELANTNYPMVLIQIPMYNEKEVCQLSIGAACRLSWPLDRMIVQVLDDSTDPASKELVNAECDKWARKGINIMSEIRDNRIGYKAGALKAGMMHNYVKQCEFVAIFDADFQPDPDFLERTIPFLIHNHEISLVQCRWKFVNANECLMTRMQEMSLNYHFVAEQESGSSIHAFFGFNGTAGVWRIAALNEAGGWKDRTTVEDMDLAVRACLHGWKFVYVHDVEVKNELPSTFKAYRFQQHRWSCGPANLWRKMTMEILQNKKVSAWKKLYLIYNFFFIRKIVVHIFTFVFYCLILPTTVLFPELQVPKWATVYFPTTITILNAIATPRSLHLLVFWILFENVMSMHRTKATFIGLLEAGRVNEWVVTEKLGDTLKSKLIGKATTKLYTRFGQRLNWRELVVGLYIFFCGCYDFAYGGSYFYVYLFLQSCAFFVAGVGYIGTFVPTV

SEQ ID NO: 82774 - protein, 484 aa, Arabidopsis thaliana
  peptide (1)..(484): Ceres Seq. ID no. 12667277
MSLLLFIERVYMSIVVVFVKLLRRTPEKVHKWEPINDDDLELANTNYPMVLIQIPMYNEKEVCQLSIGAACRLSWPLDRMIVQVLDDSTDPASKELVNAECDKWARKGINIMSEIRDNRIGYKAGALKAGMMHNYVKQCEFVAIFDADFQPDPDFLERTIPFLIHNHEISLVQCRWKFVNANECLMTRMQEMSLNYHFVAEQESGSSIHAFFGFNGTAGVWRIAALNEAGGWKDRTTVEDMDLAVRACLHGWKFVYVHDVEVKNELPSTFKAYRFQQHRWSCGPANLWRKMTMEILQNKKVSAWKKLYLIYNFFFIRKIVVHIFTFVFYCLILPTTVLFPELQVPKWATVYFPTTITILNAIATPRSLHLLVFWILFENVMSMHRTKATFIGLLEAGRVNEWVVTEKLGDTLKSKLIGKATTKLYTRFGQRLNWRELVVGLYIFFCGCYDFAYGGSYFYVYLFLQSCAFFVAGVGYIGTFVPTV

SEQ ID NO: 82775 - protein, 473 aa, Arabidopsis thaliana
  peptide (1)..(473): Ceres Seq. ID no. 12667278
MSIVVVFVKLLRRTPEKVHKWEPINDDDLELANTNYPMVLIQIPMYNEKEVCQLSIGAACRLSWPLDRMIVQVLDDSTDPASKELVNAECDKWARKGINIMSEIRDNRIGYKAGALKAGMMHNYVKQCEFVAIFDADFQPDPDFLERTIPFLIHNHEISLVQCRWKFVNANECLMTRMQEMSLNYHFVAEQESGSSIHAFFGFNGTAGVWRIAALNEAGGWKDRTTVEDMDLAVRACLHGWKFVYVHDVEVKNELPSTFKAYRFQQHRWSCGPANLWRKMTMEILQNKKVSAWKKLYLIYNFFFIRKIVVHIFTFVFYCLILPTTVLFPELQVPKWATVYFPTTITILNAIATPRSLHLLVFWILFENVMSMHRTKATFIGLLEAGRVNEWVVTEKLGDTLKSKLIGKATTKLYTRFGQRLNWRELVVGLYIFFCGCYDFAYGGSYFYVYLFLQSCAFFVAGVGYIGTFVPTV

SEQ ID NO: 82776 - DNA, 972 bp, Arabidopsis thaliana
  misc_feature (1)..(972): Ceres Seq. ID no. 12667287
  misc_feature (1)..(972): Ortholog of  Ceres SEQ ID NO 15177059 as cited in SEQ ID NO 60196
  misc_feature (1)..(972): Ortholog of  Ceres SEQ ID NO 13502960 as cited in SEQ ID NO 67097
atggcggcgcaggtcgaaattgaggaccaaacgtccgtcaccaaccttgataatggcgaaatattcgattcaatctccgacgatgctgattcttctgtttctcacgccggatcttctttctcttcctcttcactgatccttctcggcgaaggaaacccagagcacgacgttatcaagacgtgtttactctcgggaatgggtgttgtttctagcgacacgacgatcgttacgattagtaaaaactcttcggaacgaggaatcacgacgagagccaagtttttggcgtttaggattttcactgacgctgttgcgaggaaacacggcggagatgctaatgtgaaatatggttggtacgctggttctagagatgagattcaaagaatcatctcttacggatttagcaatcgtgatgttggaaaatttgaaaatgatggtggttctcatggaattggaatccatttggttccttccaagtgttctctacttgcggcttcagctacagagcaagatgaagaaggtttacgatatcttctgttatgccgtgtaatcttagggaaacctgagataatcatctccggctctaaacaatcgtatccgagttctgctgagtttgattctggtgtggatgatttacacaatcctagaaactatgtgatttggagttgtaacatgaattcgtgtattcttccgagttatatcgtcagttttaggtctcctagactgagagtgagtagaggtggttttgcttcgagaccaagctcgccgtgggttagttttgcttccttgatgtcaatgttgtctacatcaatggatccttcaagaatgaacttgatcatccgaacttacgatgattttcggaaacggaagattaggagagaccaattggtaaggaagatgagagaagtggctggagataatcttttggctgagataatcaagaatcacaaaaacagaaacaaggtcacgaattaa

SEQ ID NO: 82777 - protein, 323 aa, Arabidopsis thaliana
  peptide (1)..(323): Ceres Seq. ID no. 12667288
MAAQVEIEDQTSVTNLDNGEIFDSISDDADSSVSHAGSSFSSSSLILLGEGNPEHDVIKTCLLSGMGVVSSDTTIVTISKNSSERGITTRAKFLAFRIFTDAVARKHGGDANVKYGWYAGSRDEIQRIISYGFSNRDVGKFENDGGSHGIGIHLVPSKCSLLAASATEQDEEGLRYLLLCRVILGKPEIIISGSKQSYPSSAEFDSGVDDLHNPRNYVIWSCNMNSCILPSYIVSFRSPRLRVSRGGFASRPSSPWVSFASLMSMLSTSMDPSRMNLIIRTYDDFRKRKIRRDQLVRKMREVAGDNLLAEIIKNHKNRNKVTN

SEQ ID NO: 82778 - protein, 258 aa, Arabidopsis thaliana
  peptide (1)..(258): Ceres Seq. ID no. 12667289
MGVVSSDTTIVTISKNSSERGITTRAKFLAFRIFTDAVARKHGGDANVKYGWYAGSRDEIQRIISYGFSNRDVGKFENDGGSHGIGIHLVPSKCSLLAASATEQDEEGLRYLLLCRVILGKPEIIISGSKQSYPSSAEFDSGVDDLHNPRNYVIWSCNMNSCILPSYIVSFRSPRLRVSRGGFASRPSSPWVSFASLMSMLSTSMDPSRMNLIIRTYDDFRKRKIRRDQLVRKMREVAGDNLLAEIIKNHKNRNKVTN

SEQ ID NO: 82779 - DNA, 813 bp, Arabidopsis thaliana
  misc_feature (1)..(813): Ceres Seq. ID no. 12667294
  misc_feature (1)..(813): Ortholog of  Ceres SEQ ID NO 15169419 as cited in SEQ ID NO 58491
  misc_feature (1)..(813): Ortholog of  Ceres SEQ ID NO 15179026 as cited in SEQ ID NO 0
atgaatgtgtttcctggatttggtggctggatcaatcagaacaatcaacagcccccaaagggcgagtccaagagatctgagaacgttaaatctaactcgaatacggatatggatactaataataccgaagatgatgaggagattaagcaactaaatctttggagtgatgcagagaagaagcatccatggtatgatccccctccaaaagtgaaggtgacaatgaaaaagggtctttgccatatgaacatagaattgacattaggagtgcctcctgatggagcatacgaacttttcatcaatccaaccaacataccattctttgttatagacaagtcagggcgacaacttctggcaaacaaatcaagaaagattttgaagaaagatggacctaggcagaccgtgaaggtgaagaaagctgtggcatgggacttcctttggttctctggatctctccccattaatttaattgtcaacgaaaacaaaaaagaccttgaagtaaaatataagaaagaaaaaatgatgttcatgaaagtgttcgaaggtagctggaaaatagaaccactatatgtagatgcagatcgcttatgcaagaacatgaaacctaagagtcgagaagaatacaaaaaatgtagtggcggacaaggaaaaattgcaccaaaagtgactatggaccaatattttcagccatatcctcttttaaatctgccgccgttttcttggtatattcgtaacatcaccatcaagaccaccaaaactctgctcaaaatgcttcaagatagggccaccatactgcgagagataccgtatacttag

SEQ ID NO: 82780 - protein, 270 aa, Arabidopsis thaliana
  peptide (1)..(270): Ceres Seq. ID no. 12667295
MNVFPGFGGWINQNNQQPPKGESKRSENVKSNSNTDMDTNNTEDDEEIKQLNLWSDAEKKHPWYDPPPKVKVTMKKGLCHMNIELTLGVPPDGAYELFINPTNIPFFVIDKSGRQLLANKSRKILKKDGPRQTVKVKKAVAWDFLWFSGSLPINLIVNENKKDLEVKYKKEKMMFMKVFEGSWKIEPLYVDADRLCKNMKPKSREEYKKCSGGQGKIAPKVTMDQYFQPYPLLNLPPFSWYIRNITIKTTKTLLKMLQDRATILREIPYT

SEQ ID NO: 82781 - protein, 234 aa, Arabidopsis thaliana
  peptide (1)..(234): Ceres Seq. ID no. 12667296
MDTNNTEDDEEIKQLNLWSDAEKKHPWYDPPPKVKVTMKKGLCHMNIELTLGVPPDGAYELFINPTNIPFFVIDKSGRQLLANKSRKILKKDGPRQTVKVKKAVAWDFLWFSGSLPINLIVNENKKDLEVKYKKEKMMFMKVFEGSWKIEPLYVDADRLCKNMKPKSREEYKKCSGGQGKIAPKVTMDQYFQPYPLLNLPPFSWYIRNITIKTTKTLLKMLQDRATILREIPYT

SEQ ID NO: 82782 - protein, 197 aa, Arabidopsis thaliana
  peptide (1)..(197): Ceres Seq. ID no. 12667297
MKKGLCHMNIELTLGVPPDGAYELFINPTNIPFFVIDKSGRQLLANKSRKILKKDGPRQTVKVKKAVAWDFLWFSGSLPINLIVNENKKDLEVKYKKEKMMFMKVFEGSWKIEPLYVDADRLCKNMKPKSREEYKKCSGGQGKIAPKVTMDQYFQPYPLLNLPPFSWYIRNITIKTTKTLLKMLQDRATILREIPYT

SEQ ID NO: 82783 - DNA, 1857 bp, Arabidopsis thaliana
  misc_feature (1)..(1857): Ceres Seq. ID no. 12667304
  misc_feature (1)..(1857): Ortholog of  Ceres SEQ ID NO 14307843 as cited in SEQ ID NO 20508
  misc_feature (1)..(1857): Ortholog of  Ceres SEQ ID NO 15170811 as cited in SEQ ID NO 52649
  misc_feature (1)..(1857): Ortholog of  Ceres SEQ ID NO 13638331 as cited in SEQ ID NO 58047
  misc_feature (1)..(1857): Ortholog of  Ceres SEQ ID NO 15225845 as cited in SEQ ID NO 65125
  misc_feature (1)..(1857): Ortholog of  Ceres SEQ ID NO 15170135 as cited in SEQ ID NO 67647
ataaacagagttctcacaccaatacaaaagagaccatcaccgtgagaaagagaagaagaacaaaaaaagttagccatggcatcaagaagagtttcttcgctgctctctcgctctttcatgtcctcctcacgttctatcttctctcttagaggcatgaacagaggagctcaaagatacagtaacctcgctgctgctgtcgaaaacactattactccaccagtgaaagttgaacacacacagcttctaatcggtggaagattcgttgatgcagtgtcaggaaaaactttccctactttggatccaagaaatggagaagtgattgctcaagtgtctgaaggtgatgcagaagacgtgaaccgcgcggttgcagctgcacgaaaggcttttgatgaaggaccatggcctaaaatgacagcttatgagagatcaaagatactgtttcgtttcgctgatttaatcgagaaacataatgatgagattgctgctcttgagacttgggataatgggaaaccttatgaacaatctgctcaaattgaagtaccaatgcttgctagggtgttccggtactatgctggttgggcagacaagatacatggaatgacaatgccaggagatggtccacaccatgtgcagaccttacatgagcctataggagtcgctggacaaatcatcccatggaacttccctcttctcatgctttcttggaaacttggaccagctttagcttgcggtaacaccgttgttctcaaaactgctgagcaaactcctctatctgctcttcttgttgggaaactacttcatgaggctggacttcctgatggagttgtgaatatagtttctggatttggggctactgctggtgcagctatagctagtcacatggacgttgataaggttgctttcaccgggtctactgatgttgggaagattattcttgagttagcttcaaaaagcaaccttaaggcagtgactcttgagcttggaggaaagtcaccattcattgtatgtgaagatgctgatgtggatcaggccgttgagcttgcacatttcgctttgttctttaaccagggacaatgttgttgtgctggttcgcgtacatttgtacatgaacgtgtgtatgatgagtttgtagagaaagctaaagctcgtgcactcaagcgaaatgttggagatcccttcaagtcaggcattgagcaaggtccccaggtagactcagagcaattcaacaaaatcctgaagtacatcaaacatggagttgaggctggagccacattacaagctggaggtgacaggcttggttccaagggttactacattcaacctactgtcttctcagatgtgaaagatgacatgctcatagcaacagacgagattttcgggccggttcaaaccatactgaaattcaaggatcttgatgaggtgattgcaagggccaacaactcaaggtacggtttagctgctggagtgttcacacagaatcttgacacagcacaccggctgatgcgagcactcagagttgggactgtttggatcaactgttttgatgtacttgatgcatcaattccatttggagggtataagatgagtggcattggtagagagaaaggtatctacagtctcaacaattacttgcaagtcaaggctgttgttacttccctcaagaaccctgcctggctctaaaccataccaggtggttacacttatttctcgagtttggtttatgatttgcacttttgctttgaaaacctggagttgtactgtgtctctaggatttctagattttgagagtaatttatcttcaatacattttgcaaataaagctacatgacaatgtgtgattaataaacacaaactctt

SEQ ID NO: 82784 - protein, 534 aa, Arabidopsis thaliana
  peptide (1)..(534): Ceres Seq. ID no. 12667305
MASRRVSSLLSRSFMSSSRSIFSLRGMNRGAQRYSNLAAAVENTITPPVKVEHTQLLIGGRFVDAVSGKTFPTLDPRNGEVIAQVSEGDAEDVNRAVAAARKAFDEGPWPKMTAYERSKILFRFADLIEKHNDEIAALETWDNGKPYEQSAQIEVPMLARVFRYYAGWADKIHGMTMPGDGPHHVQTLHEPIGVAGQIIPWNFPLLMLSWKLGPALACGNTVVLKTAEQTPLSALLVGKLLHEAGLPDGVVNIVSGFGATAGAAIASHMDVDKVAFTGSTDVGKIILELASKSNLKAVTLELGGKSPFIVCEDADVDQAVELAHFALFFNQGQCCCAGSRTFVHERVYDEFVEKAKARALKRNVGDPFKSGIEQGPQVDSEQFNKILKYIKHGVEAGATLQAGGDRLGSKGYYIQPTVFSDVKDDMLIATDEIFGPVQTILKFKDLDEVIARANNSRYGLAAGVFTQNLDTAHRLMRALRVGTVWINCFDVLDASIPFGGYKMSGIGREKGIYSLNNYLQVKAVVTSLKNPAWL

SEQ ID NO: 82785 - protein, 520 aa, Arabidopsis thaliana
  peptide (1)..(520): Ceres Seq. ID no. 12667306
MSSSRSIFSLRGMNRGAQRYSNLAAAVENTITPPVKVEHTQLLIGGRFVDAVSGKTFPTLDPRNGEVIAQVSEGDAEDVNRAVAAARKAFDEGPWPKMTAYERSKILFRFADLIEKHNDEIAALETWDNGKPYEQSAQIEVPMLARVFRYYAGWADKIHGMTMPGDGPHHVQTLHEPIGVAGQIIPWNFPLLMLSWKLGPALACGNTVVLKTAEQTPLSALLVGKLLHEAGLPDGVVNIVSGFGATAGAAIASHMDVDKVAFTGSTDVGKIILELASKSNLKAVTLELGGKSPFIVCEDADVDQAVELAHFALFFNQGQCCCAGSRTFVHERVYDEFVEKAKARALKRNVGDPFKSGIEQGPQVDSEQFNKILKYIKHGVEAGATLQAGGDRLGSKGYYIQPTVFSDVKDDMLIATDEIFGPVQTILKFKDLDEVIARANNSRYGLAAGVFTQNLDTAHRLMRALRVGTVWINCFDVLDASIPFGGYKMSGIGREKGIYSLNNYLQVKAVVTSLKNPAWL

SEQ ID NO: 82786 - protein, 508 aa, Arabidopsis thaliana
  peptide (1)..(508): Ceres Seq. ID no. 12667307
MNRGAQRYSNLAAAVENTITPPVKVEHTQLLIGGRFVDAVSGKTFPTLDPRNGEVIAQVSEGDAEDVNRAVAAARKAFDEGPWPKMTAYERSKILFRFADLIEKHNDEIAALETWDNGKPYEQSAQIEVPMLARVFRYYAGWADKIHGMTMPGDGPHHVQTLHEPIGVAGQIIPWNFPLLMLSWKLGPALACGNTVVLKTAEQTPLSALLVGKLLHEAGLPDGVVNIVSGFGATAGAAIASHMDVDKVAFTGSTDVGKIILELASKSNLKAVTLELGGKSPFIVCEDADVDQAVELAHFALFFNQGQCCCAGSRTFVHERVYDEFVEKAKARALKRNVGDPFKSGIEQGPQVDSEQFNKILKYIKHGVEAGATLQAGGDRLGSKGYYIQPTVFSDVKDDMLIATDEIFGPVQTILKFKDLDEVIARANNSRYGLAAGVFTQNLDTAHRLMRALRVGTVWINCFDVLDASIPFGGYKMSGIGREKGIYSLNNYLQVKAVVTSLKNPAWL

SEQ ID NO: 82787 - DNA, 1388 bp, Arabidopsis thaliana
  misc_feature (1)..(1388): Ceres Seq. ID no. 12667318
  misc_feature (1)..(1388): Ortholog of  Ceres SEQ ID NO 15176949 as cited in SEQ ID NO 58700
agcaaaaataagtaacacaacacaagttacacagaacagtcgctttctcctctcgattttgacatggcttggggattttcgtccgtgtctctcttcttgttcgtcgttttcaatctggtgagtggtaagatagttttagaagaagggtacgaagtcacaacggtggtcgatggccataagtctggtctgaatccatacacgattcatgctttaccaggatcttctaatctgatcgtccttgattcttccggcagtacattttacactacttcctttcctttgtccgttgatagtgtgataaaccggtttgctggggatgggagttcgggtcatgtagatggtaaagctggtaacagccggttcagcaaaccccgtggttttgctgtggatgctaaagggaatgtttatgttgctgataagagtaataaagctatacggaagatcagctcttcaggttctgtaaccaccattgctggagggatctcaaaggcatttggacacagagatggacctgcacagaatgctactttctctagcgatttcgagataacttttgttcctcaaagatgttgtttgcttgtttctgatcatggaaatgaaatgattcgccagataaatcttaaggaggaggattgcctcgaaaactctcattctaatttggggacatactctctttggtcaatagggattgtcctttcctgcattctcggggtagccattggatttgctgttcgcccttacgtcatccgtcatacaggaagaagtgaaccacctctcgttcatcatgacatggaagcttctcctaaccaaattgggggaacaagttctgaccttcttctcctacattagaaaccgagttgctgaatcaaccgtttattcagtattaagtagactagttatgatgatcgtgtctcacctttccctcatgtattccgccctaagtagtttaatttgttcgatggtatctagccttttcttcatgtgtcaacccaataatgtagctattttagacaaaacagtctctgtgtctgatcccgagagtccaggttgcggcaacccaaagccgcccctttcactgaaaccctctgatgatcttattgacctaataagctttgatgatgaacaagaacctaacaatgacaaagattgcaggaatgaagagactcttcctcatgcaaccatagatgacattataaaggttcatgttgaagaattttcaaagatggctgaagaagatactgtaattcatggttcttcatctactgagtaggtttcagttaaaagcacatgaatcagagagtatgtgtcttttgtaaatgtaaagtttggttgagttgaaaaatctttgaatatttattgaagtgctcatctttttttctttatatcaa

SEQ ID NO: 82788 - protein, 261 aa, Arabidopsis thaliana
  peptide (1)..(261): Ceres Seq. ID no. 12667319
MAWGFSSVSLFLFVVFNLVSGKIVLEEGYEVTTVVDGHKSGLNPYTIHALPGSSNLIVLDSSGSTFYTTSFPLSVDSVINRFAGDGSSGHVDGKAGNSRFSKPRGFAVDAKGNVYVADKSNKAIRKISSSGSVTTIAGGISKAFGHRDGPAQNATFSSDFEITFVPQRCCLLVSDHGNEMIRQINLKEEDCLENSHSNLGTYSLWSIGIVLSCILGVAIGFAVRPYVIRHTGRSEPPLVHHDMEASPNQIGGTSSDLLLLH

SEQ ID NO: 82789 - protein, 161 aa, Arabidopsis thaliana
  peptide (1)..(161): Ceres Seq. ID no. 12667320
MTWKLLLTKLGEQVLTFFSYIRNRVAESTVYSVLSRLVMMIVSHLSLMYSALSSLICSMVSSLFFMCQPNNVAILDKTVSVSDPESPGCGNPKPPLSLKPSDDLIDLISFDDEQEPNNDKDCRNEETLPHATIDDIIKVHVEEFSKMAEEDTVIHGSSSTE

SEQ ID NO: 82790 - DNA, 981 bp, Arabidopsis thaliana
  misc_feature (1)..(981): Ceres Seq. ID no. 12667344
  misc_feature (1)..(981): Ortholog of  Ceres SEQ ID NO 13581579 as cited in SEQ ID NO 58361
  misc_feature (1)..(981): Ortholog of  Ceres SEQ ID NO 13596474 as cited in SEQ ID NO 62169
  misc_feature (1)..(981): Ortholog of  Ceres SEQ ID NO 13598714 as cited in SEQ ID NO 62656
  misc_feature (1)..(981): Ortholog of  Ceres SEQ ID NO 13596969 as cited in SEQ ID NO 63375
  misc_feature (1)..(981): Ortholog of  Ceres SEQ ID NO 13597519 as cited in SEQ ID NO 64759
  misc_feature (1)..(981): Ortholog of  Ceres SEQ ID NO 13597870 as cited in SEQ ID NO 64982
  misc_feature (1)..(981): Ortholog of  Ceres SEQ ID NO 13595926 as cited in SEQ ID NO 67778
  misc_feature (1)..(981): Ortholog of  Ceres SEQ ID NO 12567001 as cited in SEQ ID NO 0
atgaaatcttttggtttatgtctgtttattctcgtatcttctccatgtctccttcaagccaatctctcgtctgattattacaccaaaacatgtcctgaattcgaggaaacactcgtacaaatcgtcaccgataaacaaattgcagctccaacaacagctgtcggaacactccgtctctttttccacgattgcatggttgatggctgcgacgcctcaatcctcgttgcttctactccacgtaaaacctccgaacgtgacgccgatatcaaccgttctcttcctggagacgcattcgacgtaatcacacgtatcaaaaccgccgtcgagctaaaatgtccaaacattgtttcttgctccgatatcctcgttggtgcaacacgtagtttaatctcaatggtcggaggtccgagagttaacgttaagttcggtcggaaagatagtcttgtctctgatatgaatcgtgttgaaggaaaactagctcgacctaacatgactatggatcatatcatttctattttcgagtctagtggtctgaccgttcaagaaatggttgctcttgttggtgctcacaccattggtttctctcattgcaaagagttcgcgagtcggatctttaacaagtctgatcaaaatggtccggtggagatgaatccgaaatacgcggcggagctgaggaagttgtgtgcgaattacaccaatgatgaacagatgtctgcgtttaatgacgtttttactccagggaaatttgataatatgtattacaagaatttgaagcacggttacgggttgctccagtccgatcacgcgattgcgtttgacaacaggacgcgctcgctggtggatctttacgcggaggacgaaacggcgttctttgacgcgtttgcgaaggctatggagaaagttagtgagaagaatgtgaagacggggaagcttggagaagtaagaaggcggtgtgatcaatacaatgactacaagggataa

SEQ ID NO: 82791 - protein, 326 aa, Arabidopsis thaliana
  peptide (1)..(326): Ceres Seq. ID no. 12667345
MKSFGLCLFILVSSPCLLQANLSSDYYTKTCPEFEETLVQIVTDKQIAAPTTAVGTLRLFFHDCMVDGCDASILVASTPRKTSERDADINRSLPGDAFDVITRIKTAVELKCPNIVSCSDILVGATRSLISMVGGPRVNVKFGRKDSLVSDMNRVEGKLARPNMTMDHIISIFESSGLTVQEMVALVGAHTIGFSHCKEFASRIFNKSDQNGPVEMNPKYAAELRKLCANYTNDEQMSAFNDVFTPGKFDNMYYKNLKHGYGLLQSDHAIAFDNRTRSLVDLYAEDETAFFDAFAKAMEKVSEKNVKTGKLGEVRRRCDQYNDYKG

SEQ ID NO: 82792 - protein, 262 aa, Arabidopsis thaliana
  peptide (1)..(262): Ceres Seq. ID no. 12667346
MVDGCDASILVASTPRKTSERDADINRSLPGDAFDVITRIKTAVELKCPNIVSCSDILVGATRSLISMVGGPRVNVKFGRKDSLVSDMNRVEGKLARPNMTMDHIISIFESSGLTVQEMVALVGAHTIGFSHCKEFASRIFNKSDQNGPVEMNPKYAAELRKLCANYTNDEQMSAFNDVFTPGKFDNMYYKNLKHGYGLLQSDHAIAFDNRTRSLVDLYAEDETAFFDAFAKAMEKVSEKNVKTGKLGEVRRRCDQYNDYKG

SEQ ID NO: 82793 - protein, 195 aa, Arabidopsis thaliana
  peptide (1)..(195): Ceres Seq. ID no. 12667347
MVGGPRVNVKFGRKDSLVSDMNRVEGKLARPNMTMDHIISIFESSGLTVQEMVALVGAHTIGFSHCKEFASRIFNKSDQNGPVEMNPKYAAELRKLCANYTNDEQMSAFNDVFTPGKFDNMYYKNLKHGYGLLQSDHAIAFDNRTRSLVDLYAEDETAFFDAFAKAMEKVSEKNVKTGKLGEVRRRCDQYNDYKG

SEQ ID NO: 82794 - DNA, 1248 bp, Arabidopsis thaliana
  misc_feature (1)..(1248): Ceres Seq. ID no. 12667348
  misc_feature (1)..(1248): Ortholog of  Ceres SEQ ID NO 15171438 as cited in SEQ ID NO 51665
  misc_feature (1)..(1248): Ortholog of  Ceres SEQ ID NO 15170804 as cited in SEQ ID NO 52653
  misc_feature (1)..(1248): Ortholog of  Ceres SEQ ID NO 15170203 as cited in SEQ ID NO 53291
  misc_feature (1)..(1248): Ortholog of  Ceres SEQ ID NO 14303083 as cited in SEQ ID NO 66573
atgggtttgcttccgtgttcttgtcctctgccttgcaatgaaacaagatcagaatgtgaaacgaaatcgacgcatcaccaatcagaatcctcaacgtcatcatcgcttttgtctcagccaagtcttccattggttccttcgctgtcttttcagcatcagagctccagcgtcgatcaccattgcttagccacgctcaaagataaatcctcgtacgtatcttctctcgctgtctcagataaattactctacactggctcttccaacagtgagatacgtgtatggcctcgtgaacctccgttctcaccggaatattccaccggcgatgaccgtaacgtagttgccaacggaaacggaggggttaaatcgttggtgattcttggcgacaagctaataagtgctcatcaagatcacaagattcgtgtatggaagatcatcgacgagagcaatcgcagaggtcagaagtacaagtgcgtagctactcttccgacgatgaacgaccgcttcaagactctctttagtagcaaaagctacgtggaagtccgacggcacaagaagtgcacgtgggttcaccatgtggacgccgtgtcatcactagccttgtcgcaagatggctctctgctttactctgcttcgtgggaccggagtttcaagatatggagaacatctgatttcaaatgcttggactctatcgaaaaggctcacgatgatgctattaacgccatcgtagtgtccaaagacggttttgtgtacacgggttcggcagataagaagatcaaagtgtggaacaagaaggacaagaaacactctctggtcgctacactgactaaacatctctcggcagtgaacgcgttggctattagtgaagacgggaaggttctttactccggtgcgtgtgatagatcgattcttgtgtgggagagattgattaatggagatgatgaggagttacatatgtctgtagtgggagctttaaggggacacaggaaggcgattatgtgtttagcagttgcgtctgatttggtgttgagtgggtcagcggataagagcttgagggtttggaggagaggattaatggagaaagagggttattcttgtttggcggttctggaaggacataccaagcctgttaagtctttggctgtttcagtttctgattccgattctaattctgattattcttgtatggtttatagtgggagtcttgatctttctcttaaagtttggaacttaagggtttcatctatctaa

SEQ ID NO: 82795 - protein, 415 aa, Arabidopsis thaliana
  peptide (1)..(415): Ceres Seq. ID no. 12667349
MGLLPCSCPLPCNETRSECETKSTHHQSESSTSSSLLSQPSLPLVPSLSFQHQSSSVDHHCLATLKDKSSYVSSLAVSDKLLYTGSSNSEIRVWPREPPFSPEYSTGDDRNVVANGNGGVKSLVILGDKLISAHQDHKIRVWKIIDESNRRGQKYKCVATLPTMNDRFKTLFSSKSYVEVRRHKKCTWVHHVDAVSSLALSQDGSLLYSASWDRSFKIWRTSDFKCLDSIEKAHDDAINAIVVSKDGFVYTGSADKKIKVWNKKDKKHSLVATLTKHLSAVNALAISEDGKVLYSGACDRSILVWERLINGDDEELHMSVVGALRGHRKAIMCLAVASDLVLSGSADKSLRVWRRGLMEKEGYSCLAVLEGHTKPVKSLAVSVSDSDSNSDYSCMVYSGSLDLSLKVWNLRVSSI

SEQ ID NO: 82796 - protein, 252 aa, Arabidopsis thaliana
  peptide (1)..(252): Ceres Seq. ID no. 12667350
MNDRFKTLFSSKSYVEVRRHKKCTWVHHVDAVSSLALSQDGSLLYSASWDRSFKIWRTSDFKCLDSIEKAHDDAINAIVVSKDGFVYTGSADKKIKVWNKKDKKHSLVATLTKHLSAVNALAISEDGKVLYSGACDRSILVWERLINGDDEELHMSVVGALRGHRKAIMCLAVASDLVLSGSADKSLRVWRRGLMEKEGYSCLAVLEGHTKPVKSLAVSVSDSDSNSDYSCMVYSGSLDLSLKVWNLRVSSI

SEQ ID NO: 82797 - DNA, 2004 bp, Arabidopsis thaliana
  misc_feature (1)..(2004): Ceres Seq. ID no. 12667371
  misc_feature (1)..(2004): Ortholog of  Ceres SEQ ID NO 14311305 as cited in SEQ ID NO 53731
  misc_feature (1)..(2004): Ortholog of  Ceres SEQ ID NO 13501807 as cited in SEQ ID NO 67558
gtttgcatccaaatccaattcataactcacactcgtctcaaattcgaaaaatgtcgtctctctcctgccctacctaccgctcccgcacttcgtcttcgtctcctttcttgtcgaatcatcatcattcttcgctgatcaatgttgttgacccacgccgctcactctccttccactacgcttctcctcaggggcttaatctagctgagctctgtgttgttagatcgcagaggaggtccgttcagagttctgttgtcgtgcaagatggatcagtagccaccgagtcaagctcgtccgaggaggcgaaagatgtaggggtgttaacgattccttcacttgaagctgacaaggttgtagcagagtctgatggcggtgaacaactttcaacagttagtatcacggtggtgggagcttctggtgatcttgccaagaagaaaatattcccagctcttttcgcactttactatgaaggctgtcttcctgagcattttaccatttttggctatgcaaggagtaagatgacagatgctgaacttagagttatggtcagcaaaacattgacatgtagaattgataagagggcaaactgcggtgaaaagatggaagagtttctcaagagatgtttttaccattcgggtcagtatgattctcaggaacattttgttgcattggacgagaagctcaaggagcatgagggtggaagactttcgaaccgtcttttctatctttcaatccctccaaatatctttgttgacgcggtgaaatgtgcaagctcatctgcttcatctgtcaatggatggactagggtcattgtcgagaaaccttttggccgggactccaaaacctcggctgcattaacaaagtctcttaagcagtacctggaggaagaccaaatatttaggatagaccattacttagggaaggagctggttgagaacttgtcggttcttcgattctcaaatcttatatttgaaccgctatggtcaaggcagtatataaggaacgtgcaattcattttttctgaggatttcggcactgaaggacgcggagggtacttcgacaattacggaataataagagatataatgcagaatcatctgcttcagatattagctcttttcgccatggaaacacctgtgagtttggatgcagaggatatcagaaatgaaaaggtaaaggtactacgttcaatgagaccaataaaacttgaagatgtggtgataggacagtacaagagccacagcataggaggagtcacttatccaagctatactgatgataaaactgtgccaaaaggtagtctgaccccgacatttgcagctgctgcactcttcatcgacaatgcaagatgggatggtgtaccttttctaatgaaagctgggaaagcactaaacacccgaagtgcggagataagagtccagttcaggcatgtgcctggaaatttatataaccggaattctggtactgatcgtgatcagaccacaaatgagcttgtcatccgcgtccaacctgatgaagctatctatttgaaaatcaacaacaaggtccctggtttaggaatgagattagatcagagtaacttaaatcttctctattcagcaaggtattcaaaggagattccagatgcatatgagaggcttttgttagatgcgatcgaaggtgaacgcagattgttcataagaagcgatgaacttgacgctgcttgggcgcttttcactccattgctcaaagagatagaagaaaagaagacaaccccagaattctatccttacggcagtcgtggtccagtcggtgcccattatctagccgcaaaacacaaggtccaatggggagacctaagtcttgatcagtgaaagagtggaagaacattttttgttcatagattcacgtcttagaattttcattatttgtgtggtttatggaaactttctttcgctttcagagataggagtgagttttgttcgattttgtatctggaataataagtaagaactaccctattcttgc

SEQ ID NO: 82798 - protein, 615 aa, Arabidopsis thaliana
  peptide (1)..(615): Ceres Seq. ID no. 12667372
LHPNPIHNSHSSQIRKMSSLSCPTYRSRTSSSSPFLSNHHHSSLINVVDPRRSLSFHYASPQGLNLAELCVVRSQRRSVQSSVVVQDGSVATESSSSEEAKDVGVLTIPSLEADKVVAESDGGEQLSTVSITVVGASGDLAKKKIFPALFALYYEGCLPEHFTIFGYARSKMTDAELRVMVSKTLTCRIDKRANCGEKMEEFLKRCFYHSGQYDSQEHFVALDEKLKEHEGGRLSNRLFYLSIPPNIFVDAVKCASSSASSVNGWTRVIVEKPFGRDSKTSAALTKSLKQYLEEDQIFRIDHYLGKELVENLSVLRFSNLIFEPLWSRQYIRNVQFIFSEDFGTEGRGGYFDNYGIIRDIMQNHLLQILALFAMETPVSLDAEDIRNEKVKVLRSMRPIKLEDVVIGQYKSHSIGGVTYPSYTDDKTVPKGSLTPTFAAAALFIDNARWDGVPFLMKAGKALNTRSAEIRVQFRHVPGNLYNRNSGTDRDQTTNELVIRVQPDEAIYLKINNKVPGLGMRLDQSNLNLLYSARYSKEIPDAYERLLLDAIEGERRLFIRSDELDAAWALFTPLLKEIEEKKTTPEFYPYGSRGPVGAHYLAAKHKVQWGDLSLDQ

SEQ ID NO: 82799 - protein, 599 aa, Arabidopsis thaliana
  peptide (1)..(599): Ceres Seq. ID no. 12667373
MSSLSCPTYRSRTSSSSPFLSNHHHSSLINVVDPRRSLSFHYASPQGLNLAELCVVRSQRRSVQSSVVVQDGSVATESSSSEEAKDVGVLTIPSLEADKVVAESDGGEQLSTVSITVVGASGDLAKKKIFPALFALYYEGCLPEHFTIFGYARSKMTDAELRVMVSKTLTCRIDKRANCGEKMEEFLKRCFYHSGQYDSQEHFVALDEKLKEHEGGRLSNRLFYLSIPPNIFVDAVKCASSSASSVNGWTRVIVEKPFGRDSKTSAALTKSLKQYLEEDQIFRIDHYLGKELVENLSVLRFSNLIFEPLWSRQYIRNVQFIFSEDFGTEGRGGYFDNYGIIRDIMQNHLLQILALFAMETPVSLDAEDIRNEKVKVLRSMRPIKLEDVVIGQYKSHSIGGVTYPSYTDDKTVPKGSLTPTFAAAALFIDNARWDGVPFLMKAGKALNTRSAEIRVQFRHVPGNLYNRNSGTDRDQTTNELVIRVQPDEAIYLKINNKVPGLGMRLDQSNLNLLYSARYSKEIPDAYERLLLDAIEGERRLFIRSDELDAAWALFTPLLKEIEEKKTTPEFYPYGSRGPVGAHYLAAKHKVQWGDLSLDQ

SEQ ID NO: 82800 - protein, 444 aa, Arabidopsis thaliana
  peptide (1)..(444): Ceres Seq. ID no. 12667374
MTDAELRVMVSKTLTCRIDKRANCGEKMEEFLKRCFYHSGQYDSQEHFVALDEKLKEHEGGRLSNRLFYLSIPPNIFVDAVKCASSSASSVNGWTRVIVEKPFGRDSKTSAALTKSLKQYLEEDQIFRIDHYLGKELVENLSVLRFSNLIFEPLWSRQYIRNVQFIFSEDFGTEGRGGYFDNYGIIRDIMQNHLLQILALFAMETPVSLDAEDIRNEKVKVLRSMRPIKLEDVVIGQYKSHSIGGVTYPSYTDDKTVPKGSLTPTFAAAALFIDNARWDGVPFLMKAGKALNTRSAEIRVQFRHVPGNLYNRNSGTDRDQTTNELVIRVQPDEAIYLKINNKVPGLGMRLDQSNLNLLYSARYSKEIPDAYERLLLDAIEGERRLFIRSDELDAAWALFTPLLKEIEEKKTTPEFYPYGSRGPVGAHYLAAKHKVQWGDLSLDQ

SEQ ID NO: 82801 - DNA, 1495 bp, Arabidopsis thaliana
  misc_feature (1)..(1495): Ceres Seq. ID no. 12667379
  misc_feature (1)..(1495): Ortholog of  Ceres SEQ ID NO 13594068 as cited in SEQ ID NO 58624
tcgattatatcacaaggagatatggggaacagtgaaatgtcagcgagtgaggttgcggcggccaagcagaagaacgtcgacgattggttaccgatcacatcttccagaaacgctaagtggtggtactctgcttttcacaatgtcaccgccatggttggtgctggtgttcttagcttgccctacgctatgtccaatctcggatggggacctggagtgacgattatggtgatgtcatggatcataacgttgtacacactgtggcaaatggtggagatgcatgagattgttccagggaagaggcttgataggtatcacgagctaggtcaacacgcttttggtgaaaagcttggcctatggatcgtcgtgccgcagcagcttatcgtggaggtcggtgttgacatcgtttatatggtcacaggaggagcatccctcaagaaagtccatcaactagtctgtcccgattgcaaagagatcagaactacgttttggatcatgatctttgcttccgtccactttgttatctctcaccttcccaatttcaactctatctccatcatctcacttgccgcggctgttatgtccttaacttactcaactattgcttgggctgcatccgtgcacaaaggggtacatccagatgtggactactctcctagagcatcaaccgatgttggaaaagtattcaacttcttgaatgcgttgggagatgtggcttttgcttatgcaggtcacaacgttgtgttggagattcaggccacaatcccttcgactccggagatgccatccaaggtcccaatgtggagaggagttattgtagcctacattgtagtcgccatctgttacttccctgtagcattcctcggctattatatctttggaaacagcgttgatgacaacatcctcatcactttggagaagcctatctggcttattgctatggctaacatgttcgtggttatccatgtcattggaagctatcagatatttgcaatgccagtttttgacatgctcgaaaccgttttggtcaaaaagatgaatttcaatccttctttcaagctccgcttcattactcgtagtctttacgtcgctttcacgatgattgttgcgatatgcgtcccgtttttcggtggactactcggcttctttggaggattcgcctttgccccaacaacttactaccttccatgcattatgtggctcgttctcaagaaaccaaagaggtttggtctatcttggacagctaactggttctgcatcatagtaggagttcttttgacgatccttgccccaattggaggactcagaaccatcattatcaacgccaagacctacaagttcttctcttagatggatcacttttttttgtaaccgcgcaaccgaaaaataaaatcacggcatgtctaattttatgtgactgtccgtttaagtaaattttatgttttcattgtagttaagacaattatctttggtttcttttgataataaactctttttc

SEQ ID NO: 82802 - protein, 448 aa, Arabidopsis thaliana
  peptide (1)..(448): Ceres Seq. ID no. 12667380
SIISQGDMGNSEMSASEVAAAKQKNVDDWLPITSSRNAKWWYSAFHNVTAMVGAGVLSLPYAMSNLGWGPGVTIMVMSWIITLYTLWQMVEMHEIVPGKRLDRYHELGQHAFGEKLGLWIVVPQQLIVEVGVDIVYMVTGGASLKKVHQLVCPDCKEIRTTFWIMIFASVHFVISHLPNFNSISIISLAAAVMSLTYSTIAWAASVHKGVHPDVDYSPRASTDVGKVFNFLNALGDVAFAYAGHNVVLEIQATIPSTPEMPSKVPMWRGVIVAYIVVAICYFPVAFLGYYIFGNSVDDNILITLEKPIWLIAMANMFVVIHVIGSYQIFAMPVFDMLETVLVKKMNFNPSFKLRFITRSLYVAFTMIVAICVPFFGGLLGFFGGFAFAPTTYYLPCIMWLVLKKPKRFGLSWTANWFCIIVGVLLTILAPIGGLRTIIINAKTYKFFS

SEQ ID NO: 82803 - protein, 441 aa, Arabidopsis thaliana
  peptide (1)..(441): Ceres Seq. ID no. 12667381
MGNSEMSASEVAAAKQKNVDDWLPITSSRNAKWWYSAFHNVTAMVGAGVLSLPYAMSNLGWGPGVTIMVMSWIITLYTLWQMVEMHEIVPGKRLDRYHELGQHAFGEKLGLWIVVPQQLIVEVGVDIVYMVTGGASLKKVHQLVCPDCKEIRTTFWIMIFASVHFVISHLPNFNSISIISLAAAVMSLTYSTIAWAASVHKGVHPDVDYSPRASTDVGKVFNFLNALGDVAFAYAGHNVVLEIQATIPSTPEMPSKVPMWRGVIVAYIVVAICYFPVAFLGYYIFGNSVDDNILITLEKPIWLIAMANMFVVIHVIGSYQIFAMPVFDMLETVLVKKMNFNPSFKLRFITRSLYVAFTMIVAICVPFFGGLLGFFGGFAFAPTTYYLPCIMWLVLKKPKRFGLSWTANWFCIIVGVLLTILAPIGGLRTIIINAKTYKFFS

SEQ ID NO: 82804 - protein, 436 aa, Arabidopsis thaliana
  peptide (1)..(436): Ceres Seq. ID no. 12667382
MSASEVAAAKQKNVDDWLPITSSRNAKWWYSAFHNVTAMVGAGVLSLPYAMSNLGWGPGVTIMVMSWIITLYTLWQMVEMHEIVPGKRLDRYHELGQHAFGEKLGLWIVVPQQLIVEVGVDIVYMVTGGASLKKVHQLVCPDCKEIRTTFWIMIFASVHFVISHLPNFNSISIISLAAAVMSLTYSTIAWAASVHKGVHPDVDYSPRASTDVGKVFNFLNALGDVAFAYAGHNVVLEIQATIPSTPEMPSKVPMWRGVIVAYIVVAICYFPVAFLGYYIFGNSVDDNILITLEKPIWLIAMANMFVVIHVIGSYQIFAMPVFDMLETVLVKKMNFNPSFKLRFITRSLYVAFTMIVAICVPFFGGLLGFFGGFAFAPTTYYLPCIMWLVLKKPKRFGLSWTANWFCIIVGVLLTILAPIGGLRTIIINAKTYKFFS

SEQ ID NO: 82805 - DNA, 755 bp, Arabidopsis thaliana
  misc_feature (1)..(755): Ceres Seq. ID no. 12667391
  misc_feature (1)..(755): Ortholog of  Ceres SEQ ID NO 12624376 as cited in SEQ ID NO 61947
agaacagagagtggtgaaatcaagtgaagaacactaaggttcaactatggcgactcttcgtttcactctacttcttcttgtcttcgtcgtcgggatcttcttctccttctcctccgtttctcatgtacgtgcaacaagtgaaatcaatctcaggatcgaaccattttcctcgccgttcgcgacggatcttgcaaagctgcaaactcaaattggctacaagtttaacaacatcaaccttcttcgccgtgcaatgactcatgcttctttttctcaagagaacaacaaagccttgagtatctttggaacccatatcattgaaaccgcggtctctcttcagtttctcgctaaagatatcgatatttcctcgaaagcactgggccgtttgatatcagaggtttcaaatgtggagtcctcatgtgctcttgacggagaccggttgggtttggggaagataatcagagtttctactaagacagatgcatcgaactcggccattctttgtactggctttagggcaatctttggagctatagctattgatgctggaacggttgatgaagccatcaaggttttctggaaggtacatggagctcgagctggaagactagtctctatgttgtaaattagagctttattaagtcattaaagtcatgttttttcggatgccaagttctaagagactcttctccaatgcttagaattttatggttgatgttaactattagctgctgttatgagggtgtaagtgatcatac

SEQ ID NO: 82806 - protein, 191 aa, Arabidopsis thaliana
  peptide (1)..(191): Ceres Seq. ID no. 12667392
MATLRFTLLLLVFVVGIFFSFSSVSHVRATSEINLRIEPFSSPFATDLAKLQTQIGYKFNNINLLRRAMTHASFSQENNKALSIFGTHIIETAVSLQFLAKDIDISSKALGRLISEVSNVESSCALDGDRLGLGKIIRVSTKTDASNSAILCTGFRAIFGAIAIDAGTVDEAIKVFWKVHGARAGRLVSML

SEQ ID NO: 82807 - protein, 123 aa, Arabidopsis thaliana
  peptide (1)..(123): Ceres Seq. ID no. 12667393
MTHASFSQENNKALSIFGTHIIETAVSLQFLAKDIDISSKALGRLISEVSNVESSCALDGDRLGLGKIIRVSTKTDASNSAILCTGFRAIFGAIAIDAGTVDEAIKVFWKVHGARAGRLVSML

SEQ ID NO: 82808 - DNA, 939 bp, Arabidopsis thaliana
  misc_feature (1)..(939): Ceres Seq. ID no. 12667394
  misc_feature (1)..(939): Ortholog of  Ceres SEQ ID NO 14302008 as cited in SEQ ID NO 56021
atgcagggagcatgcatctccgagagtcagccatggtatctccatttcgtatgcttcataggctttctctttctccttagagtactattcattcctctcctaaaatggttcaccacaagattcctcctcacacccaagcggctcaagcggtacggctcatgggctatggtcactggagccaccgaggggatcggacgcgcctttgctcacgagctggccaaacacggccttaacctcatcctagtcagcagaaacctttcgaagctcgaatctgtctctgatgatttccaacaagagtttccccacatcaagatcaagatcattccatttgacttctcctctgaaggaggatacggagcaatcgaggaagggataaaaggccttgaagttgggattttgataaacaacgttggtattacttatccacgcgccatgttcttccacgaggttgaccaacttacatggaccaaaatcctgagggttaatcttgaagccaccacttgggtcacacgatcactcatcggaccaatgcttcaccgccgccgtggagccatcgtcaatattagctccggcgctgccgttgttgtcccttctcatcccctctacgccatctacgctgccaccaaagcttatgtggatgcactatcaagatctctacatgtggaatataagcagtttggtattgatgtccagtgccaggttcccttatacgtgtcaacaaggatggtgtcagaagtggcagctatagacaaacctagcttatttgtaccgtcgcctgaagtctacgcaaaagcggcggtggcgcagatcggaattggatcacgttgctcgccgttttgggctcattctcttcagtggtttcttgttggacttgtaccggataaccttgttgatacttggcgtctctctatcggacttcgcagaagaagtttatcttaa

SEQ ID NO: 82809 - protein, 312 aa, Arabidopsis thaliana
  peptide (1)..(312): Ceres Seq. ID no. 12667395
MQGACISESQPWYLHFVCFIGFLFLLRVLFIPLLKWFTTRFLLTPKRLKRYGSWAMVTGATEGIGRAFAHELAKHGLNLILVSRNLSKLESVSDDFQQEFPHIKIKIIPFDFSSEGGYGAIEEGIKGLEVGILINNVGITYPRAMFFHEVDQLTWTKILRVNLEATTWVTRSLIGPMLHRRRGAIVNISSGAAVVVPSHPLYAIYAATKAYVDALSRSLHVEYKQFGIDVQCQVPLYVSTRMVSEVAAIDKPSLFVPSPEVYAKAAVAQIGIGSRCSPFWAHSLQWFLVGLVPDNLVDTWRLSIGLRRRSLS

SEQ ID NO: 82810 - protein, 257 aa, Arabidopsis thaliana
  peptide (1)..(257): Ceres Seq. ID no. 12667396
MVTGATEGIGRAFAHELAKHGLNLILVSRNLSKLESVSDDFQQEFPHIKIKIIPFDFSSEGGYGAIEEGIKGLEVGILINNVGITYPRAMFFHEVDQLTWTKILRVNLEATTWVTRSLIGPMLHRRRGAIVNISSGAAVVVPSHPLYAIYAATKAYVDALSRSLHVEYKQFGIDVQCQVPLYVSTRMVSEVAAIDKPSLFVPSPEVYAKAAVAQIGIGSRCSPFWAHSLQWFLVGLVPDNLVDTWRLSIGLRRRSLS

SEQ ID NO: 82811 - protein, 168 aa, Arabidopsis thaliana
  peptide (1)..(168): Ceres Seq. ID no. 12667397
MFFHEVDQLTWTKILRVNLEATTWVTRSLIGPMLHRRRGAIVNISSGAAVVVPSHPLYAIYAATKAYVDALSRSLHVEYKQFGIDVQCQVPLYVSTRMVSEVAAIDKPSLFVPSPEVYAKAAVAQIGIGSRCSPFWAHSLQWFLVGLVPDNLVDTWRLSIGLRRRSLS

SEQ ID NO: 82812 - DNA, 1030 bp, Arabidopsis thaliana
  misc_feature (1)..(1030): Ceres Seq. ID no. 12667412
  misc_feature (1)..(1030): Ortholog of  Ceres SEQ ID NO 14310446 as cited in SEQ ID NO 59610
ttgcgtttccacatttgtttaaacataactctctctctctctctctctctctctctctctcagtacctcttattcttatgctcttcttcaccaatcctatctcttctatctgtctttattttctctacatgtgaattgacccatttctggtaaacacatagagtaccacttttcttatttagattcttcttcctcttcatagcttccaagtcaactacttcagcttctgtcggctgtctcttcccagatctcgttaagaccaaaacttggaataaatgacggaatctgatgatgcctcacgagaaacaccagccagcagaggaggagaagcctcgtcaaatcaagatctgtccaaaccagaatcaaaccatgtttcactcgatctcaagctcaacgatactttcaacgatgacacaaagagcacaaagtgtgaagcaaacccaagagtcttctcttgcaactactgcagacgcaagttctatagctctcaagctcttggaggtcaccagaacgcacacaagcgagaaagaacaatggccaaacgagcaatgcacatgggaagaatgtttggtcaccatcacaggccttacacatacacttcttcttcccttgggatgcaagctcactccggtttacttcatcacaccttatctcagcctcagcctcttgtttctaggtttcatcatcaagggtattttggtaacaccgtgccgttgttctttgactatgacgatggtggtagcgacttcttctggcccggcagcttccgtcaggtggttgaggaagctgaggctccggtggttgtggtggctagtactgagtcaggccttgatttgaactcggttgcggcaaatggaggtgtagataataatagctcaaagcctgatcttaccttaagactctaaaaggattaaggagattatatctttattgttatttttctattgttagacatacagaagataagttggagacagttgatagaaattgatgaaaaactttgttgttatattaaatgaggttgttcatt

SEQ ID NO: 82813 - protein, 209 aa, Arabidopsis thaliana
  peptide (1)..(209): Ceres Seq. ID no. 12667413
MTESDDASRETPASRGGEASSNQDLSKPESNHVSLDLKLNDTFNDDTKSTKCEANPRVFSCNYCRRKFYSSQALGGHQNAHKRERTMAKRAMHMGRMFGHHHRPYTYTSSSLGMQAHSGLLHHTLSQPQPLVSRFHHQGYFGNTVPLFFDYDDGGSDFFWPGSFRQVVEEAEAPVVVVASTESGLDLNSVAANGGVDNNSSKPDLTLRL

SEQ ID NO: 82814 - protein, 182 aa, Arabidopsis thaliana
  peptide (1)..(182): Ceres Seq. ID no. 12667414
MMPHEKHQPAEEEKPRQIKICPNQNQTMFHSISSSTILSTMTQRAQSVKQTQESSLATTADASSIALKLLEVTRTHTSEKEQWPNEQCTWEECLVTITGLTHTLLLPLGCKLTPVYFITPYLSLSLLFLGFIIKGILVTPCRCSLTMTMVVATSSGPAASVRWLRKLRLRWLWWLVLSQALI

SEQ ID NO: 82815 - protein, 181 aa, Arabidopsis thaliana
  peptide (1)..(181): Ceres Seq. ID no. 12667415
MPHEKHQPAEEEKPRQIKICPNQNQTMFHSISSSTILSTMTQRAQSVKQTQESSLATTADASSIALKLLEVTRTHTSEKEQWPNEQCTWEECLVTITGLTHTLLLPLGCKLTPVYFITPYLSLSLLFLGFIIKGILVTPCRCSLTMTMVVATSSGPAASVRWLRKLRLRWLWWLVLSQALI

SEQ ID NO: 82816 - DNA, 588 bp, Arabidopsis thaliana
  misc_feature (1)..(588): Ceres Seq. ID no. 12667420
  misc_feature (1)..(588): Ortholog of  Ceres SEQ ID NO 14308278 as cited in SEQ ID NO 55403
  misc_feature (1)..(588): Ortholog of  Ceres SEQ ID NO 12618176 as cited in SEQ ID NO 64489
  misc_feature (1)..(588): Ortholog of  Ceres SEQ ID NO 15179231 as cited in SEQ ID NO 0
atggtttgtgcttgtatgcgtagaagcgagatggaggtaccggttgatgaggggcatttcctatctatgcttctaaagataatgaatgccaaaaagacgatagagcttggtgttttcaccggttattcgttgctcaccacggccctagcattgcctcatgatggacatgttactggaatagatattgataaagaagcttacgagatgggactggagttcataaagaatgcaggtgttcatcacaagatcaatttcatccactctgattgtcttcaggccttagacaatatgttgagtgagaatccaaaaccagagtttgatttcgcatttgttgacgctgataaaccaaactatgcaaacatgcacgagaggctaatgaagctggtgaaggtaggaggagtcatagcgtttgataacacattgtggtcagggtttgtggcggagaaagaggaaaacgtgccagtgcacatgagggtaaacagaaaagcctttttggacttgaacaagcgtctcgctgctgatcctcacgtcgaggtctctcaagtctccattggcgatggtgtcactctctgcagacgccttgtatga

SEQ ID NO: 82817 - protein, 195 aa, Arabidopsis thaliana
  peptide (1)..(195): Ceres Seq. ID no. 12667421
MVCACMRRSEMEVPVDEGHFLSMLLKIMNAKKTIELGVFTGYSLLTTALALPHDGHVTGIDIDKEAYEMGLEFIKNAGVHHKINFIHSDCLQALDNMLSENPKPEFDFAFVDADKPNYANMHERLMKLVKVGGVIAFDNTLWSGFVAEKEENVPVHMRVNRKAFLDLNKRLAADPHVEVSQVSIGDGVTLCRRLV

SEQ ID NO: 82818 - protein, 190 aa, Arabidopsis thaliana
  peptide (1)..(190): Ceres Seq. ID no. 12667422
MRRSEMEVPVDEGHFLSMLLKIMNAKKTIELGVFTGYSLLTTALALPHDGHVTGIDIDKEAYEMGLEFIKNAGVHHKINFIHSDCLQALDNMLSENPKPEFDFAFVDADKPNYANMHERLMKLVKVGGVIAFDNTLWSGFVAEKEENVPVHMRVNRKAFLDLNKRLAADPHVEVSQVSIGDGVTLCRRLV

SEQ ID NO: 82819 - protein, 185 aa, Arabidopsis thaliana
  peptide (1)..(185): Ceres Seq. ID no. 12667423
MEVPVDEGHFLSMLLKIMNAKKTIELGVFTGYSLLTTALALPHDGHVTGIDIDKEAYEMGLEFIKNAGVHHKINFIHSDCLQALDNMLSENPKPEFDFAFVDADKPNYANMHERLMKLVKVGGVIAFDNTLWSGFVAEKEENVPVHMRVNRKAFLDLNKRLAADPHVEVSQVSIGDGVTLCRRLV

SEQ ID NO: 82820 - DNA, 2778 bp, Arabidopsis thaliana
  misc_feature (1)..(2778): Ceres Seq. ID no. 12667428
  misc_feature (1)..(2778): Ortholog of  Ceres SEQ ID NO 13663942 as cited in SEQ ID NO 67573
atgcgtctgcgtcaccaaggaggacaatacttggctcgcggtatggaacccgtgtactggtcaaacaaggtggattcaacccatgacttatatgacaactatactctcggatcctaccaaaataatagctacaatatattggcacacactggttttggctacgaccacgaattccaaatttatgaaattaactccaattcatggaggattattgatgccactttggacttcaaattagggtatattggtcgtggcgtgtctttgaagggaaagacttactggattgctagtggtgaagaagagaaacggcttggcaaattcttaatcagttttgattatacgacagaaagatttgaacgtctatgtcttccgaataagtatccttgttatgcaactctggctctatccgttgttagagaagagaaactttccatgttatcgcaacgcggaattaaatcaaaggcagaaatatgggtgacaaataagattggtgagacacaagtggtgtcgtggagcatggtcttagctttggatttgcagcctaaacgttgtattggggaaagcggaagtttcttggtcgacgagaagaagagagtggtcgtgtgttgtgataatattagagaccaaggaaaaaccacgtttgactcaaatctaccaaggtatcacaggcaaaagaaaaagggacgaatgatcatagtgtttgacgttgaatcaatgagactccccgtcaccgtcaaagccactaagccgtcgtttctcgtcatttggatccgatactcctccgccgcgtcgtcgccgacagtctccttgaatccaagtggacgattacagcaaactctcgcaggatctgtggaagtgaaaggaaaatctctgcactccggtaagttctcgacggtgaagctaaatccggagatcgccggagctggtaggttcttcgagtttcgatccagattcatccctgcgtcgattgaatttgctcaggaatcgcctctttgcacgacgctgttgaaagatgagctcaaaatccgaaccgttgagcatttgttatcagctcttgaggcgaagggagttgataattgcaggattcaaatcgagagcgaaagttccgatgatcgagaagtcgaggtccctatttttgatggatcagctaaagaatgggtcgatgcgatacaaggagttggcataaacgcggctcaaaaccatgatggtgaaagtgtagagaagatggtcgcacatgtgaacaagcctgtgtatgtttgcaagaacgatacttttgttgctgcatttccggctctagagactcggatcacttgtggtatcgacttcccacaggtgcctgctataggctgccaatggttttcttggagacctatccatgagtcttcttttgcaaaggatatcgcatcatcaagaaccttctgtgtctatgaagaggtggagcgtatgcgtgaagcagggctcattaaaggaggttctctggataacgccatagtttgtagcgctgagcatggatggatgaatcctcctctgcgaatgaggaggaggaggtgcgatcttcaaccgaagagaacgagaatgtgcgatcttcaaccgaagagaacgagtatgtgcgatcttccaccgaagctggtaggggagaagatcctcacgaggattccgataacatctctgagagcggtgcgatccacttgcaaattatggaacgctttaaccaaagatcgggttctggttagattccatctccgtcgcagcaaggaggaagaagaagacacgatggatctatctataaagcaggtagatttgcttaatcaagtcgagatatctagagtgtatcactgcgacggcttgttgttatgcgtggctaaggacaactcgagggtcgtggtttggaacccttatttggggcaaacaagatggatcagacccagaacagaatccaacataggagacagctatgctcttggatacgacatcaaccgtaaccacaaaatcttgaggatggtgcagacaagaaacgtttccgtttacaggtacgaaatctacgacttgcgctctaattcatggagggttctcgaggtcactcccaacggggaaatggaccctaatcatcccctctacggcgtttctgtgaagggaaatacctacttttttgcgcatgaggatagcagcagtggtgaaattgatgaagatggcgacataatcgatcttgaagatttcttactctgttttgattttacaacagagacatttggtctgcgtctgcctcttccgtttcactctactatcgatgcgactgtgaccctctcttgtgttagagaccagcagctcgcggtgctatatcataatgagggtcttcacagtgatgatcggtttaccacagttgagttttgggttactactagtattgagcccaactctgtgtcctggagcaagtttttgacagtggatatgagaccattggcactcactggtgttcggtttgacaatgatatgggtgccaccttcttcattgacgaggatgagaaagtcgctgtggttttcgatctagacggatacctaagcaccgagagcgctcgttaccacaccgcttttatcagtggaaaggatggattctttaaacctgtgactctaggagtagctcccaatgtcggggaaccttgtcccagaaccgggcatattccgactacatatcgtcccccgcttgtctgctcgtctacttaccttccgagtttagtgcaagtcaaccaacagcgcaaaaggaaagaaagacatgtttag

SEQ ID NO: 82821 - protein, 925 aa, Arabidopsis thaliana
  peptide (1)..(925): Ceres Seq. ID no. 12667429
MRLRHQGGQYLARGMEPVYWSNKVDSTHDLYDNYTLGSYQNNSYNILAHTGFGYDHEFQIYEINSNSWRIIDATLDFKLGYIGRGVSLKGKTYWIASGEEEKRLGKFLISFDYTTERFERLCLPNKYPCYATLALSVVREEKLSMLSQRGIKSKAEIWVTNKIGETQVVSWSMVLALDLQPKRCIGESGSFLVDEKKRVVVCCDNIRDQGKTTFDSNLPRYHRQKKKGRMIIVFDVESMRLPVTVKATKPSFLVIWIRYSSAASSPTVSLNPSGRLQQTLAGSVEVKGKSLHSGKFSTVKLNPEIAGAGRFFEFRSRFIPASIEFAQESPLCTTLLKDELKIRTVEHLLSALEAKGVDNCRIQIESESSDDREVEVPIFDGSAKEWVDAIQGVGINAAQNHDGESVEKMVAHVNKPVYVCKNDTFVAAFPALETRITCGIDFPQVPAIGCQWFSWRPIHESSFAKDIASSRTFCVYEEVERMREAGLIKGGSLDNAIVCSAEHGWMNPPLRMRRRRCDLQPKRTRMCDLQPKRTSMCDLPPKLVGEKILTRIPITSLRAVRSTCKLWNALTKDRVLVRFHLRRSKEEEEDTMDLSIKQVDLLNQVEISRVYHCDGLLLCVAKDNSRVVVWNPYLGQTRWIRPRTESNIGDSYALGYDINRNHKILRMVQTRNVSVYRYEIYDLRSNSWRVLEVTPNGEMDPNHPLYGVSVKGNTYFFAHEDSSSGEIDEDGDIIDLEDFLLCFDFTTETFGLRLPLPFHSTIDATVTLSCVRDQQLAVLYHNEGLHSDDRFTTVEFWVTTSIEPNSVSWSKFLTVDMRPLALTGVRFDNDMGATFFIDEDEKVAVVFDLDGYLSTESARYHTAFISGKDGFFKPVTLGVAPNVGEPCPRTGHIPTTYRPPLVCSSTYLPSLVQVNQQRKRKERHV

SEQ ID NO: 82822 - protein, 911 aa, Arabidopsis thaliana
  peptide (1)..(911): Ceres Seq. ID no. 12667430
MEPVYWSNKVDSTHDLYDNYTLGSYQNNSYNILAHTGFGYDHEFQIYEINSNSWRIIDATLDFKLGYIGRGVSLKGKTYWIASGEEEKRLGKFLISFDYTTERFERLCLPNKYPCYATLALSVVREEKLSMLSQRGIKSKAEIWVTNKIGETQVVSWSMVLALDLQPKRCIGESGSFLVDEKKRVVVCCDNIRDQGKTTFDSNLPRYHRQKKKGRMIIVFDVESMRLPVTVKATKPSFLVIWIRYSSAASSPTVSLNPSGRLQQTLAGSVEVKGKSLHSGKFSTVKLNPEIAGAGRFFEFRSRFIPASIEFAQESPLCTTLLKDELKIRTVEHLLSALEAKGVDNCRIQIESESSDDREVEVPIFDGSAKEWVDAIQGVGINAAQNHDGESVEKMVAHVNKPVYVCKNDTFVAAFPALETRITCGIDFPQVPAIGCQWFSWRPIHESSFAKDIASSRTFCVYEEVERMREAGLIKGGSLDNAIVCSAEHGWMNPPLRMRRRRCDLQPKRTRMCDLQPKRTSMCDLPPKLVGEKILTRIPITSLRAVRSTCKLWNALTKDRVLVRFHLRRSKEEEEDTMDLSIKQVDLLNQVEISRVYHCDGLLLCVAKDNSRVVVWNPYLGQTRWIRPRTESNIGDSYALGYDINRNHKILRMVQTRNVSVYRYEIYDLRSNSWRVLEVTPNGEMDPNHPLYGVSVKGNTYFFAHEDSSSGEIDEDGDIIDLEDFLLCFDFTTETFGLRLPLPFHSTIDATVTLSCVRDQQLAVLYHNEGLHSDDRFTTVEFWVTTSIEPNSVSWSKFLTVDMRPLALTGVRFDNDMGATFFIDEDEKVAVVFDLDGYLSTESARYHTAFISGKDGFFKPVTLGVAPNVGEPCPRTGHIPTTYRPPLVCSSTYLPSLVQVNQQRKRKERHV

SEQ ID NO: 82823 - protein, 781 aa, Arabidopsis thaliana
  peptide (1)..(781): Ceres Seq. ID no. 12667431
MLSQRGIKSKAEIWVTNKIGETQVVSWSMVLALDLQPKRCIGESGSFLVDEKKRVVVCCDNIRDQGKTTFDSNLPRYHRQKKKGRMIIVFDVESMRLPVTVKATKPSFLVIWIRYSSAASSPTVSLNPSGRLQQTLAGSVEVKGKSLHSGKFSTVKLNPEIAGAGRFFEFRSRFIPASIEFAQESPLCTTLLKDELKIRTVEHLLSALEAKGVDNCRIQIESESSDDREVEVPIFDGSAKEWVDAIQGVGINAAQNHDGESVEKMVAHVNKPVYVCKNDTFVAAFPALETRITCGIDFPQVPAIGCQWFSWRPIHESSFAKDIASSRTFCVYEEVERMREAGLIKGGSLDNAIVCSAEHGWMNPPLRMRRRRCDLQPKRTRMCDLQPKRTSMCDLPPKLVGEKILTRIPITSLRAVRSTCKLWNALTKDRVLVRFHLRRSKEEEEDTMDLSIKQVDLLNQVEISRVYHCDGLLLCVAKDNSRVVVWNPYLGQTRWIRPRTESNIGDSYALGYDINRNHKILRMVQTRNVSVYRYEIYDLRSNSWRVLEVTPNGEMDPNHPLYGVSVKGNTYFFAHEDSSSGEIDEDGDIIDLEDFLLCFDFTTETFGLRLPLPFHSTIDATVTLSCVRDQQLAVLYHNEGLHSDDRFTTVEFWVTTSIEPNSVSWSKFLTVDMRPLALTGVRFDNDMGATFFIDEDEKVAVVFDLDGYLSTESARYHTAFISGKDGFFKPVTLGVAPNVGEPCPRTGHIPTTYRPPLVCSSTYLPSLVQVNQQRKRKERHV

SEQ ID NO: 82824 - DNA, 2850 bp, Arabidopsis thaliana
  misc_feature (1)..(2850): Ceres Seq. ID no. 12667447
  misc_feature (1)..(2850): Ortholog of  Ceres SEQ ID NO 13663942 as cited in SEQ ID NO 67573
atgcgtctgcgtcaccaaggaggacaatacttggctcgcggtatggaacccgtgtactggtcaaacaaggtggattcaacccatgacttatatgacaactatactctcggatcctaccaaaataatagctacaatatattggcacacactggttttggctacgaccacgaattccaaatttatgaaattaactccaattcatggaggattattgatgccactttggacttcaaattagggtatattggtcgtggcgtgtctttgaagggaaagacttactggattgctagtggtgaagaagagaaacggcttggcaaattcttaatcagttttgattatacgacagaaagatttgaacgtctatgtcttccgaataagtatccttgttatgcaactctggctctatccgttgttagagaagagaaactttccatgttatcgcaacgcggaattaaatcaaaggcagaaatatgggtgacaaataagattggtgagacacaagtggtgtcgtggagcatggtcttagctttggatttgcagcctaaacgttgtattggggaaagcggaagtttcttggtcgacgagaagaagagagtggtcgtgtgttgtgataatattagagaccaaggaaaaaccacgtttgactcaaatctaccaaggtatcacaggcaaaagaaaaagggacgaatgatcatagtgtttgacgttgaatcaatgagactccccgtcaccgtcaaagccactaagccgtcgtttctcgtcatttggatccgatactcctccgccgcgtcgtcgccgacagtctccttgaatccaagtggacgattacagcaaactctcgcaggatctgtggaagtgaaaggaaaatctctgcactccggtaagttctcgacggtgaagctaaatccggagatcgccggagctggtaggttcttcgagtttcgatccagattcatccctgcgtcgattgaatttgctcaggaatcgcctctttgcacgacgctgttgaaagatgagctcaaaatccgaaccgttgagcatttgttatcagctcttgaggcgaagggagttgataattgcaggattcaaatcgagagcgaaagttccgatgatcgagaagtcgaggtttctaaagaatgggtcgatgcgatacaaggagttggcataaacgcggctcaaaaccatgatggtgaaagtgtagagaagatggtcgcacatgtgaacaagcctgtgtatgtttgcaagaacgatacttttgttgctgcatttccggctctagagactcggatcacttgtggtatcgacttcccacaggtgcctgctataggctgccaatggttttcttggagacctatccatgagtcttcttttgcaaaggatatcgcatcatcaagaaccttctgtgtctatgaagaggtggagcgtatgcgtgaagcagggctcattaaaggaggttctctggataacgccatagtttgtagcgctgagcatggatggatgaatcctcctctgcggtttgatgatgaagcatgtcgacataagattcttgacctaatcggtgacctctcccttgtttcacggggcggaaatggaggactccccgtggctcacatagtcgcatataagaatgaggaggaggaggtgcgatcttcaaccgaagagaacgagaatgtgcgatcttcaaccgaagagaacgagtatgtgcgatcttccaccgaagctggtaggggagaagatcctcacgaggattccgataacatctctgagagcggtgcgatccacttgcaaattatggaacgctttaaccaaagatcgggttctggcaaggaggaagaagaagacacgatggatctatctataaagcaggtagatttgcttaatcaagtcgagatatctagagtgtatcactgcgacggcttgttgttatgcgtggctaaggacaactcgagggtcgtggtttggaacccttatttggggcaaacaagatggatcagacccagaacagaatccaacataggagacagctatgctcttggatacgacatcaaccgtaaccacaaaatcttgaggatggtgcagacaagaaacgtttccgtttacaggtacgaaatctacgacttgcgctctaattcatggagggttctcgaggtcactcccaacggggaaatggaccctaatcatcccctctacggcgtttctgtgaagggaaatacctacttttttgcgcatgaggatagcagcagtggtgaaattgatgaagatggcgacataatcgatcttgaagatttcttactctgttttgattttacaacagagacatttggtctgcgtctgcctcttccgtttcactctactatcgatgcgactgtgaccctctcttgtgttagagaccagcagctcgcggtgctatatcataatgagggtcttcacagtgatgatcggtttaccacagttgagttttgggttactactagtattgagcccaactctgtgtcctggagcaagtttttgacagtggatatgagaccattggcactcactggtgttcggtttgacaatgatatgggtgccaccttcttcattgacgaggatgagaaagtcgctgtggttttcgatctagacggatacctaagcaccgagagcgctcgttaccacaccgcttttatcagtggaaaggatggattctttaaacctgtgactctaggagtagctcccaatgtcggggaaccttgtcccagaaccgggcatattccgactacatatcgtcccccgcttgtctgctcgtctacttaccttccgagtttagtgcaagtcaaccaacagcgcaaaaggaaagaaagacatgtttag

SEQ ID NO: 82825 - protein, 949 aa, Arabidopsis thaliana
  peptide (1)..(949): Ceres Seq. ID no. 12667448
MRLRHQGGQYLARGMEPVYWSNKVDSTHDLYDNYTLGSYQNNSYNILAHTGFGYDHEFQIYEINSNSWRIIDATLDFKLGYIGRGVSLKGKTYWIASGEEEKRLGKFLISFDYTTERFERLCLPNKYPCYATLALSVVREEKLSMLSQRGIKSKAEIWVTNKIGETQVVSWSMVLALDLQPKRCIGESGSFLVDEKKRVVVCCDNIRDQGKTTFDSNLPRYHRQKKKGRMIIVFDVESMRLPVTVKATKPSFLVIWIRYSSAASSPTVSLNPSGRLQQTLAGSVEVKGKSLHSGKFSTVKLNPEIAGAGRFFEFRSRFIPASIEFAQESPLCTTLLKDELKIRTVEHLLSALEAKGVDNCRIQIESESSDDREVEVSKEWVDAIQGVGINAAQNHDGESVEKMVAHVNKPVYVCKNDTFVAAFPALETRITCGIDFPQVPAIGCQWFSWRPIHESSFAKDIASSRTFCVYEEVERMREAGLIKGGSLDNAIVCSAEHGWMNPPLRFDDEACRHKILDLIGDLSLVSRGGNGGLPVAHIVAYKNEEEEVRSSTEENENVRSSTEENEYVRSSTEAGRGEDPHEDSDNISESGAIHLQIMERFNQRSGSGKEEEEDTMDLSIKQVDLLNQVEISRVYHCDGLLLCVAKDNSRVVVWNPYLGQTRWIRPRTESNIGDSYALGYDINRNHKILRMVQTRNVSVYRYEIYDLRSNSWRVLEVTPNGEMDPNHPLYGVSVKGNTYFFAHEDSSSGEIDEDGDIIDLEDFLLCFDFTTETFGLRLPLPFHSTIDATVTLSCVRDQQLAVLYHNEGLHSDDRFTTVEFWVTTSIEPNSVSWSKFLTVDMRPLALTGVRFDNDMGATFFIDEDEKVAVVFDLDGYLSTESARYHTAFISGKDGFFKPVTLGVAPNVGEPCPRTGHIPTTYRPPLVCSSTYLPSLVQVNQQRKRKERHV

SEQ ID NO: 82826 - protein, 935 aa, Arabidopsis thaliana
  peptide (1)..(935): Ceres Seq. ID no. 12667449
MEPVYWSNKVDSTHDLYDNYTLGSYQNNSYNILAHTGFGYDHEFQIYEINSNSWRIIDATLDFKLGYIGRGVSLKGKTYWIASGEEEKRLGKFLISFDYTTERFERLCLPNKYPCYATLALSVVREEKLSMLSQRGIKSKAEIWVTNKIGETQVVSWSMVLALDLQPKRCIGESGSFLVDEKKRVVVCCDNIRDQGKTTFDSNLPRYHRQKKKGRMIIVFDVESMRLPVTVKATKPSFLVIWIRYSSAASSPTVSLNPSGRLQQTLAGSVEVKGKSLHSGKFSTVKLNPEIAGAGRFFEFRSRFIPASIEFAQESPLCTTLLKDELKIRTVEHLLSALEAKGVDNCRIQIESESSDDREVEVSKEWVDAIQGVGINAAQNHDGESVEKMVAHVNKPVYVCKNDTFVAAFPALETRITCGIDFPQVPAIGCQWFSWRPIHESSFAKDIASSRTFCVYEEVERMREAGLIKGGSLDNAIVCSAEHGWMNPPLRFDDEACRHKILDLIGDLSLVSRGGNGGLPVAHIVAYKNEEEEVRSSTEENENVRSSTEENEYVRSSTEAGRGEDPHEDSDNISESGAIHLQIMERFNQRSGSGKEEEEDTMDLSIKQVDLLNQVEISRVYHCDGLLLCVAKDNSRVVVWNPYLGQTRWIRPRTESNIGDSYALGYDINRNHKILRMVQTRNVSVYRYEIYDLRSNSWRVLEVTPNGEMDPNHPLYGVSVKGNTYFFAHEDSSSGEIDEDGDIIDLEDFLLCFDFTTETFGLRLPLPFHSTIDATVTLSCVRDQQLAVLYHNEGLHSDDRFTTVEFWVTTSIEPNSVSWSKFLTVDMRPLALTGVRFDNDMGATFFIDEDEKVAVVFDLDGYLSTESARYHTAFISGKDGFFKPVTLGVAPNVGEPCPRTGHIPTTYRPPLVCSSTYLPSLVQVNQQRKRKERHV

SEQ ID NO: 82827 - protein, 805 aa, Arabidopsis thaliana
  peptide (1)..(805): Ceres Seq. ID no. 12667450
MLSQRGIKSKAEIWVTNKIGETQVVSWSMVLALDLQPKRCIGESGSFLVDEKKRVVVCCDNIRDQGKTTFDSNLPRYHRQKKKGRMIIVFDVESMRLPVTVKATKPSFLVIWIRYSSAASSPTVSLNPSGRLQQTLAGSVEVKGKSLHSGKFSTVKLNPEIAGAGRFFEFRSRFIPASIEFAQESPLCTTLLKDELKIRTVEHLLSALEAKGVDNCRIQIESESSDDREVEVSKEWVDAIQGVGINAAQNHDGESVEKMVAHVNKPVYVCKNDTFVAAFPALETRITCGIDFPQVPAIGCQWFSWRPIHESSFAKDIASSRTFCVYEEVERMREAGLIKGGSLDNAIVCSAEHGWMNPPLRFDDEACRHKILDLIGDLSLVSRGGNGGLPVAHIVAYKNEEEEVRSSTEENENVRSSTEENEYVRSSTEAGRGEDPHEDSDNISESGAIHLQIMERFNQRSGSGKEEEEDTMDLSIKQVDLLNQVEISRVYHCDGLLLCVAKDNSRVVVWNPYLGQTRWIRPRTESNIGDSYALGYDINRNHKILRMVQTRNVSVYRYEIYDLRSNSWRVLEVTPNGEMDPNHPLYGVSVKGNTYFFAHEDSSSGEIDEDGDIIDLEDFLLCFDFTTETFGLRLPLPFHSTIDATVTLSCVRDQQLAVLYHNEGLHSDDRFTTVEFWVTTSIEPNSVSWSKFLTVDMRPLALTGVRFDNDMGATFFIDEDEKVAVVFDLDGYLSTESARYHTAFISGKDGFFKPVTLGVAPNVGEPCPRTGHIPTTYRPPLVCSSTYLPSLVQVNQQRKRKERHV

SEQ ID NO: 82828 - DNA, 1098 bp, Arabidopsis thaliana
  misc_feature (1)..(1098): Ceres Seq. ID no. 12667471
  misc_feature (1)..(1098): Ortholog of  Ceres SEQ ID NO 14303324 as cited in SEQ ID NO 54563
atggggaggtcgccttgttgcgacgagaatggtctaaagaaagggccatggactcctgaagaagatcaaaagcttattgattacattcataaacatggtcatggaagctggagagctctccccaagctcgcagatttgaataggtgtggaaagagttgtagactgaggtggacaaattatttgagaccagacatcaaaagaggaaagttttcagccgaagaagagcaaacaatcctccatctccactccattctcgggaataaatggtcagctattgcgacgcatttgcaaggtcgtacagataatgagataaaaaacttttggaacacacatctaaagaagaaattgatccagatggggatcgatcctgtgactcatcagccaagaaccgacctcttcgcaagtttacctcagctcatagccttggcaaatctaaaagacctaatcgaacaaacatcacaattctcatccatgcaaggcgaagcagcccaactagccaatctacaatatctccaacgtatgtttaattcttcggcttcattaaccaacaacaacggcaacaattttagcccgagtagtattctcgatatcgatcagcaccatgccatgaacctcttaaactccatggtctcttggaacaaagatcaaaaccccgcttttgatccggttcttgaactcgaggctaacgatcaaaatcaagatttatttccactagggtttatcattgatcaacccacccaaccactccaacaacaaaaataccatttaaacaatagtcctagtgagctaccatcgcaaggtgacccacttcttgatcatgtccctttcagtctccaaacacctttgaatagtgaggatcactttatagataatttggtcaaacatccaactgatcatgagcatgaacatgatgacaatccatcttcatgggttctcccttctcttatagacaataaccctaaaactgtcacgtcttctcttccacacaacaatccggcggatgcaagtagcagctcaagctatggaggttgtgaagctgcgtcgttttattggcctgacatttgcttcgacgaaagcctcatgaacgttatatcttag

SEQ ID NO: 82829 - protein, 365 aa, Arabidopsis thaliana
  peptide (1)..(365): Ceres Seq. ID no. 12667472
MGRSPCCDENGLKKGPWTPEEDQKLIDYIHKHGHGSWRALPKLADLNRCGKSCRLRWTNYLRPDIKRGKFSAEEEQTILHLHSILGNKWSAIATHLQGRTDNEIKNFWNTHLKKKLIQMGIDPVTHQPRTDLFASLPQLIALANLKDLIEQTSQFSSMQGEAAQLANLQYLQRMFNSSASLTNNNGNNFSPSSILDIDQHHAMNLLNSMVSWNKDQNPAFDPVLELEANDQNQDLFPLGFIIDQPTQPLQQQKYHLNNSPSELPSQGDPLLDHVPFSLQTPLNSEDHFIDNLVKHPTDHEHEHDDNPSSWVLPSLIDNNPKTVTSSLPHNNPADASSSSSYGGCEAASFYWPDICFDESLMNVIS

SEQ ID NO: 82830 - protein, 247 aa, Arabidopsis thaliana
  peptide (1)..(247): Ceres Seq. ID no. 12667473
MGIDPVTHQPRTDLFASLPQLIALANLKDLIEQTSQFSSMQGEAAQLANLQYLQRMFNSSASLTNNNGNNFSPSSILDIDQHHAMNLLNSMVSWNKDQNPAFDPVLELEANDQNQDLFPLGFIIDQPTQPLQQQKYHLNNSPSELPSQGDPLLDHVPFSLQTPLNSEDHFIDNLVKHPTDHEHEHDDNPSSWVLPSLIDNNPKTVTSSLPHNNPADASSSSSYGGCEAASFYWPDICFDESLMNVIS

SEQ ID NO: 82831 - protein, 208 aa, Arabidopsis thaliana
  peptide (1)..(208): Ceres Seq. ID no. 12667474
MQGEAAQLANLQYLQRMFNSSASLTNNNGNNFSPSSILDIDQHHAMNLLNSMVSWNKDQNPAFDPVLELEANDQNQDLFPLGFIIDQPTQPLQQQKYHLNNSPSELPSQGDPLLDHVPFSLQTPLNSEDHFIDNLVKHPTDHEHEHDDNPSSWVLPSLIDNNPKTVTSSLPHNNPADASSSSSYGGCEAASFYWPDICFDESLMNVIS

SEQ ID NO: 82832 - DNA, 1068 bp, Arabidopsis thaliana
  misc_feature (1)..(1068): Ceres Seq. ID no. 12667525
  misc_feature (1)..(1068): Ortholog of  Ceres SEQ ID NO 13502952 as cited in SEQ ID NO 62271
  misc_feature (1)..(1068): Ortholog of  Ceres SEQ ID NO 13502973 as cited in SEQ ID NO 68052
  misc_feature (1)..(1068): Ortholog of  Ceres SEQ ID NO 13596000 as cited in SEQ ID NO 68188
atgggctttgttagacctgtttgcatgacaatcctctttcttttgattgtattcgttctttcggcgccgtcctcggccatggaccttcccgccacatccggtggtcacaaccggagcaacgaggaggttgagtttattttccaaatgtggatgtccaagcacgggaagacttataccaatgctctcggagagaaggaacggcgttttcagaacttcaaggacaatctccgtttcatcgaccagcacaatgcaaagaacctctcttaccagcttggtttgactcggtttgcagacctaaccgttcaagagtaccgagaccttttccctggaagccctaaaccgaaacaaaggaatctcaaaaccagtcgtaggtacgtgccactcgccggagatcagctcccagagtcagttgactggaggcaagaaggtgcagtgtcggaaattaaagaccaaggcacttgcaacagctgctgggcgttctccacagtggcagcagtagagggattaaacaagattgtgacaggagagttaatctcattgtccgagcaagaattggtcgactgcaacctagtcaacaacggttgttatggatcaggactaatggacacagctttccagttccttatcaataacaatggtcttgattccgaaaaagattatccataccagggcactcaaggctcctgtaaccgcaaacaggttcacctattagtcatcacgattgatagctacgaggatgtgccagcgaatgatgagatttccttacaaaaggcggttgctcaccagcccgtgagtgttggcgttgacaaaaaatcccaagaatttatgctctatcgatcgtgtatatataatggaccatgcggaacaaatcttgaccatgcacttgttatcgtcgggtacggtagtgagaacggtcaggactattggatcgtgagaaactcatggggaacgacttggggagatgctggctacattaagattgctcgtaactttgaagatccaaaaggtctctgtggaattgcgatgcttgcttcatatcctattaagaattcggcttccaatgcatga

SEQ ID NO: 82833 - protein, 355 aa, Arabidopsis thaliana
  peptide (1)..(355): Ceres Seq. ID no. 12667526
MGFVRPVCMTILFLLIVFVLSAPSSAMDLPATSGGHNRSNEEVEFIFQMWMSKHGKTYTNALGEKERRFQNFKDNLRFIDQHNAKNLSYQLGLTRFADLTVQEYRDLFPGSPKPKQRNLKTSRRYVPLAGDQLPESVDWRQEGAVSEIKDQGTCNSCWAFSTVAAVEGLNKIVTGELISLSEQELVDCNLVNNGCYGSGLMDTAFQFLINNNGLDSEKDYPYQGTQGSCNRKQVHLLVITIDSYEDVPANDEISLQKAVAHQPVSVGVDKKSQEFMLYRSCIYNGPCGTNLDHALVIVGYGSENGQDYWIVRNSWGTTWGDAGYIKIARNFEDPKGLCGIAMLASYPIKNSASNA

SEQ ID NO: 82834 - protein, 347 aa, Arabidopsis thaliana
  peptide (1)..(347): Ceres Seq. ID no. 12667527
MTILFLLIVFVLSAPSSAMDLPATSGGHNRSNEEVEFIFQMWMSKHGKTYTNALGEKERRFQNFKDNLRFIDQHNAKNLSYQLGLTRFADLTVQEYRDLFPGSPKPKQRNLKTSRRYVPLAGDQLPESVDWRQEGAVSEIKDQGTCNSCWAFSTVAAVEGLNKIVTGELISLSEQELVDCNLVNNGCYGSGLMDTAFQFLINNNGLDSEKDYPYQGTQGSCNRKQVHLLVITIDSYEDVPANDEISLQKAVAHQPVSVGVDKKSQEFMLYRSCIYNGPCGTNLDHALVIVGYGSENGQDYWIVRNSWGTTWGDAGYIKIARNFEDPKGLCGIAMLASYPIKNSASNA

SEQ ID NO: 82835 - protein, 329 aa, Arabidopsis thaliana
  peptide (1)..(329): Ceres Seq. ID no. 12667528
MDLPATSGGHNRSNEEVEFIFQMWMSKHGKTYTNALGEKERRFQNFKDNLRFIDQHNAKNLSYQLGLTRFADLTVQEYRDLFPGSPKPKQRNLKTSRRYVPLAGDQLPESVDWRQEGAVSEIKDQGTCNSCWAFSTVAAVEGLNKIVTGELISLSEQELVDCNLVNNGCYGSGLMDTAFQFLINNNGLDSEKDYPYQGTQGSCNRKQVHLLVITIDSYEDVPANDEISLQKAVAHQPVSVGVDKKSQEFMLYRSCIYNGPCGTNLDHALVIVGYGSENGQDYWIVRNSWGTTWGDAGYIKIARNFEDPKGLCGIAMLASYPIKNSASNA

SEQ ID NO: 82836 - DNA, 1329 bp, Arabidopsis thaliana
  misc_feature (1)..(1329): Ceres Seq. ID no. 12667529
  misc_feature (1)..(1329): Ortholog of  Ceres SEQ ID NO 13577044 as cited in SEQ ID NO 58682
aacatccaatctctctttatattccttccttccattgtggcaataagtaacaaaccttgccctctacttcattccctccttgttttgatttcatcgtctttgttagctctcctctgtttttttttcttagtcaatcgatggcgaaggagcttgctgataaggctaaagaggctttcgtagacgatgacttcgatgttgctgttgacttgtactccaaagccattgacttggatcctaattgcgctgagttcttcgctgatcgtgctcaggcctatatcaaactcgaaagcttcactgaggccgtggcagatgcgaacaaagcaattgagttggatccttcattgaccaaagcttacctaagaaaaggaactgcctgtatgaagcttgaagagtatcggactgctaaaacagctcttgaaaagggtgcctctatcacgccgagtgaatccaaatttaagaagttgatagatgaatgcaattttctaatcacagaagaagagaaagatttggttcaaccggtgccttcgactttgccttcaagtgtgacagcaccaccagtatctgaacttgatgtcacccctacagccaagtacaggcacgagtactaccaaaagccagaggaagttgtggtaactgtttttgcaaaaggaatacccaagcagaatgttaacatcgactttggtgaacaaattctgagtgttgtgattgaggttcctggagaggatgcgtattatctccaaccgagattgtttggaaagataataccagataagtgcaaatatgaagtattgtcgaccaaaattgagatctgtcttgcaaaagccgatataatcacatgggcctccctcgaacacggcaaagggccagcggttttgccaaagcctaatgtctcatcagaggtttcacagaggccagcttatccatcttctaagaaagttaaggactgggacaagctggaagctgaagtgaagaagcaggaaaaagatgagaagctggaaggagacgcagctttgaacaaattcttccgggagatataccagaatgcggatgaggatatgaggcgagcgatgagcaaatcatttgtggaatcgaatgggacagtgctgtcaacaaactggcaagaggttgggactaagacaatcgagagtactcctccggatggcatggagctcaagaaatgggagatctgatctgatatgatatgatgatcctttcctttttatgcagttgtgaattttgcctaaatgtagacaaatcttgaaacctggtccctttcttcctgtaatgaggatcctaaggtttttgcttttttgttaaatatggctttct

SEQ ID NO: 82837 - protein, 350 aa, Arabidopsis thaliana; identical to SEQ ID NO: 48150
  peptide (1)..(350): Ceres Seq. ID no. 12667530

SEQ ID NO: 82838 - protein, 270 aa, Arabidopsis thaliana; identical to SEQ ID NO: 48151
  peptide (1)..(270): Ceres Seq. ID no. 12667531

SEQ ID NO: 82839 - DNA, 1544 bp, Arabidopsis thaliana
  misc_feature (1)..(1544): Ceres Seq. ID no. 12667532
  misc_feature (1)..(1544): Ortholog of  Ceres SEQ ID NO 14306538 as cited in SEQ ID NO 53117
acgcaaaaacaatcatctctctataaaaataaaagaagttggttagttccaacgctagagttaagaaatatggctagccaaggatgcgtagattggcagttcagtggcagtgatgcagccgaaaaggccgcccaagcctccctaggcacttactcttctgaaatcttcagtctgtgtgaccctcaaggaaagcctattttgcctccactaagtgaagaggcagagaccagccataccgccgaaaaggcggttgttaaggctgtcctttgcggtacgggaaacgcctatgctccaagtattggcctcccggttgccaaacgtgctgtggcggaatatctaaaccgagatcttgacaataagctaacgggagatgacgtatatatgactgttggatgcaaacaagcaatcgagctcgcggttagtattctggctaaaccgaaagccaacatcttgcttccgaggccaggcttcccatgggacatggtccactctatctacaaacaccttgaggtccgaaggtatgagttcatccctgaaagagactttgagatcgatttcaacagcgttagagagatggtagacgagaacacttttgcgatatttataatcaacccccacaatcccaatgggaactactacactgaggctcatcttaagcagctcgctacattggcacgggaactcgggataatggtcgtttcggatgaagtatatagatggtccgtattcgggagtaatccatttgttccaatggggaaattctcctcgatagtaccagtgattacactcgggtccatatcgaaaggatggattgtcccaggatggcgaacgggctggctcgcgttacacgatctaaatggtgtctttagatccacaaaggtcttaaaagctgcgaaagaatttctggagattacttccaaaccaccaactgtcatccaggcggctattcccacaatcttggagaaaactcctcaagattttttcgagaagagggggatttttctaaaagacaaagtggattttggatattctaagctcaagaacataccaactctcacctgctacatgaaacctgaatcatgcaccttcttatggaccaagctggacccattgcattttgtagacattgaagacgatcacgacttctgcaggaagcttgctaaggaagaaaatctcgttgttttaccaggaattgcatttggtcagaataactggttgaggcattctatcgacatggagactccaagattggaggatgcatttgaaagattaaagagcttctgtgaacgccattccgttatagttgaagcttcttcactcaaagacgtcaatggcgtcaactaaagggtcaatataaatttctttgccttaagtcttttacatatgctataataataaatgtgtgttttattgatatgagatcaatcatgaacacttttgtatctgtaacaaataaaattggtgaatttatcaccatgtcgtgtaatgttttctcatagtttgcaatatttcgatcgatgtatttctacttttcgaaacataag

SEQ ID NO: 82840 - protein, 447 aa, Arabidopsis thaliana
  peptide (1)..(447): Ceres Seq. ID no. 12667533
TQKQSSLYKNKRSWLVPTLELRNMASQGCVDWQFSGSDAAEKAAQASLGTYSSEIFSLCDPQGKPILPPLSEEAETSHTAEKAVVKAVLCGTGNAYAPSIGLPVAKRAVAEYLNRDLDNKLTGDDVYMTVGCKQAIELAVSILAKPKANILLPRPGFPWDMVHSIYKHLEVRRYEFIPERDFEIDFNSVREMVDENTFAIFIINPHNPNGNYYTEAHLKQLATLARELGIMVVSDEVYRWSVFGSNPFVPMGKFSSIVPVITLGSISKGWIVPGWRTGWLALHDLNGVFRSTKVLKAAKEFLEITSKPPTVIQAAIPTILEKTPQDFFEKRGIFLKDKVDFGYSKLKNIPTLTCYMKPESCTFLWTKLDPLHFVDIEDDHDFCRKLAKEENLVVLPGIAFGQNNWLRHSIDMETPRLEDAFERLKSFCERHSVIVEASSLKDVNGVN

SEQ ID NO: 82841 - protein, 424 aa, Arabidopsis thaliana
  peptide (1)..(424): Ceres Seq. ID no. 12667534
MASQGCVDWQFSGSDAAEKAAQASLGTYSSEIFSLCDPQGKPILPPLSEEAETSHTAEKAVVKAVLCGTGNAYAPSIGLPVAKRAVAEYLNRDLDNKLTGDDVYMTVGCKQAIELAVSILAKPKANILLPRPGFPWDMVHSIYKHLEVRRYEFIPERDFEIDFNSVREMVDENTFAIFIINPHNPNGNYYTEAHLKQLATLARELGIMVVSDEVYRWSVFGSNPFVPMGKFSSIVPVITLGSISKGWIVPGWRTGWLALHDLNGVFRSTKVLKAAKEFLEITSKPPTVIQAAIPTILEKTPQDFFEKRGIFLKDKVDFGYSKLKNIPTLTCYMKPESCTFLWTKLDPLHFVDIEDDHDFCRKLAKEENLVVLPGIAFGQNNWLRHSIDMETPRLEDAFERLKSFCERHSVIVEASSLKDVNGVN

SEQ ID NO: 82842 - protein, 320 aa, Arabidopsis thaliana
  peptide (1)..(320): Ceres Seq. ID no. 12667535
MTVGCKQAIELAVSILAKPKANILLPRPGFPWDMVHSIYKHLEVRRYEFIPERDFEIDFNSVREMVDENTFAIFIINPHNPNGNYYTEAHLKQLATLARELGIMVVSDEVYRWSVFGSNPFVPMGKFSSIVPVITLGSISKGWIVPGWRTGWLALHDLNGVFRSTKVLKAAKEFLEITSKPPTVIQAAIPTILEKTPQDFFEKRGIFLKDKVDFGYSKLKNIPTLTCYMKPESCTFLWTKLDPLHFVDIEDDHDFCRKLAKEENLVVLPGIAFGQNNWLRHSIDMETPRLEDAFERLKSFCERHSVIVEASSLKDVNGVN

SEQ ID NO: 82843 - DNA, 1328 bp, Arabidopsis thaliana
  misc_feature (1)..(1328): Ceres Seq. ID no. 12667555
  misc_feature (1)..(1328): Ortholog of  Ceres SEQ ID NO 14303440 as cited in SEQ ID NO 59496
  misc_feature (1)..(1328): Ortholog of  Ceres SEQ ID NO 13642436 as cited in SEQ ID NO 59680
ctatataacccattcttaattatactcaacacacattatatttttctgatcatatcattctttcagtccatctatataaccaattcttgatttatacttaaaacacacattatacatctttctcatcatagtttgtatcaatttcctagagtaaactacctaaaggaaaaaaaaaatctattttgggaatcatatactaaaaatggaaggaagagatatgttaagttgggagcaaaagacattgctaagcgagcttatcaatggatttgatgcggccaaaaagcttcaggcacgacttagagaagctccgtcgccgtcgtcatcattttcatcaccggcgacggctgttgctgagactaacgagattctggtgaagcagatagtttcttcctacgagagatctcttcttctgctaaactggtcatcctcaccgagcgtacaacttattccgacgccggttactgtagtcccggtggcaaatcccggcagtgttccagaatctccggcatcgataaacggaagtccgagaagtgaagagtttgccgatggaggaggttctagcgagagtcatcatcgccaagattacattttcaattcaaagaaaagaaagatgttaccaaagtggtcagaaaaagtgagaataagcccagagagaggcttagaaggacctcaagatgatgtctttagctggagaaaatatggtcaaaaagacattttaggcgccaaattcccaaggagttattacagatgcacacatcgtagcacacaaaactgttgggcaacgaaacaagtccagagatcagacggggatgctacggttttcgaagtgacgtacagaggaacacacacttgttcgcaggcgatcacaagaacaccaccattagcctcgccggagaagcgacaagacaccagagtcaaaccagccattacccaaaagccaaaggatattctcgagagtcttaaatccaacttaaccgttcgaaccgatgggcttgatgatggtaaagacgttttctcgttccctgatacgccgccgttttacaattacggaactatcaacggcgagttcggccacgtggagagttctccgatcttcgacgttgttgactggttcaatccaacggtcgagattgacacaactttccccgcgtttttacacgagtcgatttattattaattaaaatttgtaacagagaaatagatagtaactagtaagtaatgatcagcgagagttaaaacataaaagtacttagagtaatctaacgatgcataataaggaatgttcaacaggacttgaacatgatttcaatactaagagagatttatct

SEQ ID NO: 82844 - protein, 324 aa, Arabidopsis thaliana
  peptide (1)..(324): Ceres Seq. ID no. 12667556
MEGRDMLSWEQKTLLSELINGFDAAKKLQARLREAPSPSSSFSSPATAVAETNEILVKQIVSSYERSLLLLNWSSSPSVQLIPTPVTVVPVANPGSVPESPASINGSPRSEEFADGGGSSESHHRQDYIFNSKKRKMLPKWSEKVRISPERGLEGPQDDVFSWRKYGQKDILGAKFPRSYYRCTHRSTQNCWATKQVQRSDGDATVFEVTYRGTHTCSQAITRTPPLASPEKRQDTRVKPAITQKPKDILESLKSNLTVRTDGLDDGKDVFSFPDTPPFYNYGTINGEFGHVESSPIFDVVDWFNPTVEIDTTFPAFLHESIYY

SEQ ID NO: 82845 - protein, 319 aa, Arabidopsis thaliana
  peptide (1)..(319): Ceres Seq. ID no. 12667557
MLSWEQKTLLSELINGFDAAKKLQARLREAPSPSSSFSSPATAVAETNEILVKQIVSSYERSLLLLNWSSSPSVQLIPTPVTVVPVANPGSVPESPASINGSPRSEEFADGGGSSESHHRQDYIFNSKKRKMLPKWSEKVRISPERGLEGPQDDVFSWRKYGQKDILGAKFPRSYYRCTHRSTQNCWATKQVQRSDGDATVFEVTYRGTHTCSQAITRTPPLASPEKRQDTRVKPAITQKPKDILESLKSNLTVRTDGLDDGKDVFSFPDTPPFYNYGTINGEFGHVESSPIFDVVDWFNPTVEIDTTFPAFLHESIYY

SEQ ID NO: 82846 - protein, 188 aa, Arabidopsis thaliana
  peptide (1)..(188): Ceres Seq. ID no. 12667558
MLPKWSEKVRISPERGLEGPQDDVFSWRKYGQKDILGAKFPRSYYRCTHRSTQNCWATKQVQRSDGDATVFEVTYRGTHTCSQAITRTPPLASPEKRQDTRVKPAITQKPKDILESLKSNLTVRTDGLDDGKDVFSFPDTPPFYNYGTINGEFGHVESSPIFDVVDWFNPTVEIDTTFPAFLHESIYY

SEQ ID NO: 82847 - DNA, 1266 bp, Arabidopsis thaliana
  misc_feature (1)..(1266): Ceres Seq. ID no. 12667559
  misc_feature (1)..(1266): Ortholog of  Ceres SEQ ID NO 13659033 as cited in SEQ ID NO 66372
  misc_feature (1)..(1266): Ortholog of  Ceres SEQ ID NO 13655724 as cited in SEQ ID NO 68973
atgaatcataagaatgtgcttctcatcaagctcatctccgctattctgatatcttttttcgcgttccgtctcttcattctccactccagcgagttttctccaatctttgcgtcggtcaccggaaaattcgaagctcggtttctgccgccggagattatcgtaccggaaaatgaagatctgattcctcaagatattgaagtagagaagtgtgatcttttcgccggaaaatggatcccagattcagtaggaccaatctacacaaacaaatcatgcggatcactcattgacggtcaccaaaattgtatcaccaatggccggcctgacttagattttctctactggaaatggaaacctcatgactgtttgttaccacgttttgaccctagaagatttcttcaacttatgaggcataaatcttgggcatttattggtgactccatatctcgtaaccacgtcgaatcactgctttgtatgctctctacgattgaagaaccggttgaagtataccatgacatggagtacaaatcaaaacgttggcatttccctttacataaccttactgtatccaacatatggtcgccatttcttgttcaagccgctattttcgaagattctaacggtgtctcgaccgcttctgttcagctacatcttgatagactcgatgagacatggaccagtctcatgcctagcttcgactatgcgatcatctcaaccggtaaatggtttcttaaatccgcaatttaccacgaaaatgcaaaactcgtcggttgccataactgtcaggaaaaacctcacatagaagagttaggattcgactatgcttataacgcatcgctgcataatgtcatggactttctagcagctgaagataacagtaaaggcacggttttctttcggacttcgactcccgatcatttccaaaacggggaatggcatagtggcgggacgtgtaagcaaacagagccggtgagcgatgaggagattgagattaaggatgtacataagatactaaaagatattgagattgatcagttcaagagggcggttagagagaagactaaccaggacggtgggaatctaaagcttttggatttcacccggatgttgctgacccgaccggacggtcatccgggtgagtaccgacagttcaggccgtttgataaagacaaaaatgcaaaggtacagaacgattgtttgcattggtgcttgcctggtccgtttgattacttgaatgatgttatattggagactatagtaaatggctga

SEQ ID NO: 82848 - protein, 421 aa, Arabidopsis thaliana
  peptide (1)..(421): Ceres Seq. ID no. 12667560
MNHKNVLLIKLISAILISFFAFRLFILHSSEFSPIFASVTGKFEARFLPPEIIVPENEDLIPQDIEVEKCDLFAGKWIPDSVGPIYTNKSCGSLIDGHQNCITNGRPDLDFLYWKWKPHDCLLPRFDPRRFLQLMRHKSWAFIGDSISRNHVESLLCMLSTIEEPVEVYHDMEYKSKRWHFPLHNLTVSNIWSPFLVQAAIFEDSNGVSTASVQLHLDRLDETWTSLMPSFDYAIISTGKWFLKSAIYHENAKLVGCHNCQEKPHIEELGFDYAYNASLHNVMDFLAAEDNSKGTVFFRTSTPDHFQNGEWHSGGTCKQTEPVSDEEIEIKDVHKILKDIEIDQFKRAVREKTNQDGGNLKLLDFTRMLLTRPDGHPGEYRQFRPFDKDKNAKVQNDCLHWCLPGPFDYLNDVILETIVNG

SEQ ID NO: 82849 - protein, 287 aa, Arabidopsis thaliana
  peptide (1)..(287): Ceres Seq. ID no. 12667561
MRHKSWAFIGDSISRNHVESLLCMLSTIEEPVEVYHDMEYKSKRWHFPLHNLTVSNIWSPFLVQAAIFEDSNGVSTASVQLHLDRLDETWTSLMPSFDYAIISTGKWFLKSAIYHENAKLVGCHNCQEKPHIEELGFDYAYNASLHNVMDFLAAEDNSKGTVFFRTSTPDHFQNGEWHSGGTCKQTEPVSDEEIEIKDVHKILKDIEIDQFKRAVREKTNQDGGNLKLLDFTRMLLTRPDGHPGEYRQFRPFDKDKNAKVQNDCLHWCLPGPFDYLNDVILETIVNG

SEQ ID NO: 82850 - protein, 264 aa, Arabidopsis thaliana
  peptide (1)..(264): Ceres Seq. ID no. 12667562
MLSTIEEPVEVYHDMEYKSKRWHFPLHNLTVSNIWSPFLVQAAIFEDSNGVSTASVQLHLDRLDETWTSLMPSFDYAIISTGKWFLKSAIYHENAKLVGCHNCQEKPHIEELGFDYAYNASLHNVMDFLAAEDNSKGTVFFRTSTPDHFQNGEWHSGGTCKQTEPVSDEEIEIKDVHKILKDIEIDQFKRAVREKTNQDGGNLKLLDFTRMLLTRPDGHPGEYRQFRPFDKDKNAKVQNDCLHWCLPGPFDYLNDVILETIVNG

SEQ ID NO: 82851 - DNA, 2270 bp, Arabidopsis thaliana
  misc_feature (1)..(2270): Ceres Seq. ID no. 12667567
  misc_feature (1)..(2270): Ortholog of  Ceres SEQ ID NO 14312594 as cited in SEQ ID NO 58686
  misc_feature (1)..(2270): Ortholog of  Ceres SEQ ID NO 13597706 as cited in SEQ ID NO 65326
agagagagagagagagagatcatgtcgcagcagaagaaatacatcttccaagttgaagaaggcaaagaaggtagcgatggaagaccatcagttggtccagtgtaccggagtatctttgccaaggacggatttcccgacccgatcgaaggaatggatagttgttgggatgttttccgcatgtctgttgagaagtatccaaacaatccaatgctgggacgccgcgagattgtagatggaaagccgggtaagtatgtctggcaaacataccaagaagtctacgacattgtcatgaaacttggaaattctctcagaagtgttggagttaaggacgaagcaaaatgtggtatctatggtgcaaattctcctgagtggattatcagcatggaggcttgtaatgcacatggactctattgtgtaccgttatatgatacactaggtgctgatgctgtggaattcatcatttcccattcagaggtttcaattgtctttgtggaagagaagaagatctctgagttgttcaagacatgcccaaactcgacagagtacatgaaaactgttgtgagcttcgggggtgtctcacgtgaacaaaaagaagaagctgaaacttttgggttggttatatatgcttgggatgaatttttgaagctgggtgaaggaaagcaatatgatctcccaatcaaaaagaaaagcgacatttgcacgattatgtatacgagtggaaccactggtgacccaaagggagtgatgatatctaacgaaagcattgtgactctaatcgctggagtgatccgtctactgaaaagtgctaacgaggctctgactgtgaaagatgtgtatctttcttatcttcctcttgcccacatctttgaccgagttatcgaggagtgtttcattcaacatggtgctgcaattggcttctggcgaggggatgtaaaattgttgatcgaagaccttgctgagcttaaaccaactattttttgtgctgtacctcgtgtcctggatagagtatactcaggtcttcagaagaagctttctgatggtggattcttaaaaaagttcatatttgattctgcattttcctataaatttggttatatgaagaagggacagtctcatgtggaggcctctccactttttgacaaacttgtgttcagcaaggttaaacaaggactcggaggcaatgtgaggattattctatctggagctgctcctcttgctagtcacgtagagtcatttctaagagtggtggcatgctgtcatgttctccaaggatacggtcttactgaaagctgtgctggaacttttgtctcgctgccagatgaactaggtatgctcggcacagttggtccaccagtgccaaacgttgatatacgccttgaatccgtccccgagatggaatatgatgctcttgcgagtactgcacgtggtgaaatctgcattcggggaaagacccttttctctggttactacaaacgtgaagatctcacgaaagaggttctcattgatggatggctgcacacaggtgatgttggtgagtggcaaccagatggaagcatgaagataattgacaggaagaagaatatctttaaactctcacaaggagagtatgttgcggtggagaacatagaaaacatatacggtgaagtacaagctgttgattccgtgtgggtgtacggtaacagctttgagtccttcctaatagctatcgccaacccaaaccagcatatccttgaacgctgggctgcagaaaacggtgtgagtggtgactatgacgctctctgtcaaaatgaaaaggcaaaggaattcattctcggagaacttgttaaaatggccaaagagaaaaagatgaaagggttcgagatcatcaaggcgattcatcttgacccagtgccatttgacatggaacgagatcttcttacgccgaccttcaaaaagaaaaggcctcagttgctgaaatactaccagagtgtgatcgacgaaatgtacaagaccataaatgcaaaatttgcttccagagggtagattcctcctcactctcggtccttgggtctctcattttgcatgacgaagactttgttaataggctcttctctcatctgtgtacaatatttgaatatttcatagcatcagatcagtccagagctgctacactgtttttcttttctatctttttttggaaatttacttttatgttctatacttgaatgctatctctttgccaaaaaaaaaaaaaaagaatgctatctaacttttctttttaataaaatttt

SEQ ID NO: 82852 - protein, 673 aa, Arabidopsis thaliana
  peptide (1)..(673): Ceres Seq. ID no. 12667568
REREREIMSQQKKYIFQVEEGKEGSDGRPSVGPVYRSIFAKDGFPDPIEGMDSCWDVFRMSVEKYPNNPMLGRREIVDGKPGKYVWQTYQEVYDIVMKLGNSLRSVGVKDEAKCGIYGANSPEWIISMEACNAHGLYCVPLYDTLGADAVEFIISHSEVSIVFVEEKKISELFKTCPNSTEYMKTVVSFGGVSREQKEEAETFGLVIYAWDEFLKLGEGKQYDLPIKKKSDICTIMYTSGTTGDPKGVMISNESIVTLIAGVIRLLKSANEALTVKDVYLSYLPLAHIFDRVIEECFIQHGAAIGFWRGDVKLLIEDLAELKPTIFCAVPRVLDRVYSGLQKKLSDGGFLKKFIFDSAFSYKFGYMKKGQSHVEASPLFDKLVFSKVKQGLGGNVRIILSGAAPLASHVESFLRVVACCHVLQGYGLTESCAGTFVSLPDELGMLGTVGPPVPNVDIRLESVPEMEYDALASTARGEICIRGKTLFSGYYKREDLTKEVLIDGWLHTGDVGEWQPDGSMKIIDRKKNIFKLSQGEYVAVENIENIYGEVQAVDSVWVYGNSFESFLIAIANPNQHILERWAAENGVSGDYDALCQNEKAKEFILGELVKMAKEKKMKGFEIIKAIHLDPVPFDMERDLLTPTFKKKRPQLLKYYQSVIDEMYKTINAKFASRG

SEQ ID NO: 82853 - protein, 666 aa, Arabidopsis thaliana
  peptide (1)..(666): Ceres Seq. ID no. 12667569
MSQQKKYIFQVEEGKEGSDGRPSVGPVYRSIFAKDGFPDPIEGMDSCWDVFRMSVEKYPNNPMLGRREIVDGKPGKYVWQTYQEVYDIVMKLGNSLRSVGVKDEAKCGIYGANSPEWIISMEACNAHGLYCVPLYDTLGADAVEFIISHSEVSIVFVEEKKISELFKTCPNSTEYMKTVVSFGGVSREQKEEAETFGLVIYAWDEFLKLGEGKQYDLPIKKKSDICTIMYTSGTTGDPKGVMISNESIVTLIAGVIRLLKSANEALTVKDVYLSYLPLAHIFDRVIEECFIQHGAAIGFWRGDVKLLIEDLAELKPTIFCAVPRVLDRVYSGLQKKLSDGGFLKKFIFDSAFSYKFGYMKKGQSHVEASPLFDKLVFSKVKQGLGGNVRIILSGAAPLASHVESFLRVVACCHVLQGYGLTESCAGTFVSLPDELGMLGTVGPPVPNVDIRLESVPEMEYDALASTARGEICIRGKTLFSGYYKREDLTKEVLIDGWLHTGDVGEWQPDGSMKIIDRKKNIFKLSQGEYVAVENIENIYGEVQAVDSVWVYGNSFESFLIAIANPNQHILERWAAENGVSGDYDALCQNEKAKEFILGELVKMAKEKKMKGFEIIKAIHLDPVPFDMERDLLTPTFKKKRPQLLKYYQSVIDEMYKTINAKFASRG

SEQ ID NO: 82854 - protein, 623 aa, Arabidopsis thaliana
  peptide (1)..(623): Ceres Seq. ID no. 12667570
MDSCWDVFRMSVEKYPNNPMLGRREIVDGKPGKYVWQTYQEVYDIVMKLGNSLRSVGVKDEAKCGIYGANSPEWIISMEACNAHGLYCVPLYDTLGADAVEFIISHSEVSIVFVEEKKISELFKTCPNSTEYMKTVVSFGGVSREQKEEAETFGLVIYAWDEFLKLGEGKQYDLPIKKKSDICTIMYTSGTTGDPKGVMISNESIVTLIAGVIRLLKSANEALTVKDVYLSYLPLAHIFDRVIEECFIQHGAAIGFWRGDVKLLIEDLAELKPTIFCAVPRVLDRVYSGLQKKLSDGGFLKKFIFDSAFSYKFGYMKKGQSHVEASPLFDKLVFSKVKQGLGGNVRIILSGAAPLASHVESFLRVVACCHVLQGYGLTESCAGTFVSLPDELGMLGTVGPPVPNVDIRLESVPEMEYDALASTARGEICIRGKTLFSGYYKREDLTKEVLIDGWLHTGDVGEWQPDGSMKIIDRKKNIFKLSQGEYVAVENIENIYGEVQAVDSVWVYGNSFESFLIAIANPNQHILERWAAENGVSGDYDALCQNEKAKEFILGELVKMAKEKKMKGFEIIKAIHLDPVPFDMERDLLTPTFKKKRPQLLKYYQSVIDEMYKTINAKFASRG

SEQ ID NO: 82855 - DNA, 909 bp, Arabidopsis thaliana
  misc_feature (1)..(909): Ceres Seq. ID no. 12667589
  misc_feature (1)..(909): Ortholog of  Ceres SEQ ID NO 14305286 as cited in SEQ ID NO 0
atgcaatctttatctctgcaatcgcttccatggaaaccaaattcagtgactttacctgaaattaatcttttgaatcccaagcaattgactgcctcgagttctcagtatcgtagaactcgaaactggagaattagaagttcgtcggaagataatgtagcaatttcgagtgacggcggagatttgaagaattctctgtccggtattgtgggaaatcaagtggaggagctattgagcagagaagagaacaaaggtttgcttgatggtctggaaaaagcttcgttgagagtggagattgcgaagagagagctcgaagatatagagagacaagaaattgaggcgaaattgctacaggattatattaatcagctcgaatcaagagccgcagaggagattgacgcagcaagatcaatggttgaggaagcagaacgctccttgtcattagcagataactcgacaattggaagttcggagaaaggttattcgattgataaagacaaggagaggttagaatctgcaaaagcggcagtgatcgcagctgcggttgggaccattgcggaactcccatttgctctttctcaagtcgcaagcatggagcagcttgttctgcccctgggaatagcgtttgcaagctgtgcattgtttggagtcacattcaggtatgcagtcagaagagacttggatgataatcatctcaaatccggagccgttgcagcttttgggtttgttaaaggacttggtatgttgagcagaggaccgccattggagctgagctgggaaagcttgttttcacatgggatagacggcgccgttttggtgtctcagagcgtcttgatatttgcgtttgcgtccataggtttggacttctgtttcaagatgaagctcttaagaccatttcctagctctgactag

SEQ ID NO: 82856 - protein, 302 aa, Arabidopsis thaliana
  peptide (1)..(302): Ceres Seq. ID no. 12667590
MQSLSLQSLPWKPNSVTLPEINLLNPKQLTASSSQYRRTRNWRIRSSSEDNVAISSDGGDLKNSLSGIVGNQVEELLSREENKGLLDGLEKASLRVEIAKRELEDIERQEIEAKLLQDYINQLESRAAEEIDAARSMVEEAERSLSLADNSTIGSSEKGYSIDKDKERLESAKAAVIAAAVGTIAELPFALSQVASMEQLVLPLGIAFASCALFGVTFRYAVRRDLDDNHLKSGAVAAFGFVKGLGMLSRGPPLELSWESLFSHGIDGAVLVSQSVLIFAFASIGLDFCFKMKLLRPFPSSD

SEQ ID NO: 82857 - protein, 166 aa, Arabidopsis thaliana; identical to SEQ ID NO: 47494
  peptide (1)..(166): Ceres Seq. ID no. 12667591

SEQ ID NO: 82858 - DNA, 1619 bp, Arabidopsis thaliana
  misc_feature (1)..(1619): Ceres Seq. ID no. 12667636
  misc_feature (1)..(1619): Ortholog of  Ceres SEQ ID NO 13596509 as cited in SEQ ID NO 62004
  misc_feature (1)..(1619): Ortholog of  Ceres SEQ ID NO 13659971 as cited in SEQ ID NO 67565
  misc_feature (1)..(1619): Ortholog of  Ceres SEQ ID NO 13500385 as cited in SEQ ID NO 67583
ctgcctttcctctttctctctctctatctatcaaacactagacttgaagaaatgcagtgaaattgaaattgagtagaagcagaagagaatatggtggtaaggaaggtgggcaagtatgaattaggtagaacaatcggcgaaggtactttcgctaaagtcaagttcgctcagaatacagagaccggtgagagcgtcgccatgaaaatcgtggatcgtagcacaatcatcaagcgcaagatggtggatcagattaagagagagatctcgattatgaagcttgttcgtcatccttgtgttgttcgtctttatgaggttctagcaagccgtacaaagatttatatcatcctggagtacattactggtggtgaactgtttgataagattgttcgtaatggacgacttagtgagtcagaagctaggaaatactttcaccagcttattgatggagttgattactgtcatagtaaaggtgtttaccacagagatctaaagccggaaaatcttctgttggattctcaaggaaatctcaagatatctgattttggcctcagtgcattacctgaacaaggagttaccatcctaaagacaacatgtggaactcccaattacgttgctcctgaggttctcagtcacaagggttacaatggtgccgttgcagatatttggtcctgtggggtcatcctttatgttcttatggcaggatatcttccatttgatgaaatggatctaccaactttatatagtaagatcgacaaagctgagttctcttgcccctcatattttgccctgggggcaaagtccttgattaatagaattttggatccaaatccagaaactcggattacaattgcagaaatcaggaaagatgagtggtttctaaaggattacactcctgtacaacttatcgattacgaacatgtaaacctggatgatgtatatgctgcttttgatgatccggaggaacaaacatatgcacaggatggaacaagagacacaggtccactaactctaaatgcgtttgacctaattattctatctcagggcctgaacctcgcaactctttttgaccgtggaaaggactccatgaagcaccagacaaggttcatctcacacaagccagcaaacgtggttctctcaagcatggaagttgtgtcacagtctatgggctttaagacacacattcgtaattacaagatgagagtggaaggattatctgcaaataagacatctcatttctccgtcatactagaagtcttcaaagttgcaccatcaattctcatggtagacattcaaaatgcagcaggagacgcagaagaataccttaagttctacaagactttttgtagtaagcttgatgacatcatttggaagccgccagatgcatctatgagaaatcgagtcaccaaggccaagagtaaaagacgttgaatccacgtgcgtggtattcaagcagagctttcacagaagacagttagaaacaatatttaactctctgtgtttcttaagtgctttagtcgagtgaatatgtacaagcttgttgatttggttttaatttatgaatacatagaagattgtactaaacttatacgatatcaagactaaattgagtgaaaattgct

SEQ ID NO: 82859 - protein, 445 aa, Arabidopsis thaliana
  peptide (1)..(445): Ceres Seq. ID no. 12667637
MVVRKVGKYELGRTIGEGTFAKVKFAQNTETGESVAMKIVDRSTIIKRKMVDQIKREISIMKLVRHPCVVRLYEVLASRTKIYIILEYITGGELFDKIVRNGRLSESEARKYFHQLIDGVDYCHSKGVYHRDLKPENLLLDSQGNLKISDFGLSALPEQGVTILKTTCGTPNYVAPEVLSHKGYNGAVADIWSCGVILYVLMAGYLPFDEMDLPTLYSKIDKAEFSCPSYFALGAKSLINRILDPNPETRITIAEIRKDEWFLKDYTPVQLIDYEHVNLDDVYAAFDDPEEQTYAQDGTRDTGPLTLNAFDLIILSQGLNLATLFDRGKDSMKHQTRFISHKPANVVLSSMEVVSQSMGFKTHIRNYKMRVEGLSANKTSHFSVILEVFKVAPSILMVDIQNAAGDAEEYLKFYKTFCSKLDDIIWKPPDASMRNRVTKAKSKRR

SEQ ID NO: 82860 - protein, 409 aa, Arabidopsis thaliana
  peptide (1)..(409): Ceres Seq. ID no. 12667638
MKIVDRSTIIKRKMVDQIKREISIMKLVRHPCVVRLYEVLASRTKIYIILEYITGGELFDKIVRNGRLSESEARKYFHQLIDGVDYCHSKGVYHRDLKPENLLLDSQGNLKISDFGLSALPEQGVTILKTTCGTPNYVAPEVLSHKGYNGAVADIWSCGVILYVLMAGYLPFDEMDLPTLYSKIDKAEFSCPSYFALGAKSLINRILDPNPETRITIAEIRKDEWFLKDYTPVQLIDYEHVNLDDVYAAFDDPEEQTYAQDGTRDTGPLTLNAFDLIILSQGLNLATLFDRGKDSMKHQTRFISHKPANVVLSSMEVVSQSMGFKTHIRNYKMRVEGLSANKTSHFSVILEVFKVAPSILMVDIQNAAGDAEEYLKFYKTFCSKLDDIIWKPPDASMRNRVTKAKSKRR

SEQ ID NO: 82861 - protein, 396 aa, Arabidopsis thaliana
  peptide (1)..(396): Ceres Seq. ID no. 12667639
MVDQIKREISIMKLVRHPCVVRLYEVLASRTKIYIILEYITGGELFDKIVRNGRLSESEARKYFHQLIDGVDYCHSKGVYHRDLKPENLLLDSQGNLKISDFGLSALPEQGVTILKTTCGTPNYVAPEVLSHKGYNGAVADIWSCGVILYVLMAGYLPFDEMDLPTLYSKIDKAEFSCPSYFALGAKSLINRILDPNPETRITIAEIRKDEWFLKDYTPVQLIDYEHVNLDDVYAAFDDPEEQTYAQDGTRDTGPLTLNAFDLIILSQGLNLATLFDRGKDSMKHQTRFISHKPANVVLSSMEVVSQSMGFKTHIRNYKMRVEGLSANKTSHFSVILEVFKVAPSILMVDIQNAAGDAEEYLKFYKTFCSKLDDIIWKPPDASMRNRVTKAKSKRR

SEQ ID NO: 82862 - DNA, 1604 bp, Arabidopsis thaliana
  misc_feature (1)..(1604): Ceres Seq. ID no. 12667673
  misc_feature (1)..(1604): Ortholog of  Ceres SEQ ID NO 15176588 as cited in SEQ ID NO 60461
ctctgcttaaaaactagggttaggctacgattctgtttacaccaaaaaagcttttcgtcatcgccgtttggctttctgaaacaaatcacaccgtttaagattttctctgattctgagattatggagatggagcgtgtgcatgaattccctcatactcacatggatcgtcgtcccagaaagagagcgcgtctcggttgggatgtgttgcctcaggcaaccaaggctcaggtaggaatgttttgtgggcaagagattggaaatatatcaagctttgcatcttccggagctccttcagacaatagtagctctctttgtgttaagggtgtggctcgaaatggttctcccccatggcgagaagatgataaggatggacattacatatttgaactgggagatgacttaactccacgctataaaatttatagcaaaatgggggaaggtacttttggtcaagtgctagaatgttgggatagggagaggaaggaaatggtggcagtaaaaattgtccgtggtgtgaagaaataccgtgaggctgctatgattgaaattgaaatgctgcaacagcttggtaaacatgacaaaggtggcaatcgttgtgtacaaattcggaactggtttgactatcgtaaccatatctgtattgtatttgagaagcttggatcgagtttatacgattttcttcggaaaaacaattatcgctcctttcccattgatcttgtccgtgagattggctggcaactcttggaatgtgtagcatttatgcatgacttgcgcatgattcatacggaccttaaaccagaaaatattctgttagtctcctcagactatgtgaagattcccgagtacaaggggtcccgattacaaagggatgtatgctataaaagagtgcctaaatcaagtgcaataaaggtgattgattttggtagcacaacttatgagcgccaggaccaaacctacattgtatcaaccagacattatagggcaccagaagtcattttaggtcttggctggagttatccgtgtgatgtttggagcgttggatgtatcatagtggagttgtgcacgggtgaagcattgttccaaacacatgaaaacctggagcatctagcgatgatggagcgtgttcttgggccgtttcctcaacaaatgctgaagaaagtggaccggcactcagagaaatatgtgagaagaggtcgtttggattggccagatggggcaacctcaagagatagcctgaaggcagtattgaagcttcctcggcttcagaatttaataatgcaacatgtggaccactcagccggggagttaataaatatggtgcaaggacttctgcgatttgatccgtcagagagaataaccgctcgtgaagctctgaggcatccgtttttcgcaaggagaagatagcgggacttgaatttgacgagtgtaaatagggatgaaatatgtatgatttgtagcaagtctttaccccacaaccccacgaattctgatataaattaacaaatatgctaagatcactctttttttaaccgtgataggcgattgtttgtctatctttgtaaactggatcgtttcaattcaaaagagttttagttttggattct

SEQ ID NO: 82863 - protein, 467 aa, Arabidopsis thaliana
  peptide (1)..(467): Ceres Seq. ID no. 12667674
LCLKTRVRLRFCLHQKSFSSSPFGFLKQITPFKIFSDSEIMEMERVHEFPHTHMDRRPRKRARLGWDVLPQATKAQVGMFCGQEIGNISSFASSGAPSDNSSSLCVKGVARNGSPPWREDDKDGHYIFELGDDLTPRYKIYSKMGEGTFGQVLECWDRERKEMVAVKIVRGVKKYREAAMIEIEMLQQLGKHDKGGNRCVQIRNWFDYRNHICIVFEKLGSSLYDFLRKNNYRSFPIDLVREIGWQLLECVAFMHDLRMIHTDLKPENILLVSSDYVKIPEYKGSRLQRDVCYKRVPKSSAIKVIDFGSTTYERQDQTYIVSTRHYRAPEVILGLGWSYPCDVWSVGCIIVELCTGEALFQTHENLEHLAMMERVLGPFPQQMLKKVDRHSEKYVRRGRLDWPDGATSRDSLKAVLKLPRLQNLIMQHVDHSAGELINMVQGLLRFDPSERITAREALRHPFFARRR

SEQ ID NO: 82864 - protein, 427 aa, Arabidopsis thaliana
  peptide (1)..(427): Ceres Seq. ID no. 12667675
MEMERVHEFPHTHMDRRPRKRARLGWDVLPQATKAQVGMFCGQEIGNISSFASSGAPSDNSSSLCVKGVARNGSPPWREDDKDGHYIFELGDDLTPRYKIYSKMGEGTFGQVLECWDRERKEMVAVKIVRGVKKYREAAMIEIEMLQQLGKHDKGGNRCVQIRNWFDYRNHICIVFEKLGSSLYDFLRKNNYRSFPIDLVREIGWQLLECVAFMHDLRMIHTDLKPENILLVSSDYVKIPEYKGSRLQRDVCYKRVPKSSAIKVIDFGSTTYERQDQTYIVSTRHYRAPEVILGLGWSYPCDVWSVGCIIVELCTGEALFQTHENLEHLAMMERVLGPFPQQMLKKVDRHSEKYVRRGRLDWPDGATSRDSLKAVLKLPRLQNLIMQHVDHSAGELINMVQGLLRFDPSERITAREALRHPFFARRR

SEQ ID NO: 82865 - protein, 425 aa, Arabidopsis thaliana
  peptide (1)..(425): Ceres Seq. ID no. 12667676
MERVHEFPHTHMDRRPRKRARLGWDVLPQATKAQVGMFCGQEIGNISSFASSGAPSDNSSSLCVKGVARNGSPPWREDDKDGHYIFELGDDLTPRYKIYSKMGEGTFGQVLECWDRERKEMVAVKIVRGVKKYREAAMIEIEMLQQLGKHDKGGNRCVQIRNWFDYRNHICIVFEKLGSSLYDFLRKNNYRSFPIDLVREIGWQLLECVAFMHDLRMIHTDLKPENILLVSSDYVKIPEYKGSRLQRDVCYKRVPKSSAIKVIDFGSTTYERQDQTYIVSTRHYRAPEVILGLGWSYPCDVWSVGCIIVELCTGEALFQTHENLEHLAMMERVLGPFPQQMLKKVDRHSEKYVRRGRLDWPDGATSRDSLKAVLKLPRLQNLIMQHVDHSAGELINMVQGLLRFDPSERITAREALRHPFFARRR

SEQ ID NO: 82866 - DNA, 522 bp, Arabidopsis thaliana
  misc_feature (1)..(522): Ceres Seq. ID no. 12667700
  misc_feature (1)..(522): Ortholog of  Ceres SEQ ID NO 14314807 as cited in SEQ ID NO 52563
atggcggatacagctagaggaacccatcacgatatcatcggcagagaccagtacccgatgatgggccgagaccgagaccagtaccagatgtccggacgaggatctgactactccaagtctaggcagattgctaaagctgcaactgctgtcacagctggtggttccctccttgttctctccagccttacccttgttggaactgtcatagctttgactgttgcaacacctctgctcgttatcttcagcccaatccttgtcccggctctcatcacagttgcactcctcatcaccggttttctttcctctggagggtttggcattgccgctataaccgttttctcttggatttacaagtacgcaacgggagagcacccacagggatcagacaagttggacagtgcaaggatgaagttgggaagcaaagctcaggatctgaaagacagagctcagtactacggacagcaacatactggtggggaacatgaccgtgaccgtactcgtggtggccagcacactacttaa

SEQ ID NO: 82867 - protein, 173 aa, Arabidopsis thaliana
  peptide (1)..(173): Ceres Seq. ID no. 12667701
MADTARGTHHDIIGRDQYPMMGRDRDQYQMSGRGSDYSKSRQIAKAATAVTAGGSLLVLSSLTLVGTVIALTVATPLLVIFSPILVPALITVALLITGFLSSGGFGIAAITVFSWIYKYATGEHPQGSDKLDSARMKLGSKAQDLKDRAQYYGQQHTGGEHDRDRTRGGQHTT

SEQ ID NO: 82868 - protein, 154 aa, Arabidopsis thaliana
  peptide (1)..(154): Ceres Seq. ID no. 12667702
MMGRDRDQYQMSGRGSDYSKSRQIAKAATAVTAGGSLLVLSSLTLVGTVIALTVATPLLVIFSPILVPALITVALLITGFLSSGGFGIAAITVFSWIYKYATGEHPQGSDKLDSARMKLGSKAQDLKDRAQYYGQQHTGGEHDRDRTRGGQHTT

SEQ ID NO: 82869 - protein, 153 aa, Arabidopsis thaliana
  peptide (1)..(153): Ceres Seq. ID no. 12667703
MGRDRDQYQMSGRGSDYSKSRQIAKAATAVTAGGSLLVLSSLTLVGTVIALTVATPLLVIFSPILVPALITVALLITGFLSSGGFGIAAITVFSWIYKYATGEHPQGSDKLDSARMKLGSKAQDLKDRAQYYGQQHTGGEHDRDRTRGGQHTT

SEQ ID NO: 82870 - DNA, 1062 bp, Arabidopsis thaliana
  misc_feature (1)..(1062): Ceres Seq. ID no. 12667728
  misc_feature (1)..(1062): Ortholog of  Ceres SEQ ID NO 12636774 as cited in SEQ ID NO 372
  misc_feature (1)..(1062): Ortholog of  Ceres SEQ ID NO 14311866 as cited in SEQ ID NO 51178
  misc_feature (1)..(1062): Ortholog of  Ceres SEQ ID NO 13582350 as cited in SEQ ID NO 56734
  misc_feature (1)..(1062): Ortholog of  Ceres SEQ ID NO 12582113 as cited in SEQ ID NO 58349
  misc_feature (1)..(1062): Ortholog of  Ceres SEQ ID NO 15175861 as cited in SEQ ID NO 59381
  misc_feature (1)..(1062): Ortholog of  Ceres SEQ ID NO 12615466 as cited in SEQ ID NO 62761
  misc_feature (1)..(1062): Ortholog of  Ceres SEQ ID NO 13597295 as cited in SEQ ID NO 63743
  misc_feature (1)..(1062): Ortholog of  Ceres SEQ ID NO 12617090 as cited in SEQ ID NO 64005
  misc_feature (1)..(1062): Ortholog of  Ceres SEQ ID NO 13597439 as cited in SEQ ID NO 64081
  misc_feature (1)..(1062): Ortholog of  Ceres SEQ ID NO 13597233 as cited in SEQ ID NO 64370
  misc_feature (1)..(1062): Ortholog of  Ceres SEQ ID NO 13598327 as cited in SEQ ID NO 68040
  misc_feature (1)..(1062): Ortholog of  Ceres SEQ ID NO 13599438 as cited in SEQ ID NO 0
atggaaggtaaaggagtaacctttagttctgttatagttccttctgttcaagagatggtgaaggagaaggtgatcacaacggtacttcctccgaggtatgtgcggtctgatcaagaaaaaggcgaggcagccattgattctggtgaaaaccaaatcccaatcatagacatgagtcttttgtcttcttcaacctccatggattctgagattgacaaactcgactttgcttgcaaagaatggggatttttccagcttgtaaaccatggaatggacttggacaaattcaagtccgatattcaagatttcttcaaccttcccatggaagagaagaagaagctgtggcaacaacccggtgatatcgaagggtttggacaagcttttgtgttttcagaagagcagaaactcgattgggctgacgttttcttccttacaatgcaacctgttccattacgcaaacctcacttgtttcccaagttacctcttcccttcagagatacactggatacgtattcggctgaactgaaaagcatagctaaggtcttattcgcgaaactagcgagtgcactcaaaatcaaacctgaggaaatggaaaagttgtttgatgatgagttaggtcagagaattaggatgaattactacccgccttgtccggagcccgataaggctattggtctaactccacattccgatgctacaggactcaccatactgttgcaggttaatgaagttgaaggtctccaaatcaagaaagatggcaagtgggtttctgtcaaacctctcccaaatgctttagttgtcaatgttggagacatcttagagatcataacgaatgggacataccgaagtatagagcatcgtggagttgtaaactcagagaaagagaggctttctgtggcgtcattccataatacggggttcggtaaagaaattggtccgatgagaagtctcgtggaaaggcacaagggtgcacttttcaaaaccctgaccactgaagagtatttccatggcttgttttcccgtgagctcgatggaaaagcttaccttgatgttatgagaatctaa

SEQ ID NO: 82871 - protein, 353 aa, Arabidopsis thaliana
  peptide (1)..(353): Ceres Seq. ID no. 12667729
MEGKGVTFSSVIVPSVQEMVKEKVITTVLPPRYVRSDQEKGEAAIDSGENQIPIIDMSLLSSSTSMDSEIDKLDFACKEWGFFQLVNHGMDLDKFKSDIQDFFNLPMEEKKKLWQQPGDIEGFGQAFVFSEEQKLDWADVFFLTMQPVPLRKPHLFPKLPLPFRDTLDTYSAELKSIAKVLFAKLASALKIKPEEMEKLFDDELGQRIRMNYYPPCPEPDKAIGLTPHSDATGLTILLQVNEVEGLQIKKDGKWVSVKPLPNALVVNVGDILEIITNGTYRSIEHRGVVNSEKERLSVASFHNTGFGKEIGPMRSLVERHKGALFKTLTTEEYFHGLFSRELDGKAYLDVMRI

SEQ ID NO: 82872 - protein, 335 aa, Arabidopsis thaliana
  peptide (1)..(335): Ceres Seq. ID no. 12667730
MVKEKVITTVLPPRYVRSDQEKGEAAIDSGENQIPIIDMSLLSSSTSMDSEIDKLDFACKEWGFFQLVNHGMDLDKFKSDIQDFFNLPMEEKKKLWQQPGDIEGFGQAFVFSEEQKLDWADVFFLTMQPVPLRKPHLFPKLPLPFRDTLDTYSAELKSIAKVLFAKLASALKIKPEEMEKLFDDELGQRIRMNYYPPCPEPDKAIGLTPHSDATGLTILLQVNEVEGLQIKKDGKWVSVKPLPNALVVNVGDILEIITNGTYRSIEHRGVVNSEKERLSVASFHNTGFGKEIGPMRSLVERHKGALFKTLTTEEYFHGLFSRELDGKAYLDVMRI

SEQ ID NO: 82873 - protein, 297 aa, Arabidopsis thaliana
  peptide (1)..(297): Ceres Seq. ID no. 12667731
MSLLSSSTSMDSEIDKLDFACKEWGFFQLVNHGMDLDKFKSDIQDFFNLPMEEKKKLWQQPGDIEGFGQAFVFSEEQKLDWADVFFLTMQPVPLRKPHLFPKLPLPFRDTLDTYSAELKSIAKVLFAKLASALKIKPEEMEKLFDDELGQRIRMNYYPPCPEPDKAIGLTPHSDATGLTILLQVNEVEGLQIKKDGKWVSVKPLPNALVVNVGDILEIITNGTYRSIEHRGVVNSEKERLSVASFHNTGFGKEIGPMRSLVERHKGALFKTLTTEEYFHGLFSRELDGKAYLDVMRI

SEQ ID NO: 82874 - DNA, 944 bp, Arabidopsis thaliana
  misc_feature (1)..(944): Ceres Seq. ID no. 12667742
  misc_feature (1)..(944): Ortholog of  Ceres SEQ ID NO 13661642 as cited in SEQ ID NO 61598
cctgaattagaaaagaaagatagatagagaaataaatattttatcataccatacaaaaaaagacagagatcttctacttactctactctcataaaccttatccagtttcttgaaacagagtactcttctgatcaatgaactcattttctgccttttctgaaatgtttggctccgattacgagtctccggtttcctcaggcggtgattacagtccgaagcttgccacgagctgccccaagaaaccagcgggaaggaagaagtttcgtgagactcgtcacccaatttacagaggagttcgtcaaagaaactccggtaagtgggtgtgtgagttgagagagccaaacaagaaaacgaggatttggctcgggactttccaaaccgctgagatggcagctcgtgctcacgacgtcgccgccatagctctccgtggcagatctgcctgtctcaatttcgctgactcggcttggcggctacgaatcccggaatcaacctgtgccaaggaaatccaaaaggcggcggctgaagccgcgttgaattttcaagatgagatgtgtcatatgacgacggatgctcatggtcttgacatggaggagaccttggtggaggctatttatacgccggaacagagccaagatgcgttttatatggatgaagaggcgatgttggggatgtctagtttgttggataacatggccgaagggatgcttttaccgtcgccgtcggttcaatggaactataattttgatgtcgagggagatgatgacgtgtccttatggagctattaaaattcgatttttatttccatttttggtattatagctttttatacatttgatccttttttagaatggatcttcttctttttttggttgtgagaaacgaatgtaaatggtaaaagttgttgtcaaatgcaaatgtttttgagtgcagaatatataatcttt

SEQ ID NO: 82875 - protein, 216 aa, Arabidopsis thaliana
  peptide (1)..(216): Ceres Seq. ID no. 12667743
MNSFSAFSEMFGSDYESPVSSGGDYSPKLATSCPKKPAGRKKFRETRHPIYRGVRQRNSGKWVCELREPNKKTRIWLGTFQTAEMAARAHDVAAIALRGRSACLNFADSAWRLRIPESTCAKEIQKAAAEAALNFQDEMCHMTTDAHGLDMEETLVEAIYTPEQSQDAFYMDEEAMLGMSSLLDNMAEGMLLPSPSVQWNYNFDVEGDDDVSLWSY

SEQ ID NO: 82876 - protein, 207 aa, Arabidopsis thaliana
  peptide (1)..(207): Ceres Seq. ID no. 12667744
MFGSDYESPVSSGGDYSPKLATSCPKKPAGRKKFRETRHPIYRGVRQRNSGKWVCELREPNKKTRIWLGTFQTAEMAARAHDVAAIALRGRSACLNFADSAWRLRIPESTCAKEIQKAAAEAALNFQDEMCHMTTDAHGLDMEETLVEAIYTPEQSQDAFYMDEEAMLGMSSLLDNMAEGMLLPSPSVQWNYNFDVEGDDDVSLWSY

SEQ ID NO: 82877 - protein, 132 aa, Arabidopsis thaliana
  peptide (1)..(132): Ceres Seq. ID no. 12667745
MAARAHDVAAIALRGRSACLNFADSAWRLRIPESTCAKEIQKAAAEAALNFQDEMCHMTTDAHGLDMEETLVEAIYTPEQSQDAFYMDEEAMLGMSSLLDNMAEGMLLPSPSVQWNYNFDVEGDDDVSLWSY

SEQ ID NO: 82878 - DNA, 929 bp, Arabidopsis thaliana
  misc_feature (1)..(929): Ceres Seq. ID no. 12667746
  misc_feature (1)..(929): Ortholog of  Ceres SEQ ID NO 13661642 as cited in SEQ ID NO 61598
cttgaaaaagaatctacctgaaaagaaaaaaaagagagagagatataaatagctttaccaagacagatatactatcttttattaatccaaaaagactgagaactctagtaactacgtactacttaaaccttatccagtttcttgaaacagagtactctgatcaatgaactcattttcagctttttctgaaatgtttggctccgattacgagcctcaaggcggagattattgtccgacgttggccacgagttgtccgaagaaaccggcgggccgtaagaagtttcgtgagactcgtcacccaatttacagaggagttcgtcaaagaaactccggtaagtgggtttctgaagtgagagagccaaacaagaaaaccaggatttggctcgggactttccaaaccgctgagatggcagctcgtgctcacgacgtcgctgcattagccctccgtggccgatcagcatgtctcaacttcgctgactcggcttggcggctacgaatcccggagtcaacatgcgccaaggatatccaaaaagcggctgctgaagcggcgttggcttttcaagatgagacgtgtgatacgacgaccacgaatcatggcctggacatggaggagacgatggtggaagctatttatacaccggaacagagcgaaggtgcgttttatatggatgaggagacaatgtttgggatgccgactttgttggataatatggctgaaggcatgcttttaccgccgccgtctgttcaatggaatcataattatgacggcgaaggagatggtgacgtgtcgctttggagttactaatattcgatagtcgtttccatttttgtactatagtttgaaaatattctagttcctttttttagaatggttccttcattttattttattttattgttgtagaaacgagtggaaaataattcaatac

SEQ ID NO: 82879 - protein, 213 aa, Arabidopsis thaliana
  peptide (1)..(213): Ceres Seq. ID no. 12667747
MNSFSAFSEMFGSDYEPQGGDYCPTLATSCPKKPAGRKKFRETRHPIYRGVRQRNSGKWVSEVREPNKKTRIWLGTFQTAEMAARAHDVAALALRGRSACLNFADSAWRLRIPESTCAKDIQKAAAEAALAFQDETCDTTTTNHGLDMEETMVEAIYTPEQSEGAFYMDEETMFGMPTLLDNMAEGMLLPPPSVQWNHNYDGEGDGDVSLWSY

SEQ ID NO: 82880 - protein, 204 aa, Arabidopsis thaliana
  peptide (1)..(204): Ceres Seq. ID no. 12667748
MFGSDYEPQGGDYCPTLATSCPKKPAGRKKFRETRHPIYRGVRQRNSGKWVSEVREPNKKTRIWLGTFQTAEMAARAHDVAALALRGRSACLNFADSAWRLRIPESTCAKDIQKAAAEAALAFQDETCDTTTTNHGLDMEETMVEAIYTPEQSEGAFYMDEETMFGMPTLLDNMAEGMLLPPPSVQWNHNYDGEGDGDVSLWSY

SEQ ID NO: 82881 - protein, 132 aa, Arabidopsis thaliana
  peptide (1)..(132): Ceres Seq. ID no. 12667749
MAARAHDVAALALRGRSACLNFADSAWRLRIPESTCAKDIQKAAAEAALAFQDETCDTTTTNHGLDMEETMVEAIYTPEQSEGAFYMDEETMFGMPTLLDNMAEGMLLPPPSVQWNHNYDGEGDGDVSLWSY

SEQ ID NO: 82882 - DNA, 393 bp, Arabidopsis thaliana
  misc_feature (1)..(393): Ceres Seq. ID no. 12667762
  misc_feature (1)..(393): Ortholog of  Ceres SEQ ID NO 13495070 as cited in SEQ ID NO 53216
  misc_feature (1)..(393): Ortholog of  Ceres SEQ ID NO 13661333 as cited in SEQ ID NO 61620
  misc_feature (1)..(393): Ortholog of  Ceres SEQ ID NO 13596812 as cited in SEQ ID NO 62283
  misc_feature (1)..(393): Ortholog of  Ceres SEQ ID NO 13623021 as cited in SEQ ID NO 0
  misc_feature (1)..(393): Ortholog of  Ceres SEQ ID NO 14302179 as cited in SEQ ID NO 0
atggcagtggaggacgagtgcaagctgaagtttttggagctcaagtcgaaaagaaactatcgattcataatattcaggatagacgggcaacaagtggtggtcgaaaagttaggaaaccccgatgagacttacgatgatttcaccgcctccctccctgcgaacgagtgccgctatgcagtcttcgactttgacttcatcaccgatgaaaattgccagaagagcaaaatcttcttcattgcatggtcaccagattcatcaagggtgaggatgaagatggtgtatgcaagctctaaggatagatttaagagagaattggacggcattcaggtggagttacaagccactgatcctagcgagatgagcttcgacattatcaaaagccgagctctctag

SEQ ID NO: 82883 - protein, 130 aa, Arabidopsis thaliana
  peptide (1)..(130): Ceres Seq. ID no. 12667763
MAVEDECKLKFLELKSKRNYRFIIFRIDGQQVVVEKLGNPDETYDDFTASLPANECRYAVFDFDFITDENCQKSKIFFIAWSPDSSRVRMKMVYASSKDRFKRELDGIQVELQATDPSEMSFDIIKSRAL

SEQ ID NO: 82884 - DNA, 633 bp, Arabidopsis thaliana
  misc_feature (1)..(633): Ceres Seq. ID no. 12667780
  misc_feature (1)..(633): Ortholog of  Ceres SEQ ID NO 14306299 as cited in SEQ ID NO 56895
  misc_feature (1)..(633): Ortholog of  Ceres SEQ ID NO 13663631 as cited in SEQ ID NO 67073
atggcgaccacaacatcaacccaagccatagttttcgcaatcgcccttttcttggtcgccatccaagccgttcatgcagactattaccggcaccgcccacagcgacctataaccccgagccctcctccctacgttgcaaagccccagccgctcccaactcccagccccaaacctatcctttatcagcctcctcccacataccaaccacccacgggctcgttcgaacaacaatttcttgatccacataatactgtccgaggcggtctaggtttgcctccactggtgtgggacgtaaagatcgcaagctatgcaacatggtgggctaaccagaggagatacgactgctccttaacccactcgaccggcccatacggtgagaacttgttctggggaagtggctcagactttacatcgactttcgcagtggagtcatggactgtggaggctaagtcctacaaccacatgaccaacacgtgtgaaggagatggtatgtgtggtcactacactcagatcgtgtggcgtgaaaccaggcgcctaggttgcgctagagttgtctgcgagaacggcgcaggagttttcatcacttgcaactacgaccctccgggtaactacgttggggagaagccttactaa

SEQ ID NO: 82885 - protein, 210 aa, Arabidopsis thaliana
  peptide (1)..(210): Ceres Seq. ID no. 12667781
MATTTSTQAIVFAIALFLVAIQAVHADYYRHRPQRPITPSPPPYVAKPQPLPTPSPKPILYQPPPTYQPPTGSFEQQFLDPHNTVRGGLGLPPLVWDVKIASYATWWANQRRYDCSLTHSTGPYGENLFWGSGSDFTSTFAVESWTVEAKSYNHMTNTCEGDGMCGHYTQIVWRETRRLGCARVVCENGAGVFITCNYDPPGNYVGEKPY

SEQ ID NO: 82886 - DNA, 1053 bp, Arabidopsis thaliana
  misc_feature (1)..(1053): Ceres Seq. ID no. 12667782
  misc_feature (1)..(1053): Ortholog of  Ceres SEQ ID NO 14311671 as cited in SEQ ID NO 51251
  misc_feature (1)..(1053): Ortholog of  Ceres SEQ ID NO 14304791 as cited in SEQ ID NO 53562
  misc_feature (1)..(1053): Ortholog of  Ceres SEQ ID NO 14307355 as cited in SEQ ID NO 54610
  misc_feature (1)..(1053): Ortholog of  Ceres SEQ ID NO 13594298 as cited in SEQ ID NO 57803
  misc_feature (1)..(1053): Ortholog of  Ceres SEQ ID NO 14301894 as cited in SEQ ID NO 61677
  misc_feature (1)..(1053): Ortholog of  Ceres SEQ ID NO 13503476 as cited in SEQ ID NO 61978
  misc_feature (1)..(1053): Ortholog of  Ceres SEQ ID NO 12578438 as cited in SEQ ID NO 62201
  misc_feature (1)..(1053): Ortholog of  Ceres SEQ ID NO 12617675 as cited in SEQ ID NO 64656
aacaaacctaagctcaaagcccaccaaaaagaaaacaatcacttagcaatggcgatgatcagttactccaccattgtggttgctctgcttgcttcttttatgatttgctctgtttccgccaattttcaacgagacgtagagataacttggggagacggacgtggacagatcacaaacaacggcgatcttcttacactctctctcgacaaagcttcaggctcaggattccaatccaagaacgaatatttgttcggtaaaatcgacatgcagatcaaactcgttgccggaaactccgctggaactgtcaccgcttactatttgaaatcccctggatctacatgggacgagattgactttgagttcttgggaaacctaagtggtgatccttacacacttcatactaatgtctttacgcaaggaaaaggcgatagagaacaacaattcaaactctggttcgatcccactagtgatttccacacttactctatcctctggaacccacaacgcatcatattctccgtggatggaactcccataagagaattcaagaacatggaatctcaaggaactctgtttcctaagaaccagccaatgagaatgtactctagtctatggaacgctgaagaatgggccacaaggggtggtctcgtcaaaaccgactggtctaaagctcccttcactgcttcctaccgcggcttcaacgaagaagcttgcgtcgtgatcaacggccagtcttcatgccctaacgtgtcaggacaagggagtactggttcgtggttgtctcaggagctagactcgacgggtcaagaacagatgagatgggtacagaataactacatgatttacaattactgtacggacgctaaaaggttccctcaaggtcttccacgcgagtgcttagctgcgtaaagcttttaaacaaatgatccaaagccatgaaaagtaatactattctttgattcatcttataaagtatctgatgtttggttacatctgttttttatttattctatgtaagtatatttgtattcgaatattgatcaatcactttac

SEQ ID NO: 82887 - protein, 302 aa, Arabidopsis thaliana
  peptide (1)..(302): Ceres Seq. ID no. 12667783
NKPKLKAHQKENNHLAMAMISYSTIVVALLASFMICSVSANFQRDVEITWGDGRGQITNNGDLLTLSLDKASGSGFQSKNEYLFGKIDMQIKLVAGNSAGTVTAYYLKSPGSTWDEIDFEFLGNLSGDPYTLHTNVFTQGKGDREQQFKLWFDPTSDFHTYSILWNPQRIIFSVDGTPIREFKNMESQGTLFPKNQPMRMYSSLWNAEEWATRGGLVKTDWSKAPFTASYRGFNEEACVVINGQSSCPNVSGQGSTGSWLSQELDSTGQEQMRWVQNNYMIYNYCTDAKRFPQGLPRECLAA

SEQ ID NO: 82888 - protein, 286 aa, Arabidopsis thaliana
  peptide (1)..(286): Ceres Seq. ID no. 12667784
MAMISYSTIVVALLASFMICSVSANFQRDVEITWGDGRGQITNNGDLLTLSLDKASGSGFQSKNEYLFGKIDMQIKLVAGNSAGTVTAYYLKSPGSTWDEIDFEFLGNLSGDPYTLHTNVFTQGKGDREQQFKLWFDPTSDFHTYSILWNPQRIIFSVDGTPIREFKNMESQGTLFPKNQPMRMYSSLWNAEEWATRGGLVKTDWSKAPFTASYRGFNEEACVVINGQSSCPNVSGQGSTGSWLSQELDSTGQEQMRWVQNNYMIYNYCTDAKRFPQGLPRECLAA

SEQ ID NO: 82889 - protein, 284 aa, Arabidopsis thaliana
  peptide (1)..(284): Ceres Seq. ID no. 12667785
MISYSTIVVALLASFMICSVSANFQRDVEITWGDGRGQITNNGDLLTLSLDKASGSGFQSKNEYLFGKIDMQIKLVAGNSAGTVTAYYLKSPGSTWDEIDFEFLGNLSGDPYTLHTNVFTQGKGDREQQFKLWFDPTSDFHTYSILWNPQRIIFSVDGTPIREFKNMESQGTLFPKNQPMRMYSSLWNAEEWATRGGLVKTDWSKAPFTASYRGFNEEACVVINGQSSCPNVSGQGSTGSWLSQELDSTGQEQMRWVQNNYMIYNYCTDAKRFPQGLPRECLAA

SEQ ID NO: 82890 - DNA, 1089 bp, Arabidopsis thaliana
  misc_feature (1)..(1089): Ceres Seq. ID no. 12667786
  misc_feature (1)..(1089): Ortholog of  Ceres SEQ ID NO 13594298 as cited in SEQ ID NO 57803
  misc_feature (1)..(1089): Ortholog of  Ceres SEQ ID NO 13503476 as cited in SEQ ID NO 61978
  misc_feature (1)..(1089): Ortholog of  Ceres SEQ ID NO 12578438 as cited in SEQ ID NO 62201
  misc_feature (1)..(1089): Ortholog of  Ceres SEQ ID NO 12617675 as cited in SEQ ID NO 64656
atcgacaaagacttacctctcacggcgagaaacaacagagaatcggggaaaaatggcgtgtttcgcaaccaaacagcctctgttgttgtctctcctccttgccattggcttctttgtggtggctgcatctgccggaaacttctatgagagctttgatatcacttggggtaatggtcgtgccaacatattcgagaatggacagcttctcacttgtactcttgacaaggtctccggctcaggttttcaatccaagaaggagtacttgtttggtaagatcgacatgaagctcaagcttgtcgctggaaactctgctggcaccgtcaccgcctactacctatcgtcaaaaggcacggcatgggatgagattgacttcgagtttttgggaaatcgcacaggacatccttacactatccacaccaatgtgttcaccggaggtaaaggcgaccgtgagatgcagttccgtctctggttcgatcccactgcggatttccacacctacaccgtccactggaaccctgttaacatcatcttccttgtggatgggatcccaattcgggtgttcaagaacaacgagaaaaatggggtggcttaccctaagaaccagccgatgaggatatactcaagcctttgggaagccgatgactgggctacagaaggcggtcgcgtgaagatcgactggagcaacgcaccattcaaggcctcttacagaaacttcaacgaccaaagctcatgcagcaggacatcaagctcaaaatgggtgacttgcgagccaaacagcaactcgtggatgtggacgactctcaatcctgcccagtacggaaaaatgatgtgggtgcaacgagacttcatgatctacaactattgtaccgattttaagagattccctcaaggcctccccaaggagtgtaaactttgattctattatgggaattttcaagcatttttctttccgttttgtttcatcttgtgatgttactttgatttattttgttctttcttttggtgtttctgagatacgatattacatgtatacgtattcttcctgagaaaataagaagttgtattactcgataatacattttatctctc

SEQ ID NO: 82891 - protein, 304 aa, Arabidopsis thaliana
  peptide (1)..(304): Ceres Seq. ID no. 12667787
STKTYLSRRETTENRGKMACFATKQPLLLSLLLAIGFFVVAASAGNFYESFDITWGNGRANIFENGQLLTCTLDKVSGSGFQSKKEYLFGKIDMKLKLVAGNSAGTVTAYYLSSKGTAWDEIDFEFLGNRTGHPYTIHTNVFTGGKGDREMQFRLWFDPTADFHTYTVHWNPVNIIFLVDGIPIRVFKNNEKNGVAYPKNQPMRIYSSLWEADDWATEGGRVKIDWSNAPFKASYRNFNDQSSCSRTSSSKWVTCEPNSNSWMWTTLNPAQYGKMMWVQRDFMIYNYCTDFKRFPQGLPKECKL

SEQ ID NO: 82892 - protein, 287 aa, Arabidopsis thaliana
  peptide (1)..(287): Ceres Seq. ID no. 12667788
MACFATKQPLLLSLLLAIGFFVVAASAGNFYESFDITWGNGRANIFENGQLLTCTLDKVSGSGFQSKKEYLFGKIDMKLKLVAGNSAGTVTAYYLSSKGTAWDEIDFEFLGNRTGHPYTIHTNVFTGGKGDREMQFRLWFDPTADFHTYTVHWNPVNIIFLVDGIPIRVFKNNEKNGVAYPKNQPMRIYSSLWEADDWATEGGRVKIDWSNAPFKASYRNFNDQSSCSRTSSSKWVTCEPNSNSWMWTTLNPAQYGKMMWVQRDFMIYNYCTDFKRFPQGLPKECKL

SEQ ID NO: 82893 - protein, 211 aa, Arabidopsis thaliana
  peptide (1)..(211): Ceres Seq. ID no. 12667789
MKLKLVAGNSAGTVTAYYLSSKGTAWDEIDFEFLGNRTGHPYTIHTNVFTGGKGDREMQFRLWFDPTADFHTYTVHWNPVNIIFLVDGIPIRVFKNNEKNGVAYPKNQPMRIYSSLWEADDWATEGGRVKIDWSNAPFKASYRNFNDQSSCSRTSSSKWVTCEPNSNSWMWTTLNPAQYGKMMWVQRDFMIYNYCTDFKRFPQGLPKECKL

SEQ ID NO: 82894 - DNA, 1476 bp, Arabidopsis thaliana
  misc_feature (1)..(1476): Ceres Seq. ID no. 12667817
  misc_feature (1)..(1476): Ortholog of  Ceres SEQ ID NO 13654989 as cited in SEQ ID NO 63117
  misc_feature (1)..(1476): Ortholog of  Ceres SEQ ID NO 13657138 as cited in SEQ ID NO 65923
  misc_feature (1)..(1476): Ortholog of  Ceres SEQ ID NO 13584744 as cited in SEQ ID NO 69137
atggaaggccttcgagactcatcgtcacaaactatctcttccacgacgtcgtcttcttcgtctccgtcctgcgatgtagacgttgacaatcgtggaaaacaattaactccttctacaagacgatctcgagccggcttctctgattctttctcttctcatgatttatcatcattctgtcgagatgaagaagtaaaaacattctgccccatcaaatcggaatcagacgatgaattattaaggagcatagaagccgaaacttcatcttccgtggtgagcacgtcagactcatcagaaactcatcaccatcaccatcatcatcattcgtctggaggtcccaacaacggtcactggagaagaggtttcttccgtttgcttaagaaaggatcatccgcaatgccattcaacacgttcacacctctcaaaggagttccgaaactgaccagacggaagagcaaacgcataagggacaacatggttcccgttatacctgctcttgacactgatcacttgttctatttcaaaccctcctggaggaacttctctctccgagatattcagaccgcgacaaatgactacagccgtgaaaatctgatcggagaaggaggatatgcggaggtgtataagggacaaatggcagatgggcagatagtagcgataaagaagttgactagaggttctgcagaagagatgacgatggattatctgtccgaactagggatcattgttcatgtagatcatccaaacattgctaagcttattggttattgtgttgaaggaggaatgcatcttgttcttgagctatctcctaatggaagccttgcttctttgctctacgaggcgaaggagaaactgaattggagcatgagatacaaagtggcgatgggaacagcagagggactctactatctccatgaaggttgtcagagaagaatcattcataaagacattaaagcttctaacattcttctcactcagaactttgaggctcagatatcggatttcgggctagcgaaatggctaccagaccaatggactcaccatactgtatcaaaagttgaaggaacattcggttaccttccgccagagtttttcatgcatgggatagtagacgagaaaacagacgtatatgcttatggtgtcctgcttctcgagctcattaccggtagacaagccctcgacagctcacaacatagcattgtcatgtgggctaagccattgatcaaagagaacaagatcaaacaacttgttgatccgattctggaagatgactacgacgtagaagagttggaccgtcttgttgtggagattctgaggggagacaagtgcagcttagataagctaagagagcgagaaaactccaaactccagaggacttactctgaagaactattggataacgaagaatacaactcgacaagatatttaaacgatattaatcgacacatggagaccgttctcggaacatctaaggattaa

SEQ ID NO: 82895 - protein, 491 aa, Arabidopsis thaliana
  peptide (1)..(491): Ceres Seq. ID no. 12667818
MEGLRDSSSQTISSTTSSSSSPSCDVDVDNRGKQLTPSTRRSRAGFSDSFSSHDLSSFCRDEEVKTFCPIKSESDDELLRSIEAETSSSVVSTSDSSETHHHHHHHHSSGGPNNGHWRRGFFRLLKKGSSAMPFNTFTPLKGVPKLTRRKSKRIRDNMVPVIPALDTDHLFYFKPSWRNFSLRDIQTATNDYSRENLIGEGGYAEVYKGQMADGQIVAIKKLTRGSAEEMTMDYLSELGIIVHVDHPNIAKLIGYCVEGGMHLVLELSPNGSLASLLYEAKEKLNWSMRYKVAMGTAEGLYYLHEGCQRRIIHKDIKASNILLTQNFEAQISDFGLAKWLPDQWTHHTVSKVEGTFGYLPPEFFMHGIVDEKTDVYAYGVLLLELITGRQALDSSQHSIVMWAKPLIKENKIKQLVDPILEDDYDVEELDRLVVEILRGDKCSLDKLRERENSKLQRTYSEELLDNEEYNSTRYLNDINRHMETVLGTSKD

SEQ ID NO: 82896 - protein, 360 aa, Arabidopsis thaliana
  peptide (1)..(360): Ceres Seq. ID no. 12667819
MPFNTFTPLKGVPKLTRRKSKRIRDNMVPVIPALDTDHLFYFKPSWRNFSLRDIQTATNDYSRENLIGEGGYAEVYKGQMADGQIVAIKKLTRGSAEEMTMDYLSELGIIVHVDHPNIAKLIGYCVEGGMHLVLELSPNGSLASLLYEAKEKLNWSMRYKVAMGTAEGLYYLHEGCQRRIIHKDIKASNILLTQNFEAQISDFGLAKWLPDQWTHHTVSKVEGTFGYLPPEFFMHGIVDEKTDVYAYGVLLLELITGRQALDSSQHSIVMWAKPLIKENKIKQLVDPILEDDYDVEELDRLVVEILRGDKCSLDKLRERENSKLQRTYSEELLDNEEYNSTRYLNDINRHMETVLGTSKD

SEQ ID NO: 82897 - protein, 334 aa, Arabidopsis thaliana
  peptide (1)..(334): Ceres Seq. ID no. 12667820
MVPVIPALDTDHLFYFKPSWRNFSLRDIQTATNDYSRENLIGEGGYAEVYKGQMADGQIVAIKKLTRGSAEEMTMDYLSELGIIVHVDHPNIAKLIGYCVEGGMHLVLELSPNGSLASLLYEAKEKLNWSMRYKVAMGTAEGLYYLHEGCQRRIIHKDIKASNILLTQNFEAQISDFGLAKWLPDQWTHHTVSKVEGTFGYLPPEFFMHGIVDEKTDVYAYGVLLLELITGRQALDSSQHSIVMWAKPLIKENKIKQLVDPILEDDYDVEELDRLVVEILRGDKCSLDKLRERENSKLQRTYSEELLDNEEYNSTRYLNDINRHMETVLGTSKD

SEQ ID NO: 82898 - DNA, 1122 bp, Arabidopsis thaliana
  misc_feature (1)..(1122): Ceres Seq. ID no. 12667843
  misc_feature (1)..(1122): Ortholog of  Ceres SEQ ID NO 13597334 as cited in SEQ ID NO 64244
atggagagcttgacgatgctccttatcatgggacacttcatacaactgggagtttcagttattccagtttctaccatttatagtcctgacggcgatttgattgattgtatctaccggacggatcaacgagccttcgaccacccactcttacgaaaccatattattcaggaatatcctaccaacatgccacaaatagaaaaaagcgtacaagaaaattggcaaatttggcacgacaccggagaaaagtgtccggcagagacgattcctatgcgtcgggaattgaatccagtttctcaccaaaagcagcatgtacatgttccaaaagagtatgaggtcgccaacagagcaacttcagggcacaagtatgcaattgcatacatgattaaccggacaaatgtgtacggaacaagggcaacgtttaatgtctggacaccaaaggtagaatcggcttacgattttagcctcgctcagatttggctggcatctgggtcatacgagactgcggatctcaatactgttgaagccggttggcaggcggatggatataacaagaccgggtgttatggcctcgaccttcctggatttgtgcagactagcagtaccatcgccatcggagctgccattggtcgcacctcgacatatggaggcacccagtttgacatgacacttcagatctggaaggatctgttttcaggacattggtggctggctctgggcccaaatttagtgcccattggatactggccggccgtaattttcacgaccttatccgattatgcgacggcagttgaatggggaggcgaagtattataccgaaacctgtcgagcgtgaatacggtggctcaaatgggttcaggagaatatgccgacaaaggctatgggaaagcggcatatttctgcaatctgaaggtggcagagaacaaccacacccttctcccggttcaagatttcggcgttcaagccgattatccagaatattataccgttaagaagtcatctaaccggaactgcggaaaccatttttatttcggcggaccaggacctcaacgttcagaagcagttcggggaacaacggtttttggtttttgctttttattttatttgagtgtgttttgtttttaa

SEQ ID NO: 82899 - protein, 373 aa, Arabidopsis thaliana
  peptide (1)..(373): Ceres Seq. ID no. 12667844
MESLTMLLIMGHFIQLGVSVIPVSTIYSPDGDLIDCIYRTDQRAFDHPLLRNHIIQEYPTNMPQIEKSVQENWQIWHDTGEKCPAETIPMRRELNPVSHQKQHVHVPKEYEVANRATSGHKYAIAYMINRTNVYGTRATFNVWTPKVESAYDFSLAQIWLASGSYETADLNTVEAGWQADGYNKTGCYGLDLPGFVQTSSTIAIGAAIGRTSTYGGTQFDMTLQIWKDLFSGHWWLALGPNLVPIGYWPAVIFTTLSDYATAVEWGGEVLYRNLSSVNTVAQMGSGEYADKGYGKAAYFCNLKVAENNHTLLPVQDFGVQADYPEYYTVKKSSNRNCGNHFYFGGPGPQRSEAVRGTTVFGFCFLFYLSVFCF

SEQ ID NO: 82900 - protein, 368 aa, Arabidopsis thaliana
  peptide (1)..(368): Ceres Seq. ID no. 12667845
MLLIMGHFIQLGVSVIPVSTIYSPDGDLIDCIYRTDQRAFDHPLLRNHIIQEYPTNMPQIEKSVQENWQIWHDTGEKCPAETIPMRRELNPVSHQKQHVHVPKEYEVANRATSGHKYAIAYMINRTNVYGTRATFNVWTPKVESAYDFSLAQIWLASGSYETADLNTVEAGWQADGYNKTGCYGLDLPGFVQTSSTIAIGAAIGRTSTYGGTQFDMTLQIWKDLFSGHWWLALGPNLVPIGYWPAVIFTTLSDYATAVEWGGEVLYRNLSSVNTVAQMGSGEYADKGYGKAAYFCNLKVAENNHTLLPVQDFGVQADYPEYYTVKKSSNRNCGNHFYFGGPGPQRSEAVRGTTVFGFCFLFYLSVFCF

SEQ ID NO: 82901 - protein, 364 aa, Arabidopsis thaliana
  peptide (1)..(364): Ceres Seq. ID no. 12667846
MGHFIQLGVSVIPVSTIYSPDGDLIDCIYRTDQRAFDHPLLRNHIIQEYPTNMPQIEKSVQENWQIWHDTGEKCPAETIPMRRELNPVSHQKQHVHVPKEYEVANRATSGHKYAIAYMINRTNVYGTRATFNVWTPKVESAYDFSLAQIWLASGSYETADLNTVEAGWQADGYNKTGCYGLDLPGFVQTSSTIAIGAAIGRTSTYGGTQFDMTLQIWKDLFSGHWWLALGPNLVPIGYWPAVIFTTLSDYATAVEWGGEVLYRNLSSVNTVAQMGSGEYADKGYGKAAYFCNLKVAENNHTLLPVQDFGVQADYPEYYTVKKSSNRNCGNHFYFGGPGPQRSEAVRGTTVFGFCFLFYLSVFCF

SEQ ID NO: 82902 - DNA, 996 bp, Arabidopsis thaliana
  misc_feature (1)..(996): Ceres Seq. ID no. 12667847
  misc_feature (1)..(996): Ortholog of  Ceres SEQ ID NO 14304678 as cited in SEQ ID NO 53747
atggcggcaattttttctctcttccttttcttcattctcttcatcgtctctcttctcatcatcttatctttcatcgtacggccaagatccgtcacgatccccatcaagtttcgccacgtcttcatcaccggtggatcaagcggaatcggtctcgctctcgctcaccgtgccgtctccgaaggcgctaaagtctccatcctcgctcgttcaactgaaaagctcgccgaagccaaacgatccatccagctagctaccggtgtcgaggtcgccacgttctctgcggacgttcgcgattacgacgccgtttcgaaagcgattgatgaatcgggaccgatcgatgtgttgattgttaatcaaggcgtgtttattgggaaagagcttgagaaacagagtcctgaggaggttaagtttatgattgatgtgaatctgactgggagcttcaatgtgattaaggcggctttacctgctatgaaagctagggaaggtcgtggtcctgcttccatttctcttgtgtcctctcaagctggtcaggcaggtatatatggttacactgcatattcagcgagcaagtttgggcttcagggtttagcgcaagcattgcagcaagaagttatttctgatggcattcatgtgactctcttgtttcctcctgacactgatacacccgggtttgaacaagaactgaagaagaggccagagctaacttcaatcatagccgcatcatctggctcaatgaaaaccaatgaagtagccaaaatatgttttgatggtatcaaagcaggaaaattcacagtgacatgccattttattggcttcttactatctattgctagcaccggcatgtcccctcagggatctttttggcttgcactcactgaagttatgtttggtggtctaataagactcgccagcttggttttccaatggcaatggtacaaaaccatagaaaagtggagccaaagaaataaaaaagaagtaaatagtaagttagcttag

SEQ ID NO: 82903 - protein, 331 aa, Arabidopsis thaliana
  peptide (1)..(331): Ceres Seq. ID no. 12667848
MAAIFSLFLFFILFIVSLLIILSFIVRPRSVTIPIKFRHVFITGGSSGIGLALAHRAVSEGAKVSILARSTEKLAEAKRSIQLATGVEVATFSADVRDYDAVSKAIDESGPIDVLIVNQGVFIGKELEKQSPEEVKFMIDVNLTGSFNVIKAALPAMKAREGRGPASISLVSSQAGQAGIYGYTAYSASKFGLQGLAQALQQEVISDGIHVTLLFPPDTDTPGFEQELKKRPELTSIIAASSGSMKTNEVAKICFDGIKAGKFTVTCHFIGFLLSIASTGMSPQGSFWLALTEVMFGGLIRLASLVFQWQWYKTIEKWSQRNKKEVNSKLA

SEQ ID NO: 82904 - protein, 194 aa, Arabidopsis thaliana
  peptide (1)..(194): Ceres Seq. ID no. 12667849
MIDVNLTGSFNVIKAALPAMKAREGRGPASISLVSSQAGQAGIYGYTAYSASKFGLQGLAQALQQEVISDGIHVTLLFPPDTDTPGFEQELKKRPELTSIIAASSGSMKTNEVAKICFDGIKAGKFTVTCHFIGFLLSIASTGMSPQGSFWLALTEVMFGGLIRLASLVFQWQWYKTIEKWSQRNKKEVNSKLA

SEQ ID NO: 82905 - protein, 175 aa, Arabidopsis thaliana
  peptide (1)..(175): Ceres Seq. ID no. 12667850
MKAREGRGPASISLVSSQAGQAGIYGYTAYSASKFGLQGLAQALQQEVISDGIHVTLLFPPDTDTPGFEQELKKRPELTSIIAASSGSMKTNEVAKICFDGIKAGKFTVTCHFIGFLLSIASTGMSPQGSFWLALTEVMFGGLIRLASLVFQWQWYKTIEKWSQRNKKEVNSKLA

SEQ ID NO: 82906 - DNA, 768 bp, Arabidopsis thaliana
  misc_feature (1)..(768): Ceres Seq. ID no. 12667870
  misc_feature (1)..(768): Ortholog of  Ceres SEQ ID NO 13594794 as cited in SEQ ID NO 51761
atggctgaggctgaaccgtcgacgacagggcctcgcatttccttctcagcggatttgtcatcatcagatagcgacggagatttcatctgtatcaaccctgtgatgaatctcattgtgggtagagaagaaaaagacaagagctcagtgaaagccggagactttgagtttctgtcggaaaatgcaacgatgcttagcgctgacgagttgttctccgaaggaaagttacttcctttctggcaggttaagcattcagagaagcttaaaaacgttacattgaaaccaaaagtcgaagtccaacaagaagaagaagatcataaagtagtgaacgaggagggttttgttcataacaaggagcaagagaataataacaacaacaacaacaacaacaacaacagaggaagctggtttcttgacgacgacccttctccacgtccaccaaaatgtactgtgctgtggaaagagcttttgcggctgaagaaacagaggactaccacgactacgacggcttcaacgagggtatcgtctctctcgccgtcttcttcttcaagctcgacatcgtcttcttcgagttcgattggcgatgcggtgaagaaggaggagagagagaaggaagggaagagaggtaagaaagggttagagagaacgagatctgtgactatgaggataagaccaatgattcatgttcctgtttgtactccgtctaagtcctcttctcgattgcctcctctgtttcctctaaggctccagaaaaacagagttgagagatga

SEQ ID NO: 82907 - protein, 255 aa, Arabidopsis thaliana
  peptide (1)..(255): Ceres Seq. ID no. 12667871
MAEAEPSTTGPRISFSADLSSSDSDGDFICINPVMNLIVGREEKDKSSVKAGDFEFLSENATMLSADELFSEGKLLPFWQVKHSEKLKNVTLKPKVEVQQEEEDHKVVNEEGFVHNKEQENNNNNNNNNNNRGSWFLDDDPSPRPPKCTVLWKELLRLKKQRTTTTTTASTRVSSLSPSSSSSSTSSSSSSIGDAVKKEEREKEGKRGKKGLERTRSVTMRIRPMIHVPVCTPSKSSSRLPPLFPLRLQKNRVER

SEQ ID NO: 82908 - protein, 221 aa, Arabidopsis thaliana
  peptide (1)..(221): Ceres Seq. ID no. 12667872
MNLIVGREEKDKSSVKAGDFEFLSENATMLSADELFSEGKLLPFWQVKHSEKLKNVTLKPKVEVQQEEEDHKVVNEEGFVHNKEQENNNNNNNNNNNRGSWFLDDDPSPRPPKCTVLWKELLRLKKQRTTTTTTASTRVSSLSPSSSSSSTSSSSSSIGDAVKKEEREKEGKRGKKGLERTRSVTMRIRPMIHVPVCTPSKSSSRLPPLFPLRLQKNRVER

SEQ ID NO: 82909 - protein, 193 aa, Arabidopsis thaliana
  peptide (1)..(193): Ceres Seq. ID no. 12667873
MLSADELFSEGKLLPFWQVKHSEKLKNVTLKPKVEVQQEEEDHKVVNEEGFVHNKEQENNNNNNNNNNNRGSWFLDDDPSPRPPKCTVLWKELLRLKKQRTTTTTTASTRVSSLSPSSSSSSTSSSSSSIGDAVKKEEREKEGKRGKKGLERTRSVTMRIRPMIHVPVCTPSKSSSRLPPLFPLRLQKNRVER

SEQ ID NO: 82910 - DNA, 1510 bp, Arabidopsis thaliana
  misc_feature (1)..(1510): Ceres Seq. ID no. 12667874
  misc_feature (1)..(1510): Ortholog of  Ceres SEQ ID NO 13584616 as cited in SEQ ID NO 65234
gtcgcgtcgtgggtttaggtttaacgtattggcgcgccagtgaagaaaatagacgacgatggcgatgatgcatcctccgcagccgccgcaaggctcctatcaccatcctcagacgctcgaagaagttcgaactctttggattggtgatttgcagtactgggtcgacgaaaattacctcacttcctgcttctcccaaaccggcgagctcgtttctgtcaaggtaatacgtaacaagatcacgggacagccagaggggtatggttttatagagtttatatctcatgcagcagcagagagaactctgcagacgtacaatgggacacagatgcctggaactgagttaacttttcggttaaattgggcttcttttggttcaggacagaaagttgatgctggacctgatcattctatctttgttggagatttagcacctgatgttacagattatcttcttcaagagacattccgtgttcattattcttctgttagaggtgccaaggttgttactgatccaagtactggacgatcaaagggttatggatttgtaaaatttgcagaggaaagtgaaaggaatcgggctatggctgaaatgaatggtttgtattgctcaacaaggcctatgcgtattagcgcagcaacacctaaaaaaaacgtcggtgtgcagcaacaatatgtcaccaaagctgtttacccagttacagtcccatctgcagttgctgcaccagtccaagcatacgttgctccacctgaaagtgatgtcacctgtacaacgatttcagttgccaatttggaccaaaatgttacagaggaagagctgaagaaagcattctcccaattaggagaggttatttatgtcaaaatacctgcaacaaagggatatggttatgttcaattcaaaaccaggccttctgcagaagaagctgttcaaagaatgcagggacaagtgattggtcaacaagcagttcgcatctcttggagtaaaaatccaggacaggatggttgggttacacaagcagatccgaatcagtggaatgggtattatggttatgggcaaggctatgatgcatatgcttatggggcaactcaagatccatccgtgtacgcatatggtggatatggctatccccagtatccgcaacagggagagggtacacaagacatttcgaactctgcggcgggtggagtagcaggtgcagagcaagagttgtatgatcctctggccactcctgatgtagacaagttaaatgctgcttacctttcggttcatgcaagtgccatattaggaaggccaatgtggcagcggacctcatcgctcacatcacaattgggcaaatgatcgggaagagaagaataaaatggtgggtgctttgagatgtttagtgtgtccatttcactgctctttgtctgattgtttgggatttttctgtaatctacagttaggatctagttacaatgcaaaatcatgaatcttccaacttttctgccatggtcaatgataatgccttttact

SEQ ID NO: 82911 - protein, 425 aa, Arabidopsis thaliana
  peptide (1)..(425): Ceres Seq. ID no. 12667875
MAMMHPPQPPQGSYHHPQTLEEVRTLWIGDLQYWVDENYLTSCFSQTGELVSVKVIRNKITGQPEGYGFIEFISHAAAERTLQTYNGTQMPGTELTFRLNWASFGSGQKVDAGPDHSIFVGDLAPDVTDYLLQETFRVHYSSVRGAKVVTDPSTGRSKGYGFVKFAEESERNRAMAEMNGLYCSTRPMRISAATPKKNVGVQQQYVTKAVYPVTVPSAVAAPVQAYVAPPESDVTCTTISVANLDQNVTEEELKKAFSQLGEVIYVKIPATKGYGYVQFKTRPSAEEAVQRMQGQVIGQQAVRISWSKNPGQDGWVTQADPNQWNGYYGYGQGYDAYAYGATQDPSVYAYGGYGYPQYPQQGEGTQDISNSAAGGVAGAEQELYDPLATPDVDKLNAAYLSVHASAILGRPMWQRTSSLTSQLGK

SEQ ID NO: 82912 - protein, 423 aa, Arabidopsis thaliana
  peptide (1)..(423): Ceres Seq. ID no. 12667876
MMHPPQPPQGSYHHPQTLEEVRTLWIGDLQYWVDENYLTSCFSQTGELVSVKVIRNKITGQPEGYGFIEFISHAAAERTLQTYNGTQMPGTELTFRLNWASFGSGQKVDAGPDHSIFVGDLAPDVTDYLLQETFRVHYSSVRGAKVVTDPSTGRSKGYGFVKFAEESERNRAMAEMNGLYCSTRPMRISAATPKKNVGVQQQYVTKAVYPVTVPSAVAAPVQAYVAPPESDVTCTTISVANLDQNVTEEELKKAFSQLGEVIYVKIPATKGYGYVQFKTRPSAEEAVQRMQGQVIGQQAVRISWSKNPGQDGWVTQADPNQWNGYYGYGQGYDAYAYGATQDPSVYAYGGYGYPQYPQQGEGTQDISNSAAGGVAGAEQELYDPLATPDVDKLNAAYLSVHASAILGRPMWQRTSSLTSQLGK

SEQ ID NO: 82913 - protein, 422 aa, Arabidopsis thaliana
  peptide (1)..(422): Ceres Seq. ID no. 12667877
MHPPQPPQGSYHHPQTLEEVRTLWIGDLQYWVDENYLTSCFSQTGELVSVKVIRNKITGQPEGYGFIEFISHAAAERTLQTYNGTQMPGTELTFRLNWASFGSGQKVDAGPDHSIFVGDLAPDVTDYLLQETFRVHYSSVRGAKVVTDPSTGRSKGYGFVKFAEESERNRAMAEMNGLYCSTRPMRISAATPKKNVGVQQQYVTKAVYPVTVPSAVAAPVQAYVAPPESDVTCTTISVANLDQNVTEEELKKAFSQLGEVIYVKIPATKGYGYVQFKTRPSAEEAVQRMQGQVIGQQAVRISWSKNPGQDGWVTQADPNQWNGYYGYGQGYDAYAYGATQDPSVYAYGGYGYPQYPQQGEGTQDISNSAAGGVAGAEQELYDPLATPDVDKLNAAYLSVHASAILGRPMWQRTSSLTSQLGK

SEQ ID NO: 82914 - DNA, 1572 bp, Arabidopsis thaliana
  misc_feature (1)..(1572): Ceres Seq. ID no. 12667878
  misc_feature (1)..(1572): Ortholog of  Ceres SEQ ID NO 15176759 as cited in SEQ ID NO 59678
  misc_feature (1)..(1572): Ortholog of  Ceres SEQ ID NO 15172875 as cited in SEQ ID NO 60423
  misc_feature (1)..(1572): Ortholog of  Ceres SEQ ID NO 13659971 as cited in SEQ ID NO 67565
atgggaaattgttgctctcatggaagagattcagatgataacaaagaagaaccgaggccggaaaatggaggcggcggtgttggtgccgctgaagcctctgttagagcttctaaacacccgccagcatctcctcctcctgcaaccaaacaaggaccaataggacctgtcttagggcgaccaatggaagatgtaaagagctcatatacattgggtaaggagctaggtcgtggacagtttggggtgactcatctctgcacgcaaaaggccacggggctgcaattcgcttgcaagaccattgctaaaaggaagctcgtgaacaaagaagacattgaggatgtgagaagggaggtgcagattatgcatcacttgaccggtcagccaaacattgtggagcttaaaggagcgtatgaggataagcattctgtgcatttggttatggagctttgcgcgggaggtgagttgttcgacaggattatcgcaaagggacattattcggagagagctgcagcctcgttactacggacgattgtgcagattatccatacttgccattccatgggggttatccacagggacttgaagcctgagaactttttgttgcttagcaaggatgagaattctcctctgaaagccaccgacttcgggttatccgtgttctacaaaccaggagaggtgttcaaagacattgtgggaagtgcttattacattgcaccagaggtgttgaggaggaagtatggaccagaggctgatatttggagcattggtgtcatgttgtatatcctcctgtgtggtgttccacctttttgggctgagtcagagaatgggattttcaatgccatcctaagtggacaggttgatttttcaagcgatccatggccagtcatctcaccacaggcaaaagacctcgttaggaagatgctcaactctgatccaaaacaaagattaaccgctgctcaagttctcaatcatccatggatcaaggaggatggagaagcaccggatgttcctcttgacaatgcagtgatgtctaggctcaagcagttcaaagcaatgaacaactttaagaaagttgctttacgggtgatagccgggtgcttatcagaggaagaaatcatggggttaaaagagatgttcaaaggaatggacactgacaacagtggaaccataactcttgaggaactaagacagggacttgctaagcaaggtacaaggttatccgaatacgaagtccagcaactaatggaagctgctgatgcggacggtaatggaacaatagactatggggagttcattgcagctacaatgcacatcaacaggctcgacagagaagagcatctctactcagccttccaacactttgacaaagacaacagtggatatatcacaacggaagagctagagcaagcccttcgggagtttggcatgaacgatggcagagacattaaggaaatcatttctgaggttgatggagacaatgatgggcggataaactacgaggaatttgtggcgatgatgagaaaaggaaacccagatcctaatcctaagaagcggcgtgaactatcattcaaatga

SEQ ID NO: 82915 - protein, 523 aa, Arabidopsis thaliana
  peptide (1)..(523): Ceres Seq. ID no. 12667879
MGNCCSHGRDSDDNKEEPRPENGGGGVGAAEASVRASKHPPASPPPATKQGPIGPVLGRPMEDVKSSYTLGKELGRGQFGVTHLCTQKATGLQFACKTIAKRKLVNKEDIEDVRREVQIMHHLTGQPNIVELKGAYEDKHSVHLVMELCAGGELFDRIIAKGHYSERAAASLLRTIVQIIHTCHSMGVIHRDLKPENFLLLSKDENSPLKATDFGLSVFYKPGEVFKDIVGSAYYIAPEVLRRKYGPEADIWSIGVMLYILLCGVPPFWAESENGIFNAILSGQVDFSSDPWPVISPQAKDLVRKMLNSDPKQRLTAAQVLNHPWIKEDGEAPDVPLDNAVMSRLKQFKAMNNFKKVALRVIAGCLSEEEIMGLKEMFKGMDTDNSGTITLEELRQGLAKQGTRLSEYEVQQLMEAADADGNGTIDYGEFIAATMHINRLDREEHLYSAFQHFDKDNSGYITTEELEQALREFGMNDGRDIKEIISEVDGDNDGRINYEEFVAMMRKGNPDPNPKKRRELSFK

SEQ ID NO: 82916 - protein, 463 aa, Arabidopsis thaliana
  peptide (1)..(463): Ceres Seq. ID no. 12667880
MEDVKSSYTLGKELGRGQFGVTHLCTQKATGLQFACKTIAKRKLVNKEDIEDVRREVQIMHHLTGQPNIVELKGAYEDKHSVHLVMELCAGGELFDRIIAKGHYSERAAASLLRTIVQIIHTCHSMGVIHRDLKPENFLLLSKDENSPLKATDFGLSVFYKPGEVFKDIVGSAYYIAPEVLRRKYGPEADIWSIGVMLYILLCGVPPFWAESENGIFNAILSGQVDFSSDPWPVISPQAKDLVRKMLNSDPKQRLTAAQVLNHPWIKEDGEAPDVPLDNAVMSRLKQFKAMNNFKKVALRVIAGCLSEEEIMGLKEMFKGMDTDNSGTITLEELRQGLAKQGTRLSEYEVQQLMEAADADGNGTIDYGEFIAATMHINRLDREEHLYSAFQHFDKDNSGYITTEELEQALREFGMNDGRDIKEIISEVDGDNDGRINYEEFVAMMRKGNPDPNPKKRRELSFK

SEQ ID NO: 82917 - protein, 404 aa, Arabidopsis thaliana
  peptide (1)..(404): Ceres Seq. ID no. 12667881
MHHLTGQPNIVELKGAYEDKHSVHLVMELCAGGELFDRIIAKGHYSERAAASLLRTIVQIIHTCHSMGVIHRDLKPENFLLLSKDENSPLKATDFGLSVFYKPGEVFKDIVGSAYYIAPEVLRRKYGPEADIWSIGVMLYILLCGVPPFWAESENGIFNAILSGQVDFSSDPWPVISPQAKDLVRKMLNSDPKQRLTAAQVLNHPWIKEDGEAPDVPLDNAVMSRLKQFKAMNNFKKVALRVIAGCLSEEEIMGLKEMFKGMDTDNSGTITLEELRQGLAKQGTRLSEYEVQQLMEAADADGNGTIDYGEFIAATMHINRLDREEHLYSAFQHFDKDNSGYITTEELEQALREFGMNDGRDIKEIISEVDGDNDGRINYEEFVAMMRKGNPDPNPKKRRELSFK

SEQ ID NO: 82918 - DNA, 1894 bp, Arabidopsis thaliana
  misc_feature (1)..(1894): Ceres Seq. ID no. 12667886
  misc_feature (1)..(1894): Ortholog of  Ceres SEQ ID NO 13659971 as cited in SEQ ID NO 67565
  misc_feature (1)..(1894): Ortholog of  Ceres SEQ ID NO 13500385 as cited in SEQ ID NO 67583
ttgcgtttgtgagtgatttagttgtttgatgaaatctcaggacttctcagattcgaattataaatgggaaattgttgtgcgagcccgggttcggagactgggagtaagaaggggaaaccaaagatcaaaagtaacccgttttatagtgaagcatacactacgaatggatctggaactgggttcaagctctctgttttgaaagatccaacaggacatgatatatctcttatgtatgatctggggcgtgaggttggtcgcggagagtttggtattacttacttgtgcactgatatcaaaacgggcgagaagtatgcgtgcaagtctatatcaaagaagaagcttagaacagctgtggatatagaggatgttaggagggaagttgagataatgaaacatatgcctagacacccaaatatcgtgtcgctgaaggatgcctttgaggatgatgatgcagtgcatatagttatggagttgtgtgaaggaggtgagctgtttgatcggattgttgctagaggtcattatactgagcgagctgctgctgcagtgatgaagactattcttgaagttgttcagatatgccataagcatggagtgatgcatcgggatctaaagcctgagaactttctctttgcaaataaaaaagagacatcagcccttaaagccatagattttggattatcagtcttcttcaagcctggtgagggattcaacgagattgttggaagtccttattacatggcaccagaggtacttaggcgaaattacggacctgaggttgatatctggagtgctggagttatcctttatatcctgctctgtggtgtcccaccattttgggccgagactgagcaaggggtggctcaggcgatcattaggtcagttatcgactttaagagggatccatggccgagagtttctgagactgccaaagaccttgtgaggaagatgctcgaacctgaccccaaaaaacggctttctgctgcacaagtactcgaacattcttggatacaaaatgcgaagaaggctccaaatgtttcactcggcgagacggtgaaagcaagactcaaacagttttctgttatgaacaagctcaagaaaagagcgctacgggtgatagccgaacacttatcagtggaggaagtagctggcatcaaggaagcatttgagatgatggacagtaaaaagacgggaaagataaacctcgaggagcttaaatttggacttcataaactcggacagcagcagatacctgatactgatctacagattctgatggaagctgctgatgttgatggggatgggactttaaattatggggagtttgtggctgtctctgtgcatcttaagaaaatggcgaacgacgaacacttgcataaggcttttagcttttttgaccagaatcagagcgattacatagagattgaggagctgcgtgaggctttaaatgatgaggtggatactaacagtgaagaagttgttgcagctattatgcaagatgttgacacagacaaggacggacgaataagctatgaagagtttgcggcgatgatgaaagctggaacagattggaggaaagcgtcgaggcagtattcccgggaaagattcaacagtttgagcctcaagttaatgagagaaggttcattgcaattagaaggcgaaaattaagaaaggttctttgtttctgtatctcttaaagaagtaaaaagaaaaaggaaaaaacagtattctttgaaaattgtttatctttttttttcctcaataattgtagatcagggtttcaaatgttttagttacttgaatagccagccatgtacgatatgaagcagatgttcttaaattttctgactctttattttcatgttgtctggatccttaatactatttgttggcaaac

SEQ ID NO: 82919 - protein, 533 aa, Arabidopsis thaliana
  peptide (1)..(533): Ceres Seq. ID no. 12667887
MGNCCASPGSETGSKKGKPKIKSNPFYSEAYTTNGSGTGFKLSVLKDPTGHDISLMYDLGREVGRGEFGITYLCTDIKTGEKYACKSISKKKLRTAVDIEDVRREVEIMKHMPRHPNIVSLKDAFEDDDAVHIVMELCEGGELFDRIVARGHYTERAAAAVMKTILEVVQICHKHGVMHRDLKPENFLFANKKETSALKAIDFGLSVFFKPGEGFNEIVGSPYYMAPEVLRRNYGPEVDIWSAGVILYILLCGVPPFWAETEQGVAQAIIRSVIDFKRDPWPRVSETAKDLVRKMLEPDPKKRLSAAQVLEHSWIQNAKKAPNVSLGETVKARLKQFSVMNKLKKRALRVIAEHLSVEEVAGIKEAFEMMDSKKTGKINLEELKFGLHKLGQQQIPDTDLQILMEAADVDGDGTLNYGEFVAVSVHLKKMANDEHLHKAFSFFDQNQSDYIEIEELREALNDEVDTNSEEVVAAIMQDVDTDKDGRISYEEFAAMMKAGTDWRKASRQYSRERFNSLSLKLMREGSLQLEGEN

SEQ ID NO: 82920 - protein, 478 aa, Arabidopsis thaliana
  peptide (1)..(478): Ceres Seq. ID no. 12667888
MYDLGREVGRGEFGITYLCTDIKTGEKYACKSISKKKLRTAVDIEDVRREVEIMKHMPRHPNIVSLKDAFEDDDAVHIVMELCEGGELFDRIVARGHYTERAAAAVMKTILEVVQICHKHGVMHRDLKPENFLFANKKETSALKAIDFGLSVFFKPGEGFNEIVGSPYYMAPEVLRRNYGPEVDIWSAGVILYILLCGVPPFWAETEQGVAQAIIRSVIDFKRDPWPRVSETAKDLVRKMLEPDPKKRLSAAQVLEHSWIQNAKKAPNVSLGETVKARLKQFSVMNKLKKRALRVIAEHLSVEEVAGIKEAFEMMDSKKTGKINLEELKFGLHKLGQQQIPDTDLQILMEAADVDGDGTLNYGEFVAVSVHLKKMANDEHLHKAFSFFDQNQSDYIEIEELREALNDEVDTNSEEVVAAIMQDVDTDKDGRISYEEFAAMMKAGTDWRKASRQYSRERFNSLSLKLMREGSLQLEGEN

SEQ ID NO: 82921 - protein, 425 aa, Arabidopsis thaliana
  peptide (1)..(425): Ceres Seq. ID no. 12667889
MKHMPRHPNIVSLKDAFEDDDAVHIVMELCEGGELFDRIVARGHYTERAAAAVMKTILEVVQICHKHGVMHRDLKPENFLFANKKETSALKAIDFGLSVFFKPGEGFNEIVGSPYYMAPEVLRRNYGPEVDIWSAGVILYILLCGVPPFWAETEQGVAQAIIRSVIDFKRDPWPRVSETAKDLVRKMLEPDPKKRLSAAQVLEHSWIQNAKKAPNVSLGETVKARLKQFSVMNKLKKRALRVIAEHLSVEEVAGIKEAFEMMDSKKTGKINLEELKFGLHKLGQQQIPDTDLQILMEAADVDGDGTLNYGEFVAVSVHLKKMANDEHLHKAFSFFDQNQSDYIEIEELREALNDEVDTNSEEVVAAIMQDVDTDKDGRISYEEFAAMMKAGTDWRKASRQYSRERFNSLSLKLMREGSLQLEGEN

SEQ ID NO: 82922 - DNA, 1830 bp, Arabidopsis thaliana
  misc_feature (1)..(1830): Ceres Seq. ID no. 12667901
  misc_feature (1)..(1830): Ortholog of  Ceres SEQ ID NO 12613725 as cited in SEQ ID NO 68196
atggccgctatggatccgagaaataatggcaacgttgctccgctaaatgagcgggagagagcagaaaatttggaagttcgtgaagtggtagaggttcaagatgatcaaagtgtggtgtctcttatgtccaacgattctgaccttcagaaaaagatgatgaagaaagaggagaagaagaatggtggctggacaaacgcaatcattttgctagtaaatcaagggttagctacattggccttctttggtgtgggagtaaacttggtgttgttcctaacacgtgttatgggacaaggtaatgcagaagctgcgaacaatgtaagcaagtggacaggaacagtttacatgttctctctcgttggggcatttcttagtgactcctattggggtcgttacttgacttgcacgatattccaagtcatcttcgttatcggtgttggcctcctctcttttgtctcttggtttttcttgattaaacctcgaggatgtggcgatggggaccttgaatgcaaccctccctcttccctcggagttgctatcttttatctatctgtatatttggtagcttttggatacggaggccaccagccaacgctggctactttcggtgcagaccagcttgatgatgataaaaactccaaagctgcgtttttcagctacttctactttgctctcaacgtgggagctctcttttcaaacacaatccttgtttattttgaggataaagggttgtggactgaaggtttcttggtgtcactaggctccgctattgtcgcattggtggcttttttggccccaacaagacaatatcgttatgtcaagccgtgtggtaacccgttgcctcgtgtggcgcaagtatttgtggccactgctcgtaagtggagtgttgttcgaccaggagatccgcatgagttgtacgaacttgaaggtcctgaatccgccattaaaggaagtcgaaagatatttcatagtaccaaatttctcttcttggatagagcagcagtgattacagagaatgataggaatgggacaaggagcaatgcatggaggttgtgcagtgtaactcaagtagaggaggcaaaatgtgtgatgaagttgcttccaatatggctatgcactataatctactcagtgatcttcacacaaatggcgtcattgtttgtggagcaaggtgatgtgatgaatgcatacgtagggaaattccacatccccgcagcgagcatgtcggtcttcgacatattcagcgtctttgtatcaacaggaatctaccgccacatcatatttccatacgtgagacccacggaacttatgcggatggggatagggctgatcatagggataatggcaatggtagctgcaggattaacagagatccaacggctgaaacgagtagtcccggggcaaaaggagagtgagctcaccattttatggcaaattccacagtacgtgcttgtgggagcaagtgaggtgttcatgtacgttggacagttagagttcttcaacggacaagcaccagacgggttaaagaacttaggaagctcgttgtgtatggcttcgatggctttaggtaactacgtgagcagtttgatggttaatattgttatggccataaccaaaagaggtgagaatagccccgggtggataccggaaaatctcaacgaaggtcatatggatcggttttattttctgattgccgcgttagcagctatcgattttgtggtttatttgatatttgcaaagtggtaccaacccataagtcatgatgaagatagtatcaagggcggttctggtggtagtctgaagaagaccgtttctgagttggaacaagtttga

SEQ ID NO: 82923 - protein, 609 aa, Arabidopsis thaliana
  peptide (1)..(609): Ceres Seq. ID no. 12667902
MAAMDPRNNGNVAPLNERERAENLEVREVVEVQDDQSVVSLMSNDSDLQKKMMKKEEKKNGGWTNAIILLVNQGLATLAFFGVGVNLVLFLTRVMGQGNAEAANNVSKWTGTVYMFSLVGAFLSDSYWGRYLTCTIFQVIFVIGVGLLSFVSWFFLIKPRGCGDGDLECNPPSSLGVAIFYLSVYLVAFGYGGHQPTLATFGADQLDDDKNSKAAFFSYFYFALNVGALFSNTILVYFEDKGLWTEGFLVSLGSAIVALVAFLAPTRQYRYVKPCGNPLPRVAQVFVATARKWSVVRPGDPHELYELEGPESAIKGSRKIFHSTKFLFLDRAAVITENDRNGTRSNAWRLCSVTQVEEAKCVMKLLPIWLCTIIYSVIFTQMASLFVEQGDVMNAYVGKFHIPAASMSVFDIFSVFVSTGIYRHIIFPYVRPTELMRMGIGLIIGIMAMVAAGLTEIQRLKRVVPGQKESELTILWQIPQYVLVGASEVFMYVGQLEFFNGQAPDGLKNLGSSLCMASMALGNYVSSLMVNIVMAITKRGENSPGWIPENLNEGHMDRFYFLIAALAAIDFVVYLIFAKWYQPISHDEDSIKGGSGGSLKKTVSELEQV

SEQ ID NO: 82924 - protein, 606 aa, Arabidopsis thaliana
  peptide (1)..(606): Ceres Seq. ID no. 12667903
MDPRNNGNVAPLNERERAENLEVREVVEVQDDQSVVSLMSNDSDLQKKMMKKEEKKNGGWTNAIILLVNQGLATLAFFGVGVNLVLFLTRVMGQGNAEAANNVSKWTGTVYMFSLVGAFLSDSYWGRYLTCTIFQVIFVIGVGLLSFVSWFFLIKPRGCGDGDLECNPPSSLGVAIFYLSVYLVAFGYGGHQPTLATFGADQLDDDKNSKAAFFSYFYFALNVGALFSNTILVYFEDKGLWTEGFLVSLGSAIVALVAFLAPTRQYRYVKPCGNPLPRVAQVFVATARKWSVVRPGDPHELYELEGPESAIKGSRKIFHSTKFLFLDRAAVITENDRNGTRSNAWRLCSVTQVEEAKCVMKLLPIWLCTIIYSVIFTQMASLFVEQGDVMNAYVGKFHIPAASMSVFDIFSVFVSTGIYRHIIFPYVRPTELMRMGIGLIIGIMAMVAAGLTEIQRLKRVVPGQKESELTILWQIPQYVLVGASEVFMYVGQLEFFNGQAPDGLKNLGSSLCMASMALGNYVSSLMVNIVMAITKRGENSPGWIPENLNEGHMDRFYFLIAALAAIDFVVYLIFAKWYQPISHDEDSIKGGSGGSLKKTVSELEQV

SEQ ID NO: 82925 - protein, 568 aa, Arabidopsis thaliana
  peptide (1)..(568): Ceres Seq. ID no. 12667904
MSNDSDLQKKMMKKEEKKNGGWTNAIILLVNQGLATLAFFGVGVNLVLFLTRVMGQGNAEAANNVSKWTGTVYMFSLVGAFLSDSYWGRYLTCTIFQVIFVIGVGLLSFVSWFFLIKPRGCGDGDLECNPPSSLGVAIFYLSVYLVAFGYGGHQPTLATFGADQLDDDKNSKAAFFSYFYFALNVGALFSNTILVYFEDKGLWTEGFLVSLGSAIVALVAFLAPTRQYRYVKPCGNPLPRVAQVFVATARKWSVVRPGDPHELYELEGPESAIKGSRKIFHSTKFLFLDRAAVITENDRNGTRSNAWRLCSVTQVEEAKCVMKLLPIWLCTIIYSVIFTQMASLFVEQGDVMNAYVGKFHIPAASMSVFDIFSVFVSTGIYRHIIFPYVRPTELMRMGIGLIIGIMAMVAAGLTEIQRLKRVVPGQKESELTILWQIPQYVLVGASEVFMYVGQLEFFNGQAPDGLKNLGSSLCMASMALGNYVSSLMVNIVMAITKRGENSPGWIPENLNEGHMDRFYFLIAALAAIDFVVYLIFAKWYQPISHDEDSIKGGSGGSLKKTVSELEQV

SEQ ID NO: 82926 - DNA, 1527 bp, Arabidopsis thaliana
  misc_feature (1)..(1527): Ceres Seq. ID no. 12667912
  misc_feature (1)..(1527): Ortholog of  Ceres SEQ ID NO 14302875 as cited in SEQ ID NO 66242
  misc_feature (1)..(1527): Ortholog of  Ceres SEQ ID NO 13660287 as cited in SEQ ID NO 67316
atggaaaccccaaacatcatcagccacacaaatcttctatcgaagatagacctggaaaaacaaaaccctgcccccattttcccgacaatcactgagcttaaaagtgaggctaggtctctcttctccttagccttcccgacaatcctcgcggccctcatcctctacgctcgctccgccatctcgatgctcttcctcgggcatatcggtgaactagagctagctggtggctccctggccattgccttcgctaacatcactggctactccgttctagcaggtcttgcactcggcatggacccactctgttcgcaagcctttggagccggcagaccaaaactcctctctttaacgcttcaacgaaccgtacttttcttactcacaagttcggtagtaatcgtcgctctatggctcaacctggggaagatcatgatttatcttcatcaagatccaagtatctcatcgttggcccaaacatatatcctctgctctattcctgatctgctcaccaattcctttcttcaccctcttcgtatataccttcgagcacaaggtatcacaagccctttaactctcgcaacactcgctggcaccatcttccacatacccatgaactttttcctcgtttcttacctcggatggggtttcatgggcgtttcaatggccgcagccgcttcaaatcttcttgttgtcattttccttgtggcccatgtttggatcgcaggtctacaccagccaacgtggacccgccccagctcggaatgtttcaaagattggggaccagtcgtaaccctagccatacctagctgcatcggggtatgcctagagtggtggtggtacgagataatgaccgttctatgtggtttactcatagaccctagtactccagtggcatcaatgggcattcttatccaaacgacgtctttgctttacattttcccatcgtctctagggttagcagtctccacccgagttggtaacgaacttggctcaaaccgcccaaacaaggctaggttatcagccatagtggcggtttcctttgctggggtaatgggtctgacggcgtctgcgtttgcttggggcgtaagcgatgtctggggatggatcttcacaaacgacgttgctatcatcaaattaaccgcagccgcgttgccgattctcgggctttgcgagctcgggaactgcccgcaaacagtaggttgcggggttgttagaggcactgcacggccgtccatggcagcgaacataaacctaggagcgttttacctcgttggaacgcctgtagccgttgggctaacgttttgggccgcatatggattttgcggactttgggtaggtcttttagctgctcagatatgttgtgctgccatgatgctatatgtcgtggctactacggactgggagaaagaagcaattagagccagaaagctaacgtgtactgaaggcgttgatgtggtaataacaacaacgcaaaccaacggagacttatcggaaccattaatttacgttgtcactgtcgctactgactga

SEQ ID NO: 82927 - protein, 508 aa, Arabidopsis thaliana
  peptide (1)..(508): Ceres Seq. ID no. 12667913
METPNIISHTNLLSKIDLEKQNPAPIFPTITELKSEARSLFSLAFPTILAALILYARSAISMLFLGHIGELELAGGSLAIAFANITGYSVLAGLALGMDPLCSQAFGAGRPKLLSLTLQRTVLFLLTSSVVIVALWLNLGKIMIYLHQDPSISSLAQTYILCSIPDLLTNSFLHPLRIYLRAQGITSPLTLATLAGTIFHIPMNFFLVSYLGWGFMGVSMAAAASNLLVVIFLVAHVWIAGLHQPTWTRPSSECFKDWGPVVTLAIPSCIGVCLEWWWYEIMTVLCGLLIDPSTPVASMGILIQTTSLLYIFPSSLGLAVSTRVGNELGSNRPNKARLSAIVAVSFAGVMGLTASAFAWGVSDVWGWIFTNDVAIIKLTAAALPILGLCELGNCPQTVGCGVVRGTARPSMAANINLGAFYLVGTPVAVGLTFWAAYGFCGLWVGLLAAQICCAAMMLYVVATTDWEKEAIRARKLTCTEGVDVVITTTQTNGDLSEPLIYVVTVATD

SEQ ID NO: 82928 - protein, 447 aa, Arabidopsis thaliana
  peptide (1)..(447): Ceres Seq. ID no. 12667914
MLFLGHIGELELAGGSLAIAFANITGYSVLAGLALGMDPLCSQAFGAGRPKLLSLTLQRTVLFLLTSSVVIVALWLNLGKIMIYLHQDPSISSLAQTYILCSIPDLLTNSFLHPLRIYLRAQGITSPLTLATLAGTIFHIPMNFFLVSYLGWGFMGVSMAAAASNLLVVIFLVAHVWIAGLHQPTWTRPSSECFKDWGPVVTLAIPSCIGVCLEWWWYEIMTVLCGLLIDPSTPVASMGILIQTTSLLYIFPSSLGLAVSTRVGNELGSNRPNKARLSAIVAVSFAGVMGLTASAFAWGVSDVWGWIFTNDVAIIKLTAAALPILGLCELGNCPQTVGCGVVRGTARPSMAANINLGAFYLVGTPVAVGLTFWAAYGFCGLWVGLLAAQICCAAMMLYVVATTDWEKEAIRARKLTCTEGVDVVITTTQTNGDLSEPLIYVVTVATD

SEQ ID NO: 82929 - protein, 411 aa, Arabidopsis thaliana
  peptide (1)..(411): Ceres Seq. ID no. 12667915
MDPLCSQAFGAGRPKLLSLTLQRTVLFLLTSSVVIVALWLNLGKIMIYLHQDPSISSLAQTYILCSIPDLLTNSFLHPLRIYLRAQGITSPLTLATLAGTIFHIPMNFFLVSYLGWGFMGVSMAAAASNLLVVIFLVAHVWIAGLHQPTWTRPSSECFKDWGPVVTLAIPSCIGVCLEWWWYEIMTVLCGLLIDPSTPVASMGILIQTTSLLYIFPSSLGLAVSTRVGNELGSNRPNKARLSAIVAVSFAGVMGLTASAFAWGVSDVWGWIFTNDVAIIKLTAAALPILGLCELGNCPQTVGCGVVRGTARPSMAANINLGAFYLVGTPVAVGLTFWAAYGFCGLWVGLLAAQICCAAMMLYVVATTDWEKEAIRARKLTCTEGVDVVITTTQTNGDLSEPLIYVVTVATD

SEQ ID NO: 82930 - DNA, 1740 bp, Arabidopsis thaliana
  misc_feature (1)..(1740): Ceres Seq. ID no. 12667940
  misc_feature (1)..(1740): Ortholog of  Ceres SEQ ID NO 13597411 as cited in SEQ ID NO 64125
atggcgtcgactacacgagaaaagtttgtatctttcataaacaacagatggctcgtcttcgtggctgccatgtggatacagtcttgtgctggcatcggttatttgttcggaagcatttctccggttatcaaaagctccttaaactataatcagaaggagctttccagacttggagtcgccaaggatctcggtgatagtgtcggattcatcgccggtactctctctgagatcttgcctctttgggccgctcttcttgttggcgccgttcagaacctcatcggttacggatgggtttggcttatcgtcaccggtcgagccccgattcttcctctatgggctatgtgtgttctcatattcgttgggaacaatggcgagacctacttcaatactggagcattagtctctggtgttcaaaactttcccaagagcagaggtccagtggtgggtattctcaagggttttgctgggctaggtggtgcgatcatctctcagatatatacaatgatccactcatctaacccggcttctctcattctcatggtagctgttacgcctgcagttgtcgttgtttgcctcatgttcttcatcagacctgttggtggtcacaagcagatccgtcccactgatggagccagctttactttcatctacggtgtctgtcttctacttgctgcctatctcatgtccgttatgcttattcaagatctggtcgttgttagccacaacgtaatcactgtgttcaccattgtgttgtttgtcattcttgttgtcccaatcttggttccaatcatgacaagtttcttcacggagacaaacgagcctgatgacacaatagaagaacctcttgtcccaaaacgagaagaccaagaaccaggactgcaaacacctgatctaatcttgagtgaagtggaagatgagaagccaaaagatgtagatttgcttcctgcctcagagagacataagagaattgcgcatttgcaagcacagctaatgcaggcagctgcagaaggggcggttcgggtgaatagacggagagggccgcatagaggggaagatttcactctaacgcaggcactggtgaaagccgacttctggctcattttcttctccttgctgcttggttctggttcgggtttgacagtaattgacaatcttggtcagatgagtcagtctcttggttatgataacactcacgtgcttgtgtctatgattagcatttggaactttcttggacggatcggtggcggttatttctccgagctcgttgtcagggactacgcgtatccaagaccagtagcaatggctgtggctcagctaataatgtctgtgggacacatattctttgcgtacggatggcccggagcgatgtacattggcacgctgttgattggactcggatacggtgcacactgggctattgtcccagctactgcctctgagctctttggtctaaagaagtttggagcgttatacaatttcctgacattggcaaacccggctggatccctcgtgttctcgggtatgatcgcgagtagcatatacgaccgggaagcagaaaggcaagctcacggctccgtgtttgatccagatgacgcccttagatgcaatggttctatctgtttcttcttgacatcactcataatgtctggattctgcatcatcgcttgcatgttgagtatgattcttgtgcgtcgtaccaagtctgtctacactcatctctatggcaagacccgcacctaa

SEQ ID NO: 82931 - protein, 579 aa, Arabidopsis thaliana
  peptide (1)..(579): Ceres Seq. ID no. 12667941
MASTTREKFVSFINNRWLVFVAAMWIQSCAGIGYLFGSISPVIKSSLNYNQKELSRLGVAKDLGDSVGFIAGTLSEILPLWAALLVGAVQNLIGYGWVWLIVTGRAPILPLWAMCVLIFVGNNGETYFNTGALVSGVQNFPKSRGPVVGILKGFAGLGGAIISQIYTMIHSSNPASLILMVAVTPAVVVVCLMFFIRPVGGHKQIRPTDGASFTFIYGVCLLLAAYLMSVMLIQDLVVVSHNVITVFTIVLFVILVVPILVPIMTSFFTETNEPDDTIEEPLVPKREDQEPGLQTPDLILSEVEDEKPKDVDLLPASERHKRIAHLQAQLMQAAAEGAVRVNRRRGPHRGEDFTLTQALVKADFWLIFFSLLLGSGSGLTVIDNLGQMSQSLGYDNTHVLVSMISIWNFLGRIGGGYFSELVVRDYAYPRPVAMAVAQLIMSVGHIFFAYGWPGAMYIGTLLIGLGYGAHWAIVPATASELFGLKKFGALYNFLTLANPAGSLVFSGMIASSIYDREAERQAHGSVFDPDDALRCNGSICFFLTSLIMSGFCIIACMLSMILVRRTKSVYTHLYGKTRT

SEQ ID NO: 82932 - protein, 556 aa, Arabidopsis thaliana
  peptide (1)..(556): Ceres Seq. ID no. 12667942
MWIQSCAGIGYLFGSISPVIKSSLNYNQKELSRLGVAKDLGDSVGFIAGTLSEILPLWAALLVGAVQNLIGYGWVWLIVTGRAPILPLWAMCVLIFVGNNGETYFNTGALVSGVQNFPKSRGPVVGILKGFAGLGGAIISQIYTMIHSSNPASLILMVAVTPAVVVVCLMFFIRPVGGHKQIRPTDGASFTFIYGVCLLLAAYLMSVMLIQDLVVVSHNVITVFTIVLFVILVVPILVPIMTSFFTETNEPDDTIEEPLVPKREDQEPGLQTPDLILSEVEDEKPKDVDLLPASERHKRIAHLQAQLMQAAAEGAVRVNRRRGPHRGEDFTLTQALVKADFWLIFFSLLLGSGSGLTVIDNLGQMSQSLGYDNTHVLVSMISIWNFLGRIGGGYFSELVVRDYAYPRPVAMAVAQLIMSVGHIFFAYGWPGAMYIGTLLIGLGYGAHWAIVPATASELFGLKKFGALYNFLTLANPAGSLVFSGMIASSIYDREAERQAHGSVFDPDDALRCNGSICFFLTSLIMSGFCIIACMLSMILVRRTKSVYTHLYGKTRT

SEQ ID NO: 82933 - protein, 466 aa, Arabidopsis thaliana
  peptide (1)..(466): Ceres Seq. ID no. 12667943
MCVLIFVGNNGETYFNTGALVSGVQNFPKSRGPVVGILKGFAGLGGAIISQIYTMIHSSNPASLILMVAVTPAVVVVCLMFFIRPVGGHKQIRPTDGASFTFIYGVCLLLAAYLMSVMLIQDLVVVSHNVITVFTIVLFVILVVPILVPIMTSFFTETNEPDDTIEEPLVPKREDQEPGLQTPDLILSEVEDEKPKDVDLLPASERHKRIAHLQAQLMQAAAEGAVRVNRRRGPHRGEDFTLTQALVKADFWLIFFSLLLGSGSGLTVIDNLGQMSQSLGYDNTHVLVSMISIWNFLGRIGGGYFSELVVRDYAYPRPVAMAVAQLIMSVGHIFFAYGWPGAMYIGTLLIGLGYGAHWAIVPATASELFGLKKFGALYNFLTLANPAGSLVFSGMIASSIYDREAERQAHGSVFDPDDALRCNGSICFFLTSLIMSGFCIIACMLSMILVRRTKSVYTHLYGKTRT

SEQ ID NO: 82934 - DNA, 1188 bp, Arabidopsis thaliana
  misc_feature (1)..(1188): Ceres Seq. ID no. 12667944
  misc_feature (1)..(1188): Ortholog of  Ceres SEQ ID NO 13581579 as cited in SEQ ID NO 58361
  misc_feature (1)..(1188): Ortholog of  Ceres SEQ ID NO 13598714 as cited in SEQ ID NO 62656
  misc_feature (1)..(1188): Ortholog of  Ceres SEQ ID NO 13596969 as cited in SEQ ID NO 63375
  misc_feature (1)..(1188): Ortholog of  Ceres SEQ ID NO 14302240 as cited in SEQ ID NO 64162
  misc_feature (1)..(1188): Ortholog of  Ceres SEQ ID NO 13597519 as cited in SEQ ID NO 64759
  misc_feature (1)..(1188): Ortholog of  Ceres SEQ ID NO 13597870 as cited in SEQ ID NO 64982
  misc_feature (1)..(1188): Ortholog of  Ceres SEQ ID NO 13595926 as cited in SEQ ID NO 67778
  misc_feature (1)..(1188): Ortholog of  Ceres SEQ ID NO 12567001 as cited in SEQ ID NO 0
aaagaagacaaagaaattaaaggagaaaaatcgatcacgatggatattcgtagtgatgatgcaaaaaaacctatgatgatgtggttcttagggatgctgttgttttccatggtggccgagtcaaatgctcaactgtcagagaattactacgcctcgacatgtcctagcgtagagctcatcgttaagcaggcggttactacaaaattcaaacaaactgtcacaacggctcctgcaacgttgcggatgttctttcacgactgcttcgtcgagggatgtgatgcgtctgtgtttatagcatctgagaatgaagacgcagagaaagacgcagatgacaataaatctctcgccggagacggatttgacaccgtgattaaagctaaaaccgctgtagaatctcaatgtcccggagttgtgtcatgtgccgatatactagctctcgccgctagagacgtcgtcgtgctcgttggagggccagagtttaaggtggagctagggagacgagacgggctcgtgtcgaaagcgtctagagtgaccggcaagttacctgaaccagggcttgacgtgagaggtctagtccagatcttcgctagtaacgggctttcattgaccgacatgatcgctctttcaggcgcacatacaattggatcctctcactgcaaccgtttcgccaaccgtctccacaatttctcgacgttcatgccagtggaccctacgatggacccggtctacgctcagcagctgatacaagcctgctctgaccccaacccagatgctgtagtagacattgacctaacgtccagagataccttcgacaatagctactaccagaacctcgtggctcggaaaggacttttcacctccgatcaagctctgtttaacgatctctcgtctcaggctacggtggtcaggtttgctaacaacgctgaagaattctacagcgcttttagctctgctatgaggaatcttggccgcgttggggttaaggttgggaatcaaggcgagattcgaagggactgctctgcttttaactagctttattgaacaaatgtctataacctaaaacatataaattatgaagcttttgatttaagcttttgctatactaaaatgtcataatccacaatggaacttctcaaattgtaggggttgacctatttttcaggattattcagattccaaaacattatt

SEQ ID NO: 82935 - protein, 343 aa, Arabidopsis thaliana
  peptide (1)..(343): Ceres Seq. ID no. 12667945
KEDKEIKGEKSITMDIRSDDAKKPMMMWFLGMLLFSMVAESNAQLSENYYASTCPSVELIVKQAVTTKFKQTVTTAPATLRMFFHDCFVEGCDASVFIASENEDAEKDADDNKSLAGDGFDTVIKAKTAVESQCPGVVSCADILALAARDVVVLVGGPEFKVELGRRDGLVSKASRVTGKLPEPGLDVRGLVQIFASNGLSLTDMIALSGAHTIGSSHCNRFANRLHNFSTFMPVDPTMDPVYAQQLIQACSDPNPDAVVDIDLTSRDTFDNSYYQNLVARKGLFTSDQALFNDLSSQATVVRFANNAEEFYSAFSSAMRNLGRVGVKVGNQGEIRRDCSAFN

SEQ ID NO: 82936 - protein, 330 aa, Arabidopsis thaliana
  peptide (1)..(330): Ceres Seq. ID no. 12667946
MDIRSDDAKKPMMMWFLGMLLFSMVAESNAQLSENYYASTCPSVELIVKQAVTTKFKQTVTTAPATLRMFFHDCFVEGCDASVFIASENEDAEKDADDNKSLAGDGFDTVIKAKTAVESQCPGVVSCADILALAARDVVVLVGGPEFKVELGRRDGLVSKASRVTGKLPEPGLDVRGLVQIFASNGLSLTDMIALSGAHTIGSSHCNRFANRLHNFSTFMPVDPTMDPVYAQQLIQACSDPNPDAVVDIDLTSRDTFDNSYYQNLVARKGLFTSDQALFNDLSSQATVVRFANNAEEFYSAFSSAMRNLGRVGVKVGNQGEIRRDCSAFN

SEQ ID NO: 82937 - protein, 319 aa, Arabidopsis thaliana
  peptide (1)..(319): Ceres Seq. ID no. 12667947
MMMWFLGMLLFSMVAESNAQLSENYYASTCPSVELIVKQAVTTKFKQTVTTAPATLRMFFHDCFVEGCDASVFIASENEDAEKDADDNKSLAGDGFDTVIKAKTAVESQCPGVVSCADILALAARDVVVLVGGPEFKVELGRRDGLVSKASRVTGKLPEPGLDVRGLVQIFASNGLSLTDMIALSGAHTIGSSHCNRFANRLHNFSTFMPVDPTMDPVYAQQLIQACSDPNPDAVVDIDLTSRDTFDNSYYQNLVARKGLFTSDQALFNDLSSQATVVRFANNAEEFYSAFSSAMRNLGRVGVKVGNQGEIRRDCSAFN

SEQ ID NO: 82938 - DNA, 1320 bp, Arabidopsis thaliana
  misc_feature (1)..(1320): Ceres Seq. ID no. 12667974
  misc_feature (1)..(1320): Ortholog of  Ceres SEQ ID NO 15176532 as cited in SEQ ID NO 58184
  misc_feature (1)..(1320): Ortholog of  Ceres SEQ ID NO 13597546 as cited in SEQ ID NO 65017
  misc_feature (1)..(1320): Ortholog of  Ceres SEQ ID NO 13654353 as cited in SEQ ID NO 68318
atgggatggcctttcattggagaaactatttctttcttcaaacctcatagatcagactccatcggtacattcttgcaacaacgtgtttcacggtatggaaaagtgttcaagtcaaatatatgtggtggaaaagcagtagtctcatgtgaccaagaactcaacatgttcatacttcaaaacgaagggaagttgtttacatcggattatccaaaagcgatgcatgacattctcggcaaatattcccttctattagccaccggagaaattcacaggaaactaaaaaatgttattattagcttcatcaatctcacaaagtcgaaacctgactttcttcactgcgcagagaacctctctatctcgatactaaagtcatggaaaaattgccgagaagtcgaattccataaagaagttaaaatatttactctcagtgttatggtaaaccaactcttgagcatcaagccagaagacccagcaagactttatgtattgcaagattttttatcttatatgaaagggtttatctccttaccaataccgcttccaggaacgggttatacaaacgcaattaaggctaggaagagattgtcggcgagggttatggggatgataaaagaaagagagcgcgaagaagaagacatgaataatgcaataagagaagaagattttctggattcgataatttcgaatgaagatctaaattatgaagagaaagttagcattgtgttggacattttgcttggaggctttgagacaagtgctactactctttccttagtcgtctattttctagcaaaatctccaaatcttcttcacaaactcaaggaagaacatgcagccattagagccaagaaaggggatggggaacttttgaattgggaagattatcagaagatggaattcactcaatgtgtgatttctgaggcactacgatgtggtaatatcgtcaagactgtacatagaaaagctactcatgatattaaattcaacgaatatgtgattccaaaggggtggaaggtgtttccaatcttcacagcagtacatcttgatccctctcttcatgaaaatccttttgaatttaatcccatgagatggaccgataaggctaagatgaacaagaaaacgacggcgtttggaggaggagtaagggtatgtcctggtggtgaacttggcaagctccaaattgctttcttccttcatcatcttgtcctctcctataggtggaaaataaagtcagatgaaatgccaatcgcgcacccttacgtggagtttaagagaggcatgcttttggagatagagccaacaaaattccttgaagattag

SEQ ID NO: 82939 - protein, 439 aa, Arabidopsis thaliana
  peptide (1)..(439): Ceres Seq. ID no. 12667975
MGWPFIGETISFFKPHRSDSIGTFLQQRVSRYGKVFKSNICGGKAVVSCDQELNMFILQNEGKLFTSDYPKAMHDILGKYSLLLATGEIHRKLKNVIISFINLTKSKPDFLHCAENLSISILKSWKNCREVEFHKEVKIFTLSVMVNQLLSIKPEDPARLYVLQDFLSYMKGFISLPIPLPGTGYTNAIKARKRLSARVMGMIKEREREEEDMNNAIREEDFLDSIISNEDLNYEEKVSIVLDILLGGFETSATTLSLVVYFLAKSPNLLHKLKEEHAAIRAKKGDGELLNWEDYQKMEFTQCVISEALRCGNIVKTVHRKATHDIKFNEYVIPKGWKVFPIFTAVHLDPSLHENPFEFNPMRWTDKAKMNKKTTAFGGGVRVCPGGELGKLQIAFFLHHLVLSYRWKIKSDEMPIAHPYVEFKRGMLLEIEPTKFLED

SEQ ID NO: 82940 - protein, 385 aa, Arabidopsis thaliana
  peptide (1)..(385): Ceres Seq. ID no. 12667976
MFILQNEGKLFTSDYPKAMHDILGKYSLLLATGEIHRKLKNVIISFINLTKSKPDFLHCAENLSISILKSWKNCREVEFHKEVKIFTLSVMVNQLLSIKPEDPARLYVLQDFLSYMKGFISLPIPLPGTGYTNAIKARKRLSARVMGMIKEREREEEDMNNAIREEDFLDSIISNEDLNYEEKVSIVLDILLGGFETSATTLSLVVYFLAKSPNLLHKLKEEHAAIRAKKGDGELLNWEDYQKMEFTQCVISEALRCGNIVKTVHRKATHDIKFNEYVIPKGWKVFPIFTAVHLDPSLHENPFEFNPMRWTDKAKMNKKTTAFGGGVRVCPGGELGKLQIAFFLHHLVLSYRWKIKSDEMPIAHPYVEFKRGMLLEIEPTKFLED

SEQ ID NO: 82941 - protein, 367 aa, Arabidopsis thaliana
  peptide (1)..(367): Ceres Seq. ID no. 12667977
MHDILGKYSLLLATGEIHRKLKNVIISFINLTKSKPDFLHCAENLSISILKSWKNCREVEFHKEVKIFTLSVMVNQLLSIKPEDPARLYVLQDFLSYMKGFISLPIPLPGTGYTNAIKARKRLSARVMGMIKEREREEEDMNNAIREEDFLDSIISNEDLNYEEKVSIVLDILLGGFETSATTLSLVVYFLAKSPNLLHKLKEEHAAIRAKKGDGELLNWEDYQKMEFTQCVISEALRCGNIVKTVHRKATHDIKFNEYVIPKGWKVFPIFTAVHLDPSLHENPFEFNPMRWTDKAKMNKKTTAFGGGVRVCPGGELGKLQIAFFLHHLVLSYRWKIKSDEMPIAHPYVEFKRGMLLEIEPTKFLED

SEQ ID NO: 82942 - DNA, 1710 bp, Arabidopsis thaliana
  misc_feature (1)..(1710): Ceres Seq. ID no. 12668001
  misc_feature (1)..(1710): Ortholog of  Ceres SEQ ID NO 13663060 as cited in SEQ ID NO 60964
  misc_feature (1)..(1710): Ortholog of  Ceres SEQ ID NO 13655298 as cited in SEQ ID NO 68914
attggggtccgctctctctctctctctgccatcagaagaaaaaaccaaacaccgagacaaaacacatcacgaagaagagagagatttgccattttcggcaaggaagtgttttattctagggcttctctagttgctgcgtagacaagatggtggagtgaaattgcggcggtgacttttcagattgacaaattgaattaaagatcttgaatacatatggcttctgtgggaacattaccagcttcttctatggctacaaaacaaagcaatgcttctatatgcgctgaaaaattacctgaagggattaatgagatgaagataaaagatgataaggaaatggaagcagctgtggttgatgggaatggaactgaaacaggtcacattattgttacaactattggtggtaaaaatggtcagcctaaacagaccataagttatatggcagagcgcatcgttggacaaggttcttttggaatcgtttttcaggccaagtgtttagaaacgggggaaactgttgcaatcaagaaagttttgcaagacaagagatacaagaatcgggagctgcagacaatgcgtcttcttgatcaccctaatgttgtatccctcaagcattgttttttctcaacgactgaaaaagatgagctctatctcaatctggtccttgaatacgttcctgagactgtctatcgcgtctcaaagcactatagtcgggcaaaccagaggatgcccattatatatgttaaactctatacttatcagatttgcagagctttggcttatattcatggtggagtaggagtctgccacagagacataaaaccacagaatcttctggttaatcctcatacgcatcaggtcaaactatgcgattttggtagcgcaaaagttctggttaaaggcgagccaaacatctcatacatctgctcccgttactatcgagcacctgaacttatatttggagctacagaatatacaacaacaattgacatatggtctgcaggctgtgttcttgctgaattgcttctgggacagcctctatttccaggtgagagtggagttgaccagctagttgagataataaaggttcttggaacaccaacacgggaggaaatcaaatgcatgaatccaaactacacagaattcaaattcccgcaaataaaggctcatccttggcacaaaatattccataagcgtacacctccagaagctgtagaccttgtctcaagacttctccagtattctccaaacctcagatcaaccgctatggaggcgatagttcacccgttcttcgatgagctacgtgatcccaatacacgtcttcctaatggtcgtgccttgcctcctctcttcaactttaaacctcaagagctaaaaggagcaagtttagagttgttgtccaagcttatacctgaccacgcccgaaaacaatgttccttcctcgctctctaaatctcttcctctctctctatatatatgtgtgtgtgtgtgtatgtacacatgcatataatatgcttatcgtttctaagtaatggagatagcttctcaggattatcattagctttcatctttcatgtatctttgttgtttattgtcttatcacaacctttgtactttattacatacaatgattagtgtaatgtatgtgacggtctttgactcgccggtcgctacagttatgttggatactaaattataaaataaacttctcgctcg

SEQ ID NO: 82943 - protein, 410 aa, Arabidopsis thaliana
  peptide (1)..(410): Ceres Seq. ID no. 12668002
MASVGTLPASSMATKQSNASICAEKLPEGINEMKIKDDKEMEAAVVDGNGTETGHIIVTTIGGKNGQPKQTISYMAERIVGQGSFGIVFQAKCLETGETVAIKKVLQDKRYKNRELQTMRLLDHPNVVSLKHCFFSTTEKDELYLNLVLEYVPETVYRVSKHYSRANQRMPIIYVKLYTYQICRALAYIHGGVGVCHRDIKPQNLLVNPHTHQVKLCDFGSAKVLVKGEPNISYICSRYYRAPELIFGATEYTTTIDIWSAGCVLAELLLGQPLFPGESGVDQLVEIIKVLGTPTREEIKCMNPNYTEFKFPQIKAHPWHKIFHKRTPPEAVDLVSRLLQYSPNLRSTAMEAIVHPFFDELRDPNTRLPNGRALPPLFNFKPQELKGASLELLSKLIPDHARKQCSFLAL

SEQ ID NO: 82944 - protein, 399 aa, Arabidopsis thaliana
  peptide (1)..(399): Ceres Seq. ID no. 12668003
MATKQSNASICAEKLPEGINEMKIKDDKEMEAAVVDGNGTETGHIIVTTIGGKNGQPKQTISYMAERIVGQGSFGIVFQAKCLETGETVAIKKVLQDKRYKNRELQTMRLLDHPNVVSLKHCFFSTTEKDELYLNLVLEYVPETVYRVSKHYSRANQRMPIIYVKLYTYQICRALAYIHGGVGVCHRDIKPQNLLVNPHTHQVKLCDFGSAKVLVKGEPNISYICSRYYRAPELIFGATEYTTTIDIWSAGCVLAELLLGQPLFPGESGVDQLVEIIKVLGTPTREEIKCMNPNYTEFKFPQIKAHPWHKIFHKRTPPEAVDLVSRLLQYSPNLRSTAMEAIVHPFFDELRDPNTRLPNGRALPPLFNFKPQELKGASLELLSKLIPDHARKQCSFLAL

SEQ ID NO: 82945 - protein, 378 aa, Arabidopsis thaliana
  peptide (1)..(378): Ceres Seq. ID no. 12668004
MKIKDDKEMEAAVVDGNGTETGHIIVTTIGGKNGQPKQTISYMAERIVGQGSFGIVFQAKCLETGETVAIKKVLQDKRYKNRELQTMRLLDHPNVVSLKHCFFSTTEKDELYLNLVLEYVPETVYRVSKHYSRANQRMPIIYVKLYTYQICRALAYIHGGVGVCHRDIKPQNLLVNPHTHQVKLCDFGSAKVLVKGEPNISYICSRYYRAPELIFGATEYTTTIDIWSAGCVLAELLLGQPLFPGESGVDQLVEIIKVLGTPTREEIKCMNPNYTEFKFPQIKAHPWHKIFHKRTPPEAVDLVSRLLQYSPNLRSTAMEAIVHPFFDELRDPNTRLPNGRALPPLFNFKPQELKGASLELLSKLIPDHARKQCSFLAL

SEQ ID NO: 82946 - DNA, 528 bp, Arabidopsis thaliana
  misc_feature (1)..(528): Ceres Seq. ID no. 12668013
  misc_feature (1)..(528): Ortholog of  Ceres SEQ ID NO 14309373 as cited in SEQ ID NO 0
atggagagcgagcctactcgagtgatggtggcggtgaatgaatcgactctcaaaggctatccacacgcgtcgataagtagcaaaaaagcattcgagtggacactgaagaagatcgttcggtccaatacctctggcttcaagcttctcttgctccacgttcaagttcaagacgaagacggttttgatgacatggacagtatatatgcttcccctgatgatttccgacaaatgagggagcgtaacaaggctaaaggacttcaccttcttgagtttttcgttaagaaatgtcatgatattggggttgggtgcgaggcttggatcaggaaaggtgatcccacagaattgatatgccatgaagtgaggcgagtccggccagattttctggttgtgggaagtcgtggtctcggcccattccaaaaggtatttgttggaacagtgagtgaattttgtgtgaagcatgcagaatgcccagtcatcacaatcaaacgcactgctgaagaatctccacaagatccagctgatgactaa

SEQ ID NO: 82947 - protein, 175 aa, Arabidopsis thaliana
  peptide (1)..(175): Ceres Seq. ID no. 12668014
MESEPTRVMVAVNESTLKGYPHASISSKKAFEWTLKKIVRSNTSGFKLLLLHVQVQDEDGFDDMDSIYASPDDFRQMRERNKAKGLHLLEFFVKKCHDIGVGCEAWIRKGDPTELICHEVRRVRPDFLVVGSRGLGPFQKVFVGTVSEFCVKHAECPVITIKRTAEESPQDPADD

SEQ ID NO: 82948 - protein, 167 aa, Arabidopsis thaliana
  peptide (1)..(167): Ceres Seq. ID no. 12668015
MVAVNESTLKGYPHASISSKKAFEWTLKKIVRSNTSGFKLLLLHVQVQDEDGFDDMDSIYASPDDFRQMRERNKAKGLHLLEFFVKKCHDIGVGCEAWIRKGDPTELICHEVRRVRPDFLVVGSRGLGPFQKVFVGTVSEFCVKHAECPVITIKRTAEESPQDPADD

SEQ ID NO: 82949 - protein, 112 aa, Arabidopsis thaliana
  peptide (1)..(112): Ceres Seq. ID no. 12668016
MDSIYASPDDFRQMRERNKAKGLHLLEFFVKKCHDIGVGCEAWIRKGDPTELICHEVRRVRPDFLVVGSRGLGPFQKVFVGTVSEFCVKHAECPVITIKRTAEESPQDPADD

SEQ ID NO: 82950 - DNA, 871 bp, Arabidopsis thaliana
  misc_feature (1)..(871): Ceres Seq. ID no. 12668020
  misc_feature (1)..(871): Ortholog of  Ceres SEQ ID NO 13595569 as cited in SEQ ID NO 56778
  misc_feature (1)..(871): Ortholog of  Ceres SEQ ID NO 12611159 as cited in SEQ ID NO 59821
  misc_feature (1)..(871): Ortholog of  Ceres SEQ ID NO 13661001 as cited in SEQ ID NO 67531
atgagaaagaaagtaagtagtagtggtgacgaaggaaacaatgagtacaagaaaggtttgtggacagtagaagaagacaaaatcctcatggattatgtcaaagctcatggcaaaggtcactggaatcgtattgccaaaaagactggtttaaagagatgtggaaagagttgtagattgaggtggatgaattatctcagccctaatgtgaaaagaggcaatttcaccgagcaagaagaggatcttatcattaggctccacaagttgcttggtaataggtggtctttaattgctaaaagagtgccgggtcgaacggataatcaagtgaagaactattggaacacgcatcttagtaagaaactcggaatcaaagatcagaaaaccaaacagagcaatggtgatattgtttatcaaatcaatctcccgaatcctaccgaaacatcagaagaaacgaaaatctcgaatattgtcgataacaataatatcctcggagatgaaattcaagaagatcatcaaggaagtaactacttgagttcactttgggttcatgaggatgagtttgagcttagcacactcaccaacatgatggactttatagatggacactgtttttgatgtgttttctgcttttgttattttagtattcgtttatgttttgttattttcaaagctgatcaaacactaatacatcaacagtcttagattaaaagttgttgatgtggtagtgtatgattggctaagtctattaattaggtgaactttcttgggttaactctaatgtatatgcttaaaaactctatatgcatcgattantgttttaaaaaaaaaaaaaaaaaaaaaaaaaaaaaaaaaatcgatgtcgactcgagtcggg

SEQ ID NO: 82951 - protein, 203 aa, Arabidopsis thaliana
  peptide (1)..(203): Ceres Seq. ID no. 12668021
MRKKVSSSGDEGNNEYKKGLWTVEEDKILMDYVKAHGKGHWNRIAKKTGLKRCGKSCRLRWMNYLSPNVKRGNFTEQEEDLIIRLHKLLGNRWSLIAKRVPGRTDNQVKNYWNTHLSKKLGIKDQKTKQSNGDIVYQINLPNPTETSEETKISNIVDNNNILGDEIQEDHQGSNYLSSLWVHEDEFELSTLTNMMDFIDGHCF

SEQ ID NO: 82952 - protein, 174 aa, Arabidopsis thaliana
  peptide (1)..(174): Ceres Seq. ID no. 12668022
MDYVKAHGKGHWNRIAKKTGLKRCGKSCRLRWMNYLSPNVKRGNFTEQEEDLIIRLHKLLGNRWSLIAKRVPGRTDNQVKNYWNTHLSKKLGIKDQKTKQSNGDIVYQINLPNPTETSEETKISNIVDNNNILGDEIQEDHQGSNYLSSLWVHEDEFELSTLTNMMDFIDGHCF

SEQ ID NO: 82953 - protein, 142 aa, Arabidopsis thaliana
  peptide (1)..(142): Ceres Seq. ID no. 12668023
MNYLSPNVKRGNFTEQEEDLIIRLHKLLGNRWSLIAKRVPGRTDNQVKNYWNTHLSKKLGIKDQKTKQSNGDIVYQINLPNPTETSEETKISNIVDNNNILGDEIQEDHQGSNYLSSLWVHEDEFELSTLTNMMDFIDGHCF

SEQ ID NO: 82954 - DNA, 1119 bp, Arabidopsis thaliana
  misc_feature (1)..(1119): Ceres Seq. ID no. 12668032
  misc_feature (1)..(1119): Ortholog of  Ceres SEQ ID NO 12610323 as cited in SEQ ID NO 56055
acccaccccacccaggttatggattctctcgctctcgctccccaggtttacagccgcaaggacaaatctctcggcgttcttgtcgccaatttcttgacactgtataatcgtcccgatgttgatctatttgggctcgatgatgccgccgcgaaattaggagttgaacgtcggcgtatttatgatgtggtcaatatattggagagtattgggcttgttgcaagaagtgggaagaatcagtattcgtggaaaggttttggagctgttcctcgtgctctatctgaactcaaagaagagggaatgaaagagaagtttgcgatcgtcccttttgtggccaagtcagagatggtcgtttatgagaaagaaggagaagaatctttcatgttatctcctgatgatcaagagttctcaccatctcccagacctgacaacaggaaggagagaactctctggctacttgcacagaactttgtgaagctgtttttatgctctgatgatgatctggtaacatttgatagcgctacaaaagcattgctgaatgagtctcaggatatgaatatgagaaagaaagttagacgcctttacgacattgcaaatgtgttttcctcaatgaagctaatcgagaagactcatgtcccagagactaagaagccggcatataggtggttgggatctaaaaccatatttgaaaacagattcattgatggttctgcaagcttatgtgatcgtaatgtgcctaaaaagcgggcatttgggaccgaactcacaaacgttaacgcaaagagaaacaaatcaggttgttctaaagaagacagcaagcgtaatggaaatcaaaacacaagcattgttatcaagcaagaacaatgtgatgatgtgaaaccggacgtgaagaattttgcctctggatcatccactcctgcaggcacttctgagagtaacgatatgggaaacaacattaggccaagaggtagacttggagttatcgaagccctttctactctttaccaaccatcatattgcaatcctgagttacttggtctttttgcgcattacaacgagacatttaggtcatatcaagaagagtttggtcgggagaaatgacttaatcatcaggtagattaa

SEQ ID NO: 82955 - protein, 365 aa, Arabidopsis thaliana
  peptide (1)..(365): Ceres Seq. ID no. 12668033
THPTQVMDSLALAPQVYSRKDKSLGVLVANFLTLYNRPDVDLFGLDDAAAKLGVERRRIYDVVNILESIGLVARSGKNQYSWKGFGAVPRALSELKEEGMKEKFAIVPFVAKSEMVVYEKEGEESFMLSPDDQEFSPSPRPDNRKERTLWLLAQNFVKLFLCSDDDLVTFDSATKALLNESQDMNMRKKVRRLYDIANVFSSMKLIEKTHVPETKKPAYRWLGSKTIFENRFIDGSASLCDRNVPKKRAFGTELTNVNAKRNKSGCSKEDSKRNGNQNTSIVIKQEQCDDVKPDVKNFASGSSTPAGTSESNDMGNNIRPRGRLGVIEALSTLYQPSYCNPELLGLFAHYNETFRSYQEEFGREK

SEQ ID NO: 82956 - protein, 359 aa, Arabidopsis thaliana
  peptide (1)..(359): Ceres Seq. ID no. 12668034
MDSLALAPQVYSRKDKSLGVLVANFLTLYNRPDVDLFGLDDAAAKLGVERRRIYDVVNILESIGLVARSGKNQYSWKGFGAVPRALSELKEEGMKEKFAIVPFVAKSEMVVYEKEGEESFMLSPDDQEFSPSPRPDNRKERTLWLLAQNFVKLFLCSDDDLVTFDSATKALLNESQDMNMRKKVRRLYDIANVFSSMKLIEKTHVPETKKPAYRWLGSKTIFENRFIDGSASLCDRNVPKKRAFGTELTNVNAKRNKSGCSKEDSKRNGNQNTSIVIKQEQCDDVKPDVKNFASGSSTPAGTSESNDMGNNIRPRGRLGVIEALSTLYQPSYCNPELLGLFAHYNETFRSYQEEFGREK

SEQ ID NO: 82957 - protein, 266 aa, Arabidopsis thaliana
  peptide (1)..(266): Ceres Seq. ID no. 12668035
MKEKFAIVPFVAKSEMVVYEKEGEESFMLSPDDQEFSPSPRPDNRKERTLWLLAQNFVKLFLCSDDDLVTFDSATKALLNESQDMNMRKKVRRLYDIANVFSSMKLIEKTHVPETKKPAYRWLGSKTIFENRFIDGSASLCDRNVPKKRAFGTELTNVNAKRNKSGCSKEDSKRNGNQNTSIVIKQEQCDDVKPDVKNFASGSSTPAGTSESNDMGNNIRPRGRLGVIEALSTLYQPSYCNPELLGLFAHYNETFRSYQEEFGREK

SEQ ID NO: 82958 - DNA, 984 bp, Arabidopsis thaliana
  misc_feature (1)..(984): Ceres Seq. ID no. 12668036
  misc_feature (1)..(984): Ortholog of  Ceres SEQ ID NO 15227018 as cited in SEQ ID NO 0
atgggactccatccagtctcagaggccaacgcctcaagcccctttggttccctctctgcggctgaattctactcccgccactccgtcacccactcctccgcttacgtcaccaaccccaccggtctcaaactctttacccaatggtggactccactcaaccgtccaccactcggcctcattgctgttgtccacggcttcaccggcgaatccagctggttcctccaactaacatcagtcctcttcgcaaaatccggatacctcacttgcgccatcgaccaccaaggccacggcttctcagacggtttgaccgctcacatcccaaacatcaacctcattgttgacgactgcatttccttctttgacgacttccgtaaacgtcacgcttcctcctttctcccggccttcctctactctgaatcccttggtggcgcaatcgctctgtacattactctccgccagaaacaccaatggaacggtcttatcctcagcggtgcaatgtgctccatcagtcacaaatttaaacctccatggccgttacaacacctcttaaccctagctgctactctcatccccacctggcgcgtcgtcccaactcgcggctccatcgccggcgtctctttcaaggagccatggaaacggaaactcgcctatgctaacccaaacagaaccgtcggtaaaccacgagcagccacggcctatgagctcgtacgagtctgcgaggatcttcaaaacaggtttgaagaagttgaagtcccgttgatgattgtgcacggtagagacgacgtcgtctgcgatccagcctccgtcgaagagctttaccggagatgcagtagcagagacaagacgataaagatttatccagggatgtggcatcagctgattggagagtcagaggagaacgtcgacttggtgttcggtgatgttttggattggattaagacacgatctgaaatctccaccattcatggtggtaccaaagcttaa

SEQ ID NO: 82959 - protein, 327 aa, Arabidopsis thaliana
  peptide (1)..(327): Ceres Seq. ID no. 12668037
MGLHPVSEANASSPFGSLSAAEFYSRHSVTHSSAYVTNPTGLKLFTQWWTPLNRPPLGLIAVVHGFTGESSWFLQLTSVLFAKSGYLTCAIDHQGHGFSDGLTAHIPNINLIVDDCISFFDDFRKRHASSFLPAFLYSESLGGAIALYITLRQKHQWNGLILSGAMCSISHKFKPPWPLQHLLTLAATLIPTWRVVPTRGSIAGVSFKEPWKRKLAYANPNRTVGKPRAATAYELVRVCEDLQNRFEEVEVPLMIVHGRDDVVCDPASVEELYRRCSSRDKTIKIYPGMWHQLIGESEENVDLVFGDVLDWIKTRSEISTIHGGTKA

SEQ ID NO: 82960 - DNA, 1599 bp, Arabidopsis thaliana
  misc_feature (1)..(1599): Ceres Seq. ID no. 12668038
  misc_feature (1)..(1599): Ortholog of  Ceres SEQ ID NO 14301550 as cited in SEQ ID NO 66519
atggaacctcccgtagcttgtgtgcttcctttaggtctgtgttctatgttctctacttccatagctgattcagagcaagtgggatttactcggagtaacattgagaaagatgatgagagtgacattgatcttggttgtagtataagtgatgagcttgtttcagaggatgttggaaagatttcgaagctggtgaaagattgtgggagtgaccggaaggaactgaggaacaagcttgaggaatgtgatgtgaagccatcaaatgaattggtggtggagattctttctcgagttcgtaatgattgggaaactgctttcactttctttgtttgggcagggaagcagcaaggttatgttcgttctgttcgtgagtatcactctatgatctcgattcttggtaaaatgaggaagtttgatacagcttggactttgattgatgagatgagaaagtttagcccttctcttgtgaactcacagacacttttgatcatgattaggaagtattgtgcggtacatgatgttgggaaagccataaacacgttccatgcctacaaaagattcaaacttgaaatggggattgatgattttcagagtttgctctcggctctttgtaggtataagaatgtttcagatgctgggcatttgatcttctgtaacaaggataagtatccgtttgacgccaaaagtttcaacattgttctcaatggatggtgtaacgtgattggtagcccacgggaggctgaaagggtctggatggagatgggaaatgttggagtcaaacatgatgttgtgtcttattcaagcatgatatcttgctattcgaaaggtggtagcttgaataaggttctcaaactttttgataggatgaagaaagagtgtatagagcctgatagaaaagtgtacaacgcggtggttcacgctcttgccaaagctagctttgtctccgaggcgagaaatttaatgaagacaatggaggaggagaaagggattgagcccaatgttgttacttacaactctctcatcaaacctctatgcaaggctagaaaaaccgaagaggctaaacaggttttcgatgagatgctggagaaaggactcttcccaacaatccgtacatatcatgcgtttatgcggattctaagaacaggagaggaggtttttgagctattagctaaaatgagaaagatgggctgtgaaccaactgtggagacatacataatgctgatccgtaagttatgtaggtggcgcgatttcgataatgtgttattgttgtgggatgagatgaaggaaaagaccgttggtccagaccttagctcatacattgtgatgatacatggtctgttcttgaatggtaagatagaagaagcgtatgggtactataaagagatgaaggacaagggtatgagaccaaatgaaaatgttgaagatatgattcaaagctggttttcaggaaaacagtatgcagagcagcggataacagattcgaaaggggaggtcaataaaggagctattgtaaaaaaatctgaaagagaaaagaactttctccagcagcctgaggtgagaaaggttgttagagagcatggatattcgttttgggatgaatag

SEQ ID NO: 82961 - protein, 532 aa, Arabidopsis thaliana
  peptide (1)..(532): Ceres Seq. ID no. 12668039
MEPPVACVLPLGLCSMFSTSIADSEQVGFTRSNIEKDDESDIDLGCSISDELVSEDVGKISKLVKDCGSDRKELRNKLEECDVKPSNELVVEILSRVRNDWETAFTFFVWAGKQQGYVRSVREYHSMISILGKMRKFDTAWTLIDEMRKFSPSLVNSQTLLIMIRKYCAVHDVGKAINTFHAYKRFKLEMGIDDFQSLLSALCRYKNVSDAGHLIFCNKDKYPFDAKSFNIVLNGWCNVIGSPREAERVWMEMGNVGVKHDVVSYSSMISCYSKGGSLNKVLKLFDRMKKECIEPDRKVYNAVVHALAKASFVSEARNLMKTMEEEKGIEPNVVTYNSLIKPLCKARKTEEAKQVFDEMLEKGLFPTIRTYHAFMRILRTGEEVFELLAKMRKMGCEPTVETYIMLIRKLCRWRDFDNVLLLWDEMKEKTVGPDLSSYIVMIHGLFLNGKIEEAYGYYKEMKDKGMRPNENVEDMIQSWFSGKQYAEQRITDSKGEVNKGAIVKKSEREKNFLQQPEVRKVVREHGYSFWDE

SEQ ID NO: 82962 - protein, 517 aa, Arabidopsis thaliana
  peptide (1)..(517): Ceres Seq. ID no. 12668040
MFSTSIADSEQVGFTRSNIEKDDESDIDLGCSISDELVSEDVGKISKLVKDCGSDRKELRNKLEECDVKPSNELVVEILSRVRNDWETAFTFFVWAGKQQGYVRSVREYHSMISILGKMRKFDTAWTLIDEMRKFSPSLVNSQTLLIMIRKYCAVHDVGKAINTFHAYKRFKLEMGIDDFQSLLSALCRYKNVSDAGHLIFCNKDKYPFDAKSFNIVLNGWCNVIGSPREAERVWMEMGNVGVKHDVVSYSSMISCYSKGGSLNKVLKLFDRMKKECIEPDRKVYNAVVHALAKASFVSEARNLMKTMEEEKGIEPNVVTYNSLIKPLCKARKTEEAKQVFDEMLEKGLFPTIRTYHAFMRILRTGEEVFELLAKMRKMGCEPTVETYIMLIRKLCRWRDFDNVLLLWDEMKEKTVGPDLSSYIVMIHGLFLNGKIEEAYGYYKEMKDKGMRPNENVEDMIQSWFSGKQYAEQRITDSKGEVNKGAIVKKSEREKNFLQQPEVRKVVREHGYSFWDE

SEQ ID NO: 82963 - protein, 406 aa, Arabidopsis thaliana
  peptide (1)..(406): Ceres Seq. ID no. 12668041
MISILGKMRKFDTAWTLIDEMRKFSPSLVNSQTLLIMIRKYCAVHDVGKAINTFHAYKRFKLEMGIDDFQSLLSALCRYKNVSDAGHLIFCNKDKYPFDAKSFNIVLNGWCNVIGSPREAERVWMEMGNVGVKHDVVSYSSMISCYSKGGSLNKVLKLFDRMKKECIEPDRKVYNAVVHALAKASFVSEARNLMKTMEEEKGIEPNVVTYNSLIKPLCKARKTEEAKQVFDEMLEKGLFPTIRTYHAFMRILRTGEEVFELLAKMRKMGCEPTVETYIMLIRKLCRWRDFDNVLLLWDEMKEKTVGPDLSSYIVMIHGLFLNGKIEEAYGYYKEMKDKGMRPNENVEDMIQSWFSGKQYAEQRITDSKGEVNKGAIVKKSEREKNFLQQPEVRKVVREHGYSFWDE

SEQ ID NO: 82964 - DNA, 882 bp, Arabidopsis thaliana
  misc_feature (1)..(882): Ceres Seq. ID no. 12668058
  misc_feature (1)..(882): Ortholog of  Ceres SEQ ID NO 13504028 as cited in SEQ ID NO 56107
atggggtttgagatgaaaccagagaaagaggttttggaattgatttctagtaagaatcaatgcaagtctaatcccaattctgtgaagaagaagaacaaaaacaagaataagaagatgatgatgacgtggcgacggaagaagattgattccccggcggatgggatcacggcggtgcggcggttgtttaatacttgcaaggaagtgttctctaatggtggtcctggtgttattccttctgaagataaaatccaacagctacgagagattcttgacgatatgaaaccagaggatgtcggtttaactccgaccatgccgtatttccgaccaaactccggagtcgaagctcggtcttcgccaccaataacgtatctgcatctacaccagtgtgatcaattctcgattgggattttctgtttgccaccttctggtgttattcctcttcataaccatccagggatgacagtttttagtaagcttctctttggtacaatgcacatcaagtcatatgattgggtggttgatgctccaatgagagattcaaaaaccaggctagcgaaattgaaggtggattcaacattcaccgcgccatgtaacgcctcgattttgtacccggaagatggcgggaacatgcatcggttcacagctataacagcatgtgcggtgctagacgtgctaggacctccttactgcaatccagaaggcagacattgcacttatttcctagaattccctttagacaaactctcatcagaggacgacgacgttttgagcagtgaagaggagaaggaaggttatgcatggctgcaagaaagggatgataatccagaagatcatactaacgtagttggagcgttatacagaggcccaaaggttgaagattga

SEQ ID NO: 82965 - protein, 293 aa, Arabidopsis thaliana
  peptide (1)..(293): Ceres Seq. ID no. 12668059
MGFEMKPEKEVLELISSKNQCKSNPNSVKKKNKNKNKKMMMTWRRKKIDSPADGITAVRRLFNTCKEVFSNGGPGVIPSEDKIQQLREILDDMKPEDVGLTPTMPYFRPNSGVEARSSPPITYLHLHQCDQFSIGIFCLPPSGVIPLHNHPGMTVFSKLLFGTMHIKSYDWVVDAPMRDSKTRLAKLKVDSTFTAPCNASILYPEDGGNMHRFTAITACAVLDVLGPPYCNPEGRHCTYFLEFPLDKLSSEDDDVLSSEEEKEGYAWLQERDDNPEDHTNVVGALYRGPKVED

SEQ ID NO: 82966 - protein, 289 aa, Arabidopsis thaliana
  peptide (1)..(289): Ceres Seq. ID no. 12668060
MKPEKEVLELISSKNQCKSNPNSVKKKNKNKNKKMMMTWRRKKIDSPADGITAVRRLFNTCKEVFSNGGPGVIPSEDKIQQLREILDDMKPEDVGLTPTMPYFRPNSGVEARSSPPITYLHLHQCDQFSIGIFCLPPSGVIPLHNHPGMTVFSKLLFGTMHIKSYDWVVDAPMRDSKTRLAKLKVDSTFTAPCNASILYPEDGGNMHRFTAITACAVLDVLGPPYCNPEGRHCTYFLEFPLDKLSSEDDDVLSSEEEKEGYAWLQERDDNPEDHTNVVGALYRGPKVED

SEQ ID NO: 82967 - protein, 255 aa, Arabidopsis thaliana
  peptide (1)..(255): Ceres Seq. ID no. 12668061
MMMTWRRKKIDSPADGITAVRRLFNTCKEVFSNGGPGVIPSEDKIQQLREILDDMKPEDVGLTPTMPYFRPNSGVEARSSPPITYLHLHQCDQFSIGIFCLPPSGVIPLHNHPGMTVFSKLLFGTMHIKSYDWVVDAPMRDSKTRLAKLKVDSTFTAPCNASILYPEDGGNMHRFTAITACAVLDVLGPPYCNPEGRHCTYFLEFPLDKLSSEDDDVLSSEEEKEGYAWLQERDDNPEDHTNVVGALYRGPKVED

SEQ ID NO: 82968 - DNA, 1182 bp, Arabidopsis thaliana
  misc_feature (1)..(1182): Ceres Seq. ID no. 12668070
  misc_feature (1)..(1182): Ortholog of  Ceres SEQ ID NO 13532807 as cited in SEQ ID NO 53012
  misc_feature (1)..(1182): Ortholog of  Ceres SEQ ID NO 13663060 as cited in SEQ ID NO 60964
  misc_feature (1)..(1182): Ortholog of  Ceres SEQ ID NO 13598532 as cited in SEQ ID NO 65204
  misc_feature (1)..(1182): Ortholog of  Ceres SEQ ID NO 13656849 as cited in SEQ ID NO 65764
  misc_feature (1)..(1182): Ortholog of  Ceres SEQ ID NO 13500573 as cited in SEQ ID NO 67431
  misc_feature (1)..(1182): Ortholog of  Ceres SEQ ID NO 13656501 as cited in SEQ ID NO 69206
atggagccaactaacgatgctgagacattggaaactcaaggagaggttacaaccgctatttggccgtcatctcaaatcctcaagacgactatcgatattccggggactctcagccatgacggcagatacatccagtacaatctatttgggcatatctttgaactccccgcaaagtataagccaccgattaggcctattggcagaggtgcttgtggcatcgtttgttcggctgtggactccgagaccaatgagaaggtagcaataaagaaaataacgcaagtatttgataacactatcgaagcaaagagaactcttcgtgaaatcaagcttcttcgtcacttcgatcatgagaatattgttgcaatcagagacgtaatcttgcctcctcagagagattcattcgaagatgtttacattgtgaatgaattgatggagtttgacctttatcgaaccttaaaatcagatcaagaactaaccaaagatcatggcatgtatttcatgtaccaaatcctgcgcggattaaagtacattcattcagccaatgtgctacacagagatctaaaaccaagcaatctcctcttgagtacacaatgtgacttaaagatttgtgatttcgggctcgctcgtgcaactcctgagagtaatttaatgactgagtatgttgtcacaagatggtaccgtgcacctgagcttctgttgggctcttctgactataccgcagcaatagatgtttggtctgttggctgtattttcatggaaataatgaaccgtgaaccgctcttcccggggaaagatcaagttaatcagcttcgtttgcttctggagctcattggcactccatctgaagaagagcttggatcgttgagtgaatacgctaagcgatacataaggcagcttcctacgcttcctcgccaatctttcactgagaaattcccgaacgtgcctcccttagcaatagacttggtggagaagatgctaacatttgatcctaaacagagaatctcagttaaagaagcacttgctcatccataccttagctcgtttcacgacattaccgatgaaccagagtgctcagagcccttcaatttcgatttagatgaacatccattctctgaggagcagtttagagagttaatctactgtgaagccctagctttcaaccctgaaaccagcaatgattga

SEQ ID NO: 82969 - protein, 393 aa, Arabidopsis thaliana
  peptide (1)..(393): Ceres Seq. ID no. 12668071
MEPTNDAETLETQGEVTTAIWPSSQILKTTIDIPGTLSHDGRYIQYNLFGHIFELPAKYKPPIRPIGRGACGIVCSAVDSETNEKVAIKKITQVFDNTIEAKRTLREIKLLRHFDHENIVAIRDVILPPQRDSFEDVYIVNELMEFDLYRTLKSDQELTKDHGMYFMYQILRGLKYIHSANVLHRDLKPSNLLLSTQCDLKICDFGLARATPESNLMTEYVVTRWYRAPELLLGSSDYTAAIDVWSVGCIFMEIMNREPLFPGKDQVNQLRLLLELIGTPSEEELGSLSEYAKRYIRQLPTLPRQSFTEKFPNVPPLAIDLVEKMLTFDPKQRISVKEALAHPYLSSFHDITDEPECSEPFNFDLDEHPFSEEQFRELIYCEALAFNPETSND

SEQ ID NO: 82970 - protein, 250 aa, Arabidopsis thaliana
  peptide (1)..(250): Ceres Seq. ID no. 12668072
MEFDLYRTLKSDQELTKDHGMYFMYQILRGLKYIHSANVLHRDLKPSNLLLSTQCDLKICDFGLARATPESNLMTEYVVTRWYRAPELLLGSSDYTAAIDVWSVGCIFMEIMNREPLFPGKDQVNQLRLLLELIGTPSEEELGSLSEYAKRYIRQLPTLPRQSFTEKFPNVPPLAIDLVEKMLTFDPKQRISVKEALAHPYLSSFHDITDEPECSEPFNFDLDEHPFSEEQFRELIYCEALAFNPETSND

SEQ ID NO: 82971 - protein, 230 aa, Arabidopsis thaliana
  peptide (1)..(230): Ceres Seq. ID no. 12668073
MYFMYQILRGLKYIHSANVLHRDLKPSNLLLSTQCDLKICDFGLARATPESNLMTEYVVTRWYRAPELLLGSSDYTAAIDVWSVGCIFMEIMNREPLFPGKDQVNQLRLLLELIGTPSEEELGSLSEYAKRYIRQLPTLPRQSFTEKFPNVPPLAIDLVEKMLTFDPKQRISVKEALAHPYLSSFHDITDEPECSEPFNFDLDEHPFSEEQFRELIYCEALAFNPETSND

SEQ ID NO: 82972 - DNA, 1431 bp, Arabidopsis thaliana
  misc_feature (1)..(1431): Ceres Seq. ID no. 12668078
  misc_feature (1)..(1431): Ortholog of  Ceres SEQ ID NO 15176822 as cited in SEQ ID NO 1160
  misc_feature (1)..(1431): Ortholog of  Ceres SEQ ID NO 13593889 as cited in SEQ ID NO 53305
atggacaacattgccgcgcagttgaagcgtgggatatcgagacaattctcgacaggatcaatgagacgaacattaagccgacaattcacgcgccaaaattctctcgatccacggcgtaacaacatgagattcagcttcggtcgtcaatcttcgcttgatccgatcagacgtagtcctgagtctcttagctgcgagccgcatatgtctgtccccgagaatcttgattcgacgatgcagcttctctttatggcgagtaaaggtgatgttaatggcgttgaggagctgcttaatgaaggaatagatgtgaatagcattgatcttgatggtcgtactgctcttcacattgcttcctgtgaaggtcattatgatgttgttaaggttcttcttagccggagagctaatatcgatgctcgtgatcgttggggtagtacggcggctgttgatgcaaagtattatgggaatgttgaagtttataatctcttgaaagctcgaggcgctaaagctccgaaaactagaaagactccaatgacggtagggaatccaaaagaagttcctgagtatgagcttaatccactcgagctgcaagtccgaaaagttgatggcatttcaaagggaacttatcaagttgctaaatggaatggcacgcgagtctcagtaaaaatattcgataaagatagctattcagatcctgaacgagtaaatgctttcacaaacgaattgactttgctagcaaaagctcggcatccaaatattgttcaatttgttggagccgtcactcaaaatctaccgatgatgattgtagttgagtgtaatccaaaaggtgatctaagtgtctatcttcaaaagaaaggtcgtctttctccttcaaaagctctgagatttgctcttgatattgctagaggaatgaactacctccatgaatgtaaaccagatccgatcatccactgcgagttaatgccaaaaaatattttgctagatagaggagggcaattgaagatctctggttttggtttgataaagttgtcaaagattggagaagacagtgcaaaagtagtgaaccacgaagctcaaatcgataagtcaaattactatatagcacccgaaatttacaaagatgaagtcttcgataaaagggctgatgtgcattcgtttggtgtcattttgtacgagttgaccgagggagtatctttattccatcctaaaccacctgaagaggttgcagaatcgatttgtatagaaggtaaaagaccaacaatcagaacaaagtcaaagagttaccctccggaattgaaagagttgattgaggaatgctggcatccagaaatcagtgtgaggccaatattctctgagattattattcggctcgacaagatagttacaaactgttccaagcagggttggtggaaagacacatttaagttcccttggtaa

SEQ ID NO: 82973 - protein, 476 aa, Arabidopsis thaliana
  peptide (1)..(476): Ceres Seq. ID no. 12668079
MDNIAAQLKRGISRQFSTGSMRRTLSRQFTRQNSLDPRRNNMRFSFGRQSSLDPIRRSPESLSCEPHMSVPENLDSTMQLLFMASKGDVNGVEELLNEGIDVNSIDLDGRTALHIASCEGHYDVVKVLLSRRANIDARDRWGSTAAVDAKYYGNVEVYNLLKARGAKAPKTRKTPMTVGNPKEVPEYELNPLELQVRKVDGISKGTYQVAKWNGTRVSVKIFDKDSYSDPERVNAFTNELTLLAKARHPNIVQFVGAVTQNLPMMIVVECNPKGDLSVYLQKKGRLSPSKALRFALDIARGMNYLHECKPDPIIHCELMPKNILLDRGGQLKISGFGLIKLSKIGEDSAKVVNHEAQIDKSNYYIAPEIYKDEVFDKRADVHSFGVILYELTEGVSLFHPKPPEEVAESICIEGKRPTIRTKSKSYPPELKELIEECWHPEISVRPIFSEIIIRLDKIVTNCSKQGWWKDTFKFPW

SEQ ID NO: 82974 - protein, 456 aa, Arabidopsis thaliana
  peptide (1)..(456): Ceres Seq. ID no. 12668080
MRRTLSRQFTRQNSLDPRRNNMRFSFGRQSSLDPIRRSPESLSCEPHMSVPENLDSTMQLLFMASKGDVNGVEELLNEGIDVNSIDLDGRTALHIASCEGHYDVVKVLLSRRANIDARDRWGSTAAVDAKYYGNVEVYNLLKARGAKAPKTRKTPMTVGNPKEVPEYELNPLELQVRKVDGISKGTYQVAKWNGTRVSVKIFDKDSYSDPERVNAFTNELTLLAKARHPNIVQFVGAVTQNLPMMIVVECNPKGDLSVYLQKKGRLSPSKALRFALDIARGMNYLHECKPDPIIHCELMPKNILLDRGGQLKISGFGLIKLSKIGEDSAKVVNHEAQIDKSNYYIAPEIYKDEVFDKRADVHSFGVILYELTEGVSLFHPKPPEEVAESICIEGKRPTIRTKSKSYPPELKELIEECWHPEISVRPIFSEIIIRLDKIVTNCSKQGWWKDTFKFPW

SEQ ID NO: 82975 - protein, 435 aa, Arabidopsis thaliana
  peptide (1)..(435): Ceres Seq. ID no. 12668081
MRFSFGRQSSLDPIRRSPESLSCEPHMSVPENLDSTMQLLFMASKGDVNGVEELLNEGIDVNSIDLDGRTALHIASCEGHYDVVKVLLSRRANIDARDRWGSTAAVDAKYYGNVEVYNLLKARGAKAPKTRKTPMTVGNPKEVPEYELNPLELQVRKVDGISKGTYQVAKWNGTRVSVKIFDKDSYSDPERVNAFTNELTLLAKARHPNIVQFVGAVTQNLPMMIVVECNPKGDLSVYLQKKGRLSPSKALRFALDIARGMNYLHECKPDPIIHCELMPKNILLDRGGQLKISGFGLIKLSKIGEDSAKVVNHEAQIDKSNYYIAPEIYKDEVFDKRADVHSFGVILYELTEGVSLFHPKPPEEVAESICIEGKRPTIRTKSKSYPPELKELIEECWHPEISVRPIFSEIIIRLDKIVTNCSKQGWWKDTFKFPW

SEQ ID NO: 82976 - DNA, 1335 bp, Arabidopsis thaliana
  misc_feature (1)..(1335): Ceres Seq. ID no. 12668082
  misc_feature (1)..(1335): Ortholog of  Ceres SEQ ID NO 13654409 as cited in SEQ ID NO 68534
atggatgaagagtacgaggttattgttctcggcaccggtctcaaggagtgtatcctcagcggtctcctttccgtcgatggtgtcaaggtgcttcacatggacaggaatgactactatggtggagaatcaacttcccttaatctcaatcagctttggaagaagttcaggggagaagagaaggctcctgagcatttaggcgctagccgggattacaatgttgacatgatgcctaagtttatgatgggaaatggcaagcttgttcgtacccttattcatacagatgttacaaagtatttgtccttcaaagctgttgatggaagctatgttttcgtcaaaggaaaggttcaaaaggtgccagctactcctatggaggccctgaaatcttctctcatgggcatatttgagaaacgtcgagccggcaagtttttcagttttgttcaagaatacgatgagaaggacccaaaaacacacgatggaatggatttgaccagagttacaacaaaggaactgattgcgaaatatggtcttgatggcaacactattgactttattggtcacgcagtggcacttcacacgaatgaccaacatctcgaccaacccgcctttgatactgtaatgagaatgaagctctatgcggaatctcttgcacgtttccaaggaacatctccatatatttatcctctctatgggttgggagaactaccccaggcatttgcacgacttagtgctgtctatggtggcacatatatgttgaacaaacctgagtgcaaggtagagtttgacgagggaggtaaggttattggtgtaacatctgagggagagactgctaaatgcaaaaagattgtgtgtgacccttcatacctgccgaacaaggttaggaagattggcagggttgctcgggccatcgccattatgagccacccgattccgaacaccaatgattctcactcagtgcaggtcatcataccccagaaacagttggcccgcaaatcggatatgtatgtcttctgttgttcgtactcccacaacgttgctcccaagggaaaattcattgcatttgtgtctacagatgcagagactgataaccctcaaaccgaactaaagcctggaactgatcttttgggtcctgttgatgagatattcttcgacatgtatgatagatacgagcctgtcaacgagccagagttggacaactgctttatttcaacgagctatgatgctacaacacactttgagacaactgttgcggatgtgttgaacatgtataccctaatcaccggaaagcaactggacctaagtgttgacctgagtgccgcaagtgctgcagaggaatga

SEQ ID NO: 82977 - protein, 444 aa, Arabidopsis thaliana; identical to SEQ ID NO: 26953
  peptide (1)..(444): Ceres Seq. ID no. 12668083

SEQ ID NO: 82978 - protein, 412 aa, Arabidopsis thaliana; identical to SEQ ID NO: 26954
  peptide (1)..(412): Ceres Seq. ID no. 12668084

SEQ ID NO: 82979 - protein, 370 aa, Arabidopsis thaliana; identical to SEQ ID NO: 26955
  peptide (1)..(370): Ceres Seq. ID no. 12668085

SEQ ID NO: 82980 - DNA, 1747 bp, Arabidopsis thaliana
  misc_feature (1)..(1747): Ceres Seq. ID no. 12668112
  misc_feature (1)..(1747): Ortholog of  Ceres SEQ ID NO 13600220 as cited in SEQ ID NO 0
ataaaaacttaattagtttttacagaagaaaagaaaacaatgagaggtaaatttctaagtttactgttgctcattactttggcctgcattggagtttccgccaagaagcattccacaaggcctagattaagaagaaatgatttcccacaagatttcgtttttggatctgctacttctgcttatcagtgtgaaggagctgcacatgaagatggtagaggtccaagtatctgggactccttctctgaaaaattcccagaaaagataatggatggtagtaatgggtccattgcagatgattcttacaatctttacaaggaagatgtgaatttgctgcatcaaattggcttcgatgcttaccgattttcgatctcatggtcacggattttgcctcgtgggactctaaagggaggaatcaaccaggctggaattgaatattataacaacttgattaatcaacttatatctaaaggagtgaagccatttgtcacactctttcactgggacttaccagatgcactcgaaaatgcttacggtggcctccttggagatgaatttgtgaacgatttccgagactatgcagaactttgtttccagaagtttggagatagagtgaagcagtggacgacactaaacgagccatatacaatggtacatgaaggttatataacaggtcaaaaggcacctggaagatgttccaatttctataaacctgattgcttaggtggcgatgcagccacggagccttacatcgtcggccataacctcctccttgctcatggagttgccgtaaaagtatatagagaaaagtaccaggcaactcagaaaggtgaaattggtattgccttaaacacagcatggcactacccttattcagattcatatgctgaccggttagctgcgactcgagcgactgccttcaccttcgactacttcatggagccaatcgtgtacggtagatatccaattgaaatggtcagccacgttaaagacggtcgtcttcctaccttcacaccagaagagtccgaaatgctcaaaggatcatatgatttcataggcgttaactattactcatctctttacgcaaaagacgtgccgtgtgcaactgaaaacatcaccatgaccaccgattcttgcgtcagcctcgtaggtgaacgaaatggagtgcctatcggtccagcggctggatcggattggcttttgatatatcccaagggtattcgtgatctcctactacatgcaaaattcagatacaatgatcccgtcttgtacattacagagaatggagtggatgaagcaaatattggcaaaatatttcttaacgacgatttgagaattgattactatgctcatcacctcaagatggttagcgatgctatctcgatcggggtgaatgtgaagggatatttcgcgtggtcattgatggataatttcgagtggtcggaaggatacacggtccggttcgggctagtgtttgtggactttgaagatggacgtaagaggtatctgaagaaatcagctaagtggtttaggagattgttgaagggagcgcatggtgggacgaatgagcaggtggctgttatttaataaaccacgagtcattggtcaatttagtctactgtttcttttgctctatgtacagaaagaaaataaactttccaaaataagaggtggctttgtttggactttggatgttactatatatattggtaattcttggcgtttgttagtttccaaaccaaacattaat

SEQ ID NO: 82981 - protein, 514 aa, Arabidopsis thaliana
  peptide (1)..(514): Ceres Seq. ID no. 12668113
MRGKFLSLLLLITLACIGVSAKKHSTRPRLRRNDFPQDFVFGSATSAYQCEGAAHEDGRGPSIWDSFSEKFPEKIMDGSNGSIADDSYNLYKEDVNLLHQIGFDAYRFSISWSRILPRGTLKGGINQAGIEYYNNLINQLISKGVKPFVTLFHWDLPDALENAYGGLLGDEFVNDFRDYAELCFQKFGDRVKQWTTLNEPYTMVHEGYITGQKAPGRCSNFYKPDCLGGDAATEPYIVGHNLLLAHGVAVKVYREKYQATQKGEIGIALNTAWHYPYSDSYADRLAATRATAFTFDYFMEPIVYGRYPIEMVSHVKDGRLPTFTPEESEMLKGSYDFIGVNYYSSLYAKDVPCATENITMTTDSCVSLVGERNGVPIGPAAGSDWLLIYPKGIRDLLLHAKFRYNDPVLYITENGVDEANIGKIFLNDDLRIDYYAHHLKMVSDAISIGVNVKGYFAWSLMDNFEWSEGYTVRFGLVFVDFEDGRKRYLKKSAKWFRRLLKGAHGGTNEQVAVI

SEQ ID NO: 82982 - protein, 439 aa, Arabidopsis thaliana
  peptide (1)..(439): Ceres Seq. ID no. 12668114
MDGSNGSIADDSYNLYKEDVNLLHQIGFDAYRFSISWSRILPRGTLKGGINQAGIEYYNNLINQLISKGVKPFVTLFHWDLPDALENAYGGLLGDEFVNDFRDYAELCFQKFGDRVKQWTTLNEPYTMVHEGYITGQKAPGRCSNFYKPDCLGGDAATEPYIVGHNLLLAHGVAVKVYREKYQATQKGEIGIALNTAWHYPYSDSYADRLAATRATAFTFDYFMEPIVYGRYPIEMVSHVKDGRLPTFTPEESEMLKGSYDFIGVNYYSSLYAKDVPCATENITMTTDSCVSLVGERNGVPIGPAAGSDWLLIYPKGIRDLLLHAKFRYNDPVLYITENGVDEANIGKIFLNDDLRIDYYAHHLKMVSDAISIGVNVKGYFAWSLMDNFEWSEGYTVRFGLVFVDFEDGRKRYLKKSAKWFRRLLKGAHGGTNEQVAVI

SEQ ID NO: 82983 - protein, 312 aa, Arabidopsis thaliana
  peptide (1)..(312): Ceres Seq. ID no. 12668115
MVHEGYITGQKAPGRCSNFYKPDCLGGDAATEPYIVGHNLLLAHGVAVKVYREKYQATQKGEIGIALNTAWHYPYSDSYADRLAATRATAFTFDYFMEPIVYGRYPIEMVSHVKDGRLPTFTPEESEMLKGSYDFIGVNYYSSLYAKDVPCATENITMTTDSCVSLVGERNGVPIGPAAGSDWLLIYPKGIRDLLLHAKFRYNDPVLYITENGVDEANIGKIFLNDDLRIDYYAHHLKMVSDAISIGVNVKGYFAWSLMDNFEWSEGYTVRFGLVFVDFEDGRKRYLKKSAKWFRRLLKGAHGGTNEQVAVI

SEQ ID NO: 82984 - DNA, 1872 bp, Arabidopsis thaliana
  misc_feature (1)..(1872): Ceres Seq. ID no. 12668116
  misc_feature (1)..(1872): Ortholog of  Ceres SEQ ID NO 13600220 as cited in SEQ ID NO 0
aaaaaaaaaagagagagagagagagagaaaaatggctaagggatcgtggttcttcattatcctttttatcatctcaatgttagaaaatatgatcaattctctagaattagatcggcatagttttcctgatgatttcatctttgggacagctgcctcggcgtttcagtacgaaggtgcaacaagtgaaggtggcaagtctccaactatatgggatcacttcagcctcacgtatccagaaaggaccaaaatgcataatgcagatgtagcaattgatttttatcatcgttacaaggatgacataaaattgatgaaggagctaaacatggacgctttccgattttcaatctcgtggtcaagattaatacccagtggaaagctaaaggatggagtaaacaaagaaggtgtacaattctacaaggatctcatagacgaacttcttgctaatgacatacaaccttcgatgacgctctatcattgggaccacccacaatctttggaggacgaatatggtggctttctaagccctaaaatcgtagaagattttcgagattttgcaagaatttgttttgaagagtttggagataaagttaagatgtggacaacaatcaacgaaccttatataatgactgttgcgggttatgatcaaggtaacaaggcggctggacgatgctcaaaatgggtaaacgaaaagtgtcaggctggagattcgagtaccgagccttacattgtttcacatcacactcttcttgcccatgccgctgcagtggaagaatttcgaaaatgtgaaaaaacttcgcatgatggccaaattgggatagtactatcaccaagatggttcgagccttatcattccgattcaactgacgataaagaagcagctgaacgagctcttgcctttgaaattggatggcatcttgatccagtcattcacggagattatccagagattgtaaaaaagtacgcgggaaataaattaccttcatttactgttgaacaatcaaagatgttacaaaattcatcagatttcgttggaattaattactacacggctcgcttcgctgctcatcttcctcacatagaccctgaaaaacctcgtttcaaaactgaccaccatgtggaatggaaactgactaatcacagtggtcacatcatcggacctggggaagaaaggggcttcttattttcacacccggaaggcttacgaaaagttcttaactatattaaagagagatacaataacatgccagtctacatcaaagaaaatggaattaatgacaacgacgacggtacaaaaccaagagaagaaattgtgaaggacacatttaggattgaataccataagacacatttcgaagaacttcacaaagctatagtggaagatgggtgtgacgtaagaggatattacgcatggtcattgatggacaattttgaatgggagcatggatacactgcaagatttggtctatactatgttgattttgtcaatggtctcaaacgttatccaaaagattcggtcaaatggtttaagcggttccttaagaaatcggtcgtcggagagagtaacaaagaggaggtagaggagatgtcacgcgcggaagggaataagacttttaagggtttcgaagaatcggcgggtttctttgcatctttcatggcaatgaaccaatcgaggagagatgaggagaataatcgttgctcctttgattttcctcatactcattttggtgttttgcaaggcatagagaacccatcttcattttattgatttcaaatcccttatgtttttaaattccttatggttggacatgtagttaattagaatttagctcatgttaatatatgaacattttcatggtaatattttcttcttgg

SEQ ID NO: 82985 - protein, 587 aa, Arabidopsis thaliana
  peptide (1)..(587): Ceres Seq. ID no. 12668117
KKKERERERKMAKGSWFFIILFIISMLENMINSLELDRHSFPDDFIFGTAASAFQYEGATSEGGKSPTIWDHFSLTYPERTKMHNADVAIDFYHRYKDDIKLMKELNMDAFRFSISWSRLIPSGKLKDGVNKEGVQFYKDLIDELLANDIQPSMTLYHWDHPQSLEDEYGGFLSPKIVEDFRDFARICFEEFGDKVKMWTTINEPYIMTVAGYDQGNKAAGRCSKWVNEKCQAGDSSTEPYIVSHHTLLAHAAAVEEFRKCEKTSHDGQIGIVLSPRWFEPYHSDSTDDKEAAERALAFEIGWHLDPVIHGDYPEIVKKYAGNKLPSFTVEQSKMLQNSSDFVGINYYTARFAAHLPHIDPEKPRFKTDHHVEWKLTNHSGHIIGPGEERGFLFSHPEGLRKVLNYIKERYNNMPVYIKENGINDNDDGTKPREEIVKDTFRIEYHKTHFEELHKAIVEDGCDVRGYYAWSLMDNFEWEHGYTARFGLYYVDFVNGLKRYPKDSVKWFKRFLKKSVVGESNKEEVEEMSRAEGNKTFKGFEESAGFFASFMAMNQSRRDEENNRCSFDFPHTHFGVLQGIENPSSFY

SEQ ID NO: 82986 - protein, 577 aa, Arabidopsis thaliana
  peptide (1)..(577): Ceres Seq. ID no. 12668118
MAKGSWFFIILFIISMLENMINSLELDRHSFPDDFIFGTAASAFQYEGATSEGGKSPTIWDHFSLTYPERTKMHNADVAIDFYHRYKDDIKLMKELNMDAFRFSISWSRLIPSGKLKDGVNKEGVQFYKDLIDELLANDIQPSMTLYHWDHPQSLEDEYGGFLSPKIVEDFRDFARICFEEFGDKVKMWTTINEPYIMTVAGYDQGNKAAGRCSKWVNEKCQAGDSSTEPYIVSHHTLLAHAAAVEEFRKCEKTSHDGQIGIVLSPRWFEPYHSDSTDDKEAAERALAFEIGWHLDPVIHGDYPEIVKKYAGNKLPSFTVEQSKMLQNSSDFVGINYYTARFAAHLPHIDPEKPRFKTDHHVEWKLTNHSGHIIGPGEERGFLFSHPEGLRKVLNYIKERYNNMPVYIKENGINDNDDGTKPREEIVKDTFRIEYHKTHFEELHKAIVEDGCDVRGYYAWSLMDNFEWEHGYTARFGLYYVDFVNGLKRYPKDSVKWFKRFLKKSVVGESNKEEVEEMSRAEGNKTFKGFEESAGFFASFMAMNQSRRDEENNRCSFDFPHTHFGVLQGIENPSSFY

SEQ ID NO: 82987 - protein, 562 aa, Arabidopsis thaliana
  peptide (1)..(562): Ceres Seq. ID no. 12668119
MLENMINSLELDRHSFPDDFIFGTAASAFQYEGATSEGGKSPTIWDHFSLTYPERTKMHNADVAIDFYHRYKDDIKLMKELNMDAFRFSISWSRLIPSGKLKDGVNKEGVQFYKDLIDELLANDIQPSMTLYHWDHPQSLEDEYGGFLSPKIVEDFRDFARICFEEFGDKVKMWTTINEPYIMTVAGYDQGNKAAGRCSKWVNEKCQAGDSSTEPYIVSHHTLLAHAAAVEEFRKCEKTSHDGQIGIVLSPRWFEPYHSDSTDDKEAAERALAFEIGWHLDPVIHGDYPEIVKKYAGNKLPSFTVEQSKMLQNSSDFVGINYYTARFAAHLPHIDPEKPRFKTDHHVEWKLTNHSGHIIGPGEERGFLFSHPEGLRKVLNYIKERYNNMPVYIKENGINDNDDGTKPREEIVKDTFRIEYHKTHFEELHKAIVEDGCDVRGYYAWSLMDNFEWEHGYTARFGLYYVDFVNGLKRYPKDSVKWFKRFLKKSVVGESNKEEVEEMSRAEGNKTFKGFEESAGFFASFMAMNQSRRDEENNRCSFDFPHTHFGVLQGIENPSSFY

SEQ ID NO: 82988 - DNA, 4473 bp, Arabidopsis thaliana
  misc_feature (1)..(4473): Ceres Seq. ID no. 12668120
  misc_feature (1)..(4473): Ortholog of  Ceres SEQ ID NO 13660487 as cited in SEQ ID NO 60849
atgttcaagccctttggtttcgcagcagaaactggttctcatctcctgacgacgcaatggttgcaactaggaaactcactttgcttgaaggaacgtataagcatcgctatgcaagtgactttcctcgctttctttcttattcatttggcacttaaatggtttggtgtagtaagaaacagaggatctaatgatgtagaagaagacttgaagaagcagagcataactgtgaagcagagcttctcttacaacatatctcttctctgctctgtttctatcttagggactcattgctttatcttgcttttgctgtttcgagacagcgtggtctcacggtgtgattcctctgtttctgtcttctccgctgaggtttcgcagtctttctcgtggttgtttgtttctgttgttgtggtgaagatcagagaaaggaggcttgtcaagtttccttggatgttaaggtcatggtggctctgtagtttcatcttatccttttcctttgatgctcatttcattaccgcgaaacacgagcctctcgagtttcaagattatgccgacttgactggtcttcttgcatccttgttcctgttggctgtttcaatcagaggcaaaaccggttttcatcttcttgaatccagcggtaacacagagccattactacttggtgaccaaacagagcagaacaagaaagattcttattcttcttcttccccatatggaaacgctactctcttccaacgcatcactttctcatggatcaaccctttgttctcccttggatacaagagacctctagaaaaagatgatgtaccagatatcgatgtgaaagactccgctcgattttgctctcatgcctttgaccagaaactgaaaaccaccaaagaaaaagaaggacctggaaatgctttcttctataactcggttcttcgctatgtgtggaggaaagccgcaatcaacgcggtattcgcagttgtaaacgcgagcacagcttacatcggaccatatctcatcaatgactttgtagagtttctaagtgagaaacaatcccagagcttaaaccatggttaccttcttgcactcgggtttctaactgcgaaaatcgtcgagacagttactcaaagacaatggatctttggagctcgtcagctaggactacgtcttcgagcagctttgatatcacatatctaccagaaaggtttagttttatcaagtcaatctcggcaaagccacacgagcggagagatcatcaactacatgagtgtagatgttcagagaatcactgacttcatttggtatgtaaacaacatatggatgttaccaatacagattttctcggcgatttatatcttgcaaaaacatctgggacttggagctttagctgcattggtcacaactttaatggtgatggcttgcaactaccccctgacaaggcttcagagaaactaccaatcagatatcatgaatgccaaagatgatagaatgaaagcaacttcagagattcttaaaaacatgaagattctgaagcttcaagcatgggataaccagtttctcaacaaggttaaaacattaagaaagaaagagtatgattgtttatggaagtctttgaggttacaagctttcacaacttttatcctttggggagctccttcattgatctctgtggtgacttttgttacttgtatgttaatgggagtgaagctaacagctggagcagtcttatctgctcttgcaacgtttcaaatgttacaaagtccgattttcggtttacctgatctcctctcagcacttgttcagagcaaggtttctgcagatagaatagcttcttaccttcaacaaagtgagactcagaaagatgcagttgagtattgctcaaaggatcatacagaattaagtgttgaaatagaaaatggagcatttagttgggaacctgagtcaagcagaccgactcttgatgacatcgaactgaaagtaaaaagcggaatgaaagtggcggtttgtggagctgtaggatcaggaaaatcaagcttactctcttcaatcctaggggagattcagaagctgaagggaacagtcagagtcagtggtaaacaagcttatgttccacaatcaccatggatactaagcgggactataagagataacattttgtttggaagtatgtatgaaagtgagaagtatgagagaactgttaaagcatgtgctttgataaaggactttgagcttttctcgaatggagacttgacagagattggagagagagggataaacatgagtggaggtcagaagcaaaggatacagattgctcgagcggtttatcagaatgctgatatatatctacttgatgatccttttagcgccgttgatgctcatacaggaagagaactctttgaagattgcttaatggggatactgaaagacaaaactgtactttacgtcacacatcaagttgagtttcttccagcagcagatctaatcctggtgatgcaaaacggaagagtgatgcaagcaggcaagtttgaagagcttctaaagcaaaacataggttttgaagttcttgtaggagctcataacgaagcgctggactcaattctatcaattgaaaagtcaagcagaaacttcaaagagggatcaaaagatgacacagcatcaattgcagagagtctccagacacattgtgactcagagcataacatttcaacagagaataaaaagaaagaagcaaagctagtgcaagatgaagaaacagagaaaggagtaattggcaaagaagtttacttggcatatttaacaacggtgaaaggcggattgcttgtgccattcataatattggctcagtcttgcttccaaatgctacagattgctagcaattactggatggcatggactgctcctccaactgctgaatccataccaaagttaggaatgggtcggattttacttgtttatgcacttcttgctgcaggaagttcactttgtgttttagcacggactattctagtcgccataggtggactttcaacagcagagacgttcttctcaaggatgctctgcagcattttcagagctccaatgtcatttttcgattcaactccaacaggaagaatcttgaacagggcatccacagatcaaagtgtcctggatttggaaatggcagtcaaactaggttggtgtgctttttcgatcattcagattgttggaaccatcttcgtcatgtcgcaagttgcttggcaaagatattacacaccaacagcaagagaactgtcacgcatgtcaggagtagaaagagctccaattctccaccatttcgctgaatcgcttgctggtgcaacaacaatacgtgcttttgatcaacgagatcgcttcattagctcaaaccttgttctaatagatagccattcaaggccatggttccatgttgcatcagcaatggagtggctttccttcaggttgaatttgctgtctcatttcgtctttgctttttctttggtgttacttgtgactctccctgaaggtgtcatcaatccaagtattgctggtcttggggtcacatatggcttaagtctgaatgttctacaagccacagtgatatggaatatatgcaatgcagaaaacaagatgatttctgtagaaagaattcttcagtactccaaaatccccagtgaagcacctctagtaattgatggtcacagacctcttgataactggccaaatgtaggatcaatcgtcttcagagacctacaggtccgttatgcagaacatttcccagctgtcttgaagaacatcacttgtgagtttccaggaggaaaaaagattggagtagtaggaagaacaggaagcggcaaatcaactttaattcaggcattgtttaggattgtagagccaagtcaaggaaccatagttattgataatgtggatataaccaagataggtctacatgacctgagatcaaggcttgggattattcctcaagatcctgcactatttgatggaacaatcagattgaatctagaccctctagctcagtacactgatcacgaaatatgggaagccattgataaatgccaattgggagatgttattcgtgcaaaggatgagaggctggatgctacagtggttgaaaatggagaaaactggagcgtagggcagagacagttagtttgtcttgggagggtgttgttgaagaaaagcaacattctggtgcttgatgaagccactgcttctgttgattctgcaactgatggtgtaatacaaaagatcatcaatcaagagtttaaagatcggacagtggtgactattgcacacagaatccacacagtgatagagagtgatcttgttctggttctgagtgatggacgaatcgcagagtttgattcacctgccaaactgctacagagagaagattctttcttctccaaactcataaaagagtattcgctgagatctaatcactttgccggctcgaatgatcttctcagctaa

SEQ ID NO: 82989 - protein, 1490 aa, Arabidopsis thaliana
  peptide (1)..(1490): Ceres Seq. ID no. 12668121
MFKPFGFAAETGSHLLTTQWLQLGNSLCLKERISIAMQVTFLAFFLIHLALKWFGVVRNRGSNDVEEDLKKQSITVKQSFSYNISLLCSVSILGTHCFILLLLFRDSVVSRCDSSVSVFSAEVSQSFSWLFVSVVVVKIRERRLVKFPWMLRSWWLCSFILSFSFDAHFITAKHEPLEFQDYADLTGLLASLFLLAVSIRGKTGFHLLESSGNTEPLLLGDQTEQNKKDSYSSSSPYGNATLFQRITFSWINPLFSLGYKRPLEKDDVPDIDVKDSARFCSHAFDQKLKTTKEKEGPGNAFFYNSVLRYVWRKAAINAVFAVVNASTAYIGPYLINDFVEFLSEKQSQSLNHGYLLALGFLTAKIVETVTQRQWIFGARQLGLRLRAALISHIYQKGLVLSSQSRQSHTSGEIINYMSVDVQRITDFIWYVNNIWMLPIQIFSAIYILQKHLGLGALAALVTTLMVMACNYPLTRLQRNYQSDIMNAKDDRMKATSEILKNMKILKLQAWDNQFLNKVKTLRKKEYDCLWKSLRLQAFTTFILWGAPSLISVVTFVTCMLMGVKLTAGAVLSALATFQMLQSPIFGLPDLLSALVQSKVSADRIASYLQQSETQKDAVEYCSKDHTELSVEIENGAFSWEPESSRPTLDDIELKVKSGMKVAVCGAVGSGKSSLLSSILGEIQKLKGTVRVSGKQAYVPQSPWILSGTIRDNILFGSMYESEKYERTVKACALIKDFELFSNGDLTEIGERGINMSGGQKQRIQIARAVYQNADIYLLDDPFSAVDAHTGRELFEDCLMGILKDKTVLYVTHQVEFLPAADLILVMQNGRVMQAGKFEELLKQNIGFEVLVGAHNEALDSILSIEKSSRNFKEGSKDDTASIAESLQTHCDSEHNISTENKKKEAKLVQDEETEKGVIGKEVYLAYLTTVKGGLLVPFIILAQSCFQMLQIASNYWMAWTAPPTAESIPKLGMGRILLVYALLAAGSSLCVLARTILVAIGGLSTAETFFSRMLCSIFRAPMSFFDSTPTGRILNRASTDQSVLDLEMAVKLGWCAFSIIQIVGTIFVMSQVAWQRYYTPTARELSRMSGVERAPILHHFAESLAGATTIRAFDQRDRFISSNLVLIDSHSRPWFHVASAMEWLSFRLNLLSHFVFAFSLVLLVTLPEGVINPSIAGLGVTYGLSLNVLQATVIWNICNAENKMISVERILQYSKIPSEAPLVIDGHRPLDNWPNVGSIVFRDLQVRYAEHFPAVLKNITCEFPGGKKIGVVGRTGSGKSTLIQALFRIVEPSQGTIVIDNVDITKIGLHDLRSRLGIIPQDPALFDGTIRLNLDPLAQYTDHEIWEAIDKCQLGDVIRAKDERLDATVVENGENWSVGQRQLVCLGRVLLKKSNILVLDEATASVDSATDGVIQKIINQEFKDRTVVTIAHRIHTVIESDLVLVLSDGRIAEFDSPAKLLQREDSFFSKLIKEYSLRSNHFAGSNDLLS

SEQ ID NO: 82990 - protein, 1454 aa, Arabidopsis thaliana
  peptide (1)..(1454): Ceres Seq. ID no. 12668122
MQVTFLAFFLIHLALKWFGVVRNRGSNDVEEDLKKQSITVKQSFSYNISLLCSVSILGTHCFILLLLFRDSVVSRCDSSVSVFSAEVSQSFSWLFVSVVVVKIRERRLVKFPWMLRSWWLCSFILSFSFDAHFITAKHEPLEFQDYADLTGLLASLFLLAVSIRGKTGFHLLESSGNTEPLLLGDQTEQNKKDSYSSSSPYGNATLFQRITFSWINPLFSLGYKRPLEKDDVPDIDVKDSARFCSHAFDQKLKTTKEKEGPGNAFFYNSVLRYVWRKAAINAVFAVVNASTAYIGPYLINDFVEFLSEKQSQSLNHGYLLALGFLTAKIVETVTQRQWIFGARQLGLRLRAALISHIYQKGLVLSSQSRQSHTSGEIINYMSVDVQRITDFIWYVNNIWMLPIQIFSAIYILQKHLGLGALAALVTTLMVMACNYPLTRLQRNYQSDIMNAKDDRMKATSEILKNMKILKLQAWDNQFLNKVKTLRKKEYDCLWKSLRLQAFTTFILWGAPSLISVVTFVTCMLMGVKLTAGAVLSALATFQMLQSPIFGLPDLLSALVQSKVSADRIASYLQQSETQKDAVEYCSKDHTELSVEIENGAFSWEPESSRPTLDDIELKVKSGMKVAVCGAVGSGKSSLLSSILGEIQKLKGTVRVSGKQAYVPQSPWILSGTIRDNILFGSMYESEKYERTVKACALIKDFELFSNGDLTEIGERGINMSGGQKQRIQIARAVYQNADIYLLDDPFSAVDAHTGRELFEDCLMGILKDKTVLYVTHQVEFLPAADLILVMQNGRVMQAGKFEELLKQNIGFEVLVGAHNEALDSILSIEKSSRNFKEGSKDDTASIAESLQTHCDSEHNISTENKKKEAKLVQDEETEKGVIGKEVYLAYLTTVKGGLLVPFIILAQSCFQMLQIASNYWMAWTAPPTAESIPKLGMGRILLVYALLAAGSSLCVLARTILVAIGGLSTAETFFSRMLCSIFRAPMSFFDSTPTGRILNRASTDQSVLDLEMAVKLGWCAFSIIQIVGTIFVMSQVAWQRYYTPTARELSRMSGVERAPILHHFAESLAGATTIRAFDQRDRFISSNLVLIDSHSRPWFHVASAMEWLSFRLNLLSHFVFAFSLVLLVTLPEGVINPSIAGLGVTYGLSLNVLQATVIWNICNAENKMISVERILQYSKIPSEAPLVIDGHRPLDNWPNVGSIVFRDLQVRYAEHFPAVLKNITCEFPGGKKIGVVGRTGSGKSTLIQALFRIVEPSQGTIVIDNVDITKIGLHDLRSRLGIIPQDPALFDGTIRLNLDPLAQYTDHEIWEAIDKCQLGDVIRAKDERLDATVVENGENWSVGQRQLVCLGRVLLKKSNILVLDEATASVDSATDGVIQKIINQEFKDRTVVTIAHRIHTVIESDLVLVLSDGRIAEFDSPAKLLQREDSFFSKLIKEYSLRSNHFAGSNDLLS

SEQ ID NO: 82991 - protein, 1341 aa, Arabidopsis thaliana
  peptide (1)..(1341): Ceres Seq. ID no. 12668123
MLRSWWLCSFILSFSFDAHFITAKHEPLEFQDYADLTGLLASLFLLAVSIRGKTGFHLLESSGNTEPLLLGDQTEQNKKDSYSSSSPYGNATLFQRITFSWINPLFSLGYKRPLEKDDVPDIDVKDSARFCSHAFDQKLKTTKEKEGPGNAFFYNSVLRYVWRKAAINAVFAVVNASTAYIGPYLINDFVEFLSEKQSQSLNHGYLLALGFLTAKIVETVTQRQWIFGARQLGLRLRAALISHIYQKGLVLSSQSRQSHTSGEIINYMSVDVQRITDFIWYVNNIWMLPIQIFSAIYILQKHLGLGALAALVTTLMVMACNYPLTRLQRNYQSDIMNAKDDRMKATSEILKNMKILKLQAWDNQFLNKVKTLRKKEYDCLWKSLRLQAFTTFILWGAPSLISVVTFVTCMLMGVKLTAGAVLSALATFQMLQSPIFGLPDLLSALVQSKVSADRIASYLQQSETQKDAVEYCSKDHTELSVEIENGAFSWEPESSRPTLDDIELKVKSGMKVAVCGAVGSGKSSLLSSILGEIQKLKGTVRVSGKQAYVPQSPWILSGTIRDNILFGSMYESEKYERTVKACALIKDFELFSNGDLTEIGERGINMSGGQKQRIQIARAVYQNADIYLLDDPFSAVDAHTGRELFEDCLMGILKDKTVLYVTHQVEFLPAADLILVMQNGRVMQAGKFEELLKQNIGFEVLVGAHNEALDSILSIEKSSRNFKEGSKDDTASIAESLQTHCDSEHNISTENKKKEAKLVQDEETEKGVIGKEVYLAYLTTVKGGLLVPFIILAQSCFQMLQIASNYWMAWTAPPTAESIPKLGMGRILLVYALLAAGSSLCVLARTILVAIGGLSTAETFFSRMLCSIFRAPMSFFDSTPTGRILNRASTDQSVLDLEMAVKLGWCAFSIIQIVGTIFVMSQVAWQRYYTPTARELSRMSGVERAPILHHFAESLAGATTIRAFDQRDRFISSNLVLIDSHSRPWFHVASAMEWLSFRLNLLSHFVFAFSLVLLVTLPEGVINPSIAGLGVTYGLSLNVLQATVIWNICNAENKMISVERILQYSKIPSEAPLVIDGHRPLDNWPNVGSIVFRDLQVRYAEHFPAVLKNITCEFPGGKKIGVVGRTGSGKSTLIQALFRIVEPSQGTIVIDNVDITKIGLHDLRSRLGIIPQDPALFDGTIRLNLDPLAQYTDHEIWEAIDKCQLGDVIRAKDERLDATVVENGENWSVGQRQLVCLGRVLLKKSNILVLDEATASVDSATDGVIQKIINQEFKDRTVVTIAHRIHTVIESDLVLVLSDGRIAEFDSPAKLLQREDSFFSKLIKEYSLRSNHFAGSNDLLS

SEQ ID NO: 82992 - DNA, 564 bp, Arabidopsis thaliana
  misc_feature (1)..(564): Ceres Seq. ID no. 12668131
  misc_feature (1)..(564): Ortholog of  Ceres SEQ ID NO 14306110 as cited in SEQ ID NO 1363
atgggatcaaccgccgccaccgctctcctcctcctcctcctcctagtggcagtccctgccgtctttgccgtgactttccaggtgggagataatgatggttggaccattggtgtcgagtacacgagttgggttagtgaaaagactttcagagtcggtgacactctagagttcaaatatggtccttcgcactcggtggccgtggtgaataaagccgactatgatggctgcgaaactagcagaccgacgcagagtttttctgacggagacactaagatcgatcttacaaaagtaggtgctatacacttcctttgccttactcctggtcactgcagccttggcatgaaactcgccgtacaagtacttgctgccgtttcattagagcctccaccgtctccatcagctccatcgccgtctccatcagctccatcaccgtctccatcagctccatcgccgtctccatcgccgggaaacgcagaaaacttgaaaaatgcggcgtctaagggaatcatgagctatggaaagattgtggtgacgatggtgttgatgtacggtgtgcttaattag

SEQ ID NO: 82993 - protein, 187 aa, Arabidopsis thaliana
  peptide (1)..(187): Ceres Seq. ID no. 12668132
MGSTAATALLLLLLLVAVPAVFAVTFQVGDNDGWTIGVEYTSWVSEKTFRVGDTLEFKYGPSHSVAVVNKADYDGCETSRPTQSFSDGDTKIDLTKVGAIHFLCLTPGHCSLGMKLAVQVLAAVSLEPPPSPSAPSPSPSAPSPSPSAPSPSPSPGNAENLKNAASKGIMSYGKIVVTMVLMYGVLN

SEQ ID NO: 82994 - DNA, 690 bp, Arabidopsis thaliana
  misc_feature (1)..(690): Ceres Seq. ID no. 12668145
  misc_feature (1)..(690): Ortholog of  Ceres SEQ ID NO 12619615 as cited in SEQ ID NO 66033
atggtaaaatttgcaatcttgagagataattttttttcctttttttggtttgattctggagataaagcttggtcttttaattgcagcttgagtcggagaagtcttgtttatgttttagttgcttcgccgtgtttgttgttaccagcgttgtcttcatctgcgaagactaaatcaaagagtccttatgatgagagacggttactagaacagaacaagaggatacagagagagaacaatgctcctgacgagtttcctaactttgttagagaaggttttgaggttaaggtattagcttctgataattacatcaaggctgattctggcctcatatatcgggatttcaatgttggtcaaggtgatttcccaaaagatggtcagcaggtgacttttcactacattggctacaatgagtctggaaggcgaatagatagtacttacatacaaggttctcctgctagaatccgcatgggaaccaatgcacttgttccaggatttgaaatgggaattcgtgacatgaagcccggtgggcgaagaaggattataatccctccagaattgggacctccggtgggaccttcgaccttcttcagctcgaagcaatttgaagttttcgacgtggagttgctcagtatccagaattgtgagaggaggactataataggtttctactcagatgtcacatgcagttaa

SEQ ID NO: 82995 - protein, 229 aa, Arabidopsis thaliana
  peptide (1)..(229): Ceres Seq. ID no. 12668146
MVKFAILRDNFFSFFWFDSGDKAWSFNCSLSRRSLVYVLVASPCLLLPALSSSAKTKSKSPYDERRLLEQNKRIQRENNAPDEFPNFVREGFEVKVLASDNYIKADSGLIYRDFNVGQGDFPKDGQQVTFHYIGYNESGRRIDSTYIQGSPARIRMGTNALVPGFEMGIRDMKPGGRRRIIIPPELGPPVGPSTFFSSKQFEVFDVELLSIQNCERRTIIGFYSDVTCS

SEQ ID NO: 82996 - DNA, 2431 bp, Arabidopsis thaliana
  misc_feature (1)..(2431): Ceres Seq. ID no. 12668155
  misc_feature (1)..(2431): Ortholog of  Ceres SEQ ID NO 13598023 as cited in SEQ ID NO 66487
ggtgccatttgtgtgacacagaaaatcccagcaaatgtcgagagagagagaaagtataaagaatgtgaccggcaaaaaagagataaaacagtagagaaccatattatttgccatttcttagaagaatccactgcatgatattcaaaatctcaccaacaaccattggcgaagaagaaaagaaaaagaagataactctgtagattttgaaagagatgcttcggcttccttcttctatgccaatcgtttcttttcccgccaatcccaatctgctgattaatccacaaccatcttggccgtcgcgaagaggaaactccgccgttgttgtctccgctgcgtctagagatgtagatagtttcactagtaaatccggttatttgttcagtctcagtgccgatgaggctgattctttgtcggagtacaattttcccaggattgatgggatgtataagaagaaacctctgattctgcttcgtagattagctcagatcggaactacgtttagttattggtttgggcttcgcttagctgatgaggctttggaacgctctgatcaaatgttcaaggtacgagcagcggagcttaggaaattgcttgtggagctaggtccggcgtacgtcaaaatcgctcaagctgtttcatctcgtcctgatttgatacctcctatatacttggatgaactctccctgctacaagatcaaataactccgttttcaaccgaagttgctttcaatatgattgaggatgaacttggtcttcctatagatgagcttttctctgagatttctcctgagcctgttgctgcagcgtcccttggacaggtatatcaagctaggctccgtagaagtggaaaggttgttgctgtcaaagtgcagcgccctggtgtacgagctgcaattgctttggacacattaattcttcggtatatagcgggtttgattaaaaaggctggaagattcaactctgatctcgaggcagttgttgatgaatgggcaacaagtctgtttaaggtaaatcaaattgaatgcaggagatggattacttgaatgaagctcaaaacggaataaaatttaggaagttgtatggtggcatcaaagatgtcttggttccaaagatgtacacagagtacagtaccagcaaagttcttgtaatggaatgggtggagggtcagaagcttaatgaagttaatgacctttatttagttgaggttggcgtttactgttcgtttaatcaacttctggagtatggattttaccatgccgatccccaccctgggaattttcttcgcacgtatgatgggcaacttgcatacttagattttggtatgatgggggactttaggccagaattacgtgatggattcatggaagcatgtcttcatcttgtaaatcgtgacttcaaagcgctggctaaagactttgtaactctggggcttcttccaccaacagcagaaaagagcgctgtgacaaaggctttaaccgatgtttttcaagatgcaatttctagaggagttcgcaatataagcttcggtgacctgcttggcgacttgggaaaaacaatgtaccgattcaaattcagaatacccccttatttttctctagttatccgcagtcttgctgttttggagggcattgccatcggtataagcccaaactacaaggttctaggcagtacatacccttggattgctagaaagattctaaccgacagctctccacaactgaaaagctctctgcaaaatcttttatatgagtctcttaggacagagacagcattagttcagaaaccagtggtggggacagaatctaatattgccatgaagcaaatgcttgcttttactttcacggaacagggttcttttgtaagagaaatccttcttcgagaattcgctaagggtcttgatgcatatggattggcaactttggactcttttacattttctggttcaggaccatcgagttccttgacagaagaagacatgacaaaccttagaactttctatcgcctcatctcattgttctcagggatgcaaaaggctaaaagcgtaagcacgcaagtaaaagcggtgagtaaatatggtgaggcgctcacgcctctagacgaagcatcactggtcatgtatcagcttccatcagcacaagagatgcttccgattctctccatattacctgagcttccacaggaatcacaacagaggttgcttcagttgccaggtgacttggttggaagattggtgactcgggcttttgctagaaccattcgcaggatttttctttgatgtccgattacaaataaaaacttgcagattttagacaagactactgtgatttgagttatttataatttttacataaacttgaagagaatcagaggaatggctgttttgatcccacaacagcatatttataaaagaaaagcatcaacatcttcttca

SEQ ID NO: 82997 - protein, 417 aa, Arabidopsis thaliana
  peptide (1)..(417): Ceres Seq. ID no. 12668156
MQEMDYLNEAQNGIKFRKLYGGIKDVLVPKMYTEYSTSKVLVMEWVEGQKLNEVNDLYLVEVGVYCSFNQLLEYGFYHADPHPGNFLRTYDGQLAYLDFGMMGDFRPELRDGFMEACLHLVNRDFKALAKDFVTLGLLPPTAEKSAVTKALTDVFQDAISRGVRNISFGDLLGDLGKTMYRFKFRIPPYFSLVIRSLAVLEGIAIGISPNYKVLGSTYPWIARKILTDSSPQLKSSLQNLLYESLRTETALVQKPVVGTESNIAMKQMLAFTFTEQGSFVREILLREFAKGLDAYGLATLDSFTFSGSGPSSSLTEEDMTNLRTFYRLISLFSGMQKAKSVSTQVKAVSKYGEALTPLDEASLVMYQLPSAQEMLPILSILPELPQESQQRLLQLPGDLVGRLVTRAFARTIRRIFL

SEQ ID NO: 82998 - protein, 414 aa, Arabidopsis thaliana
  peptide (1)..(414): Ceres Seq. ID no. 12668157
MDYLNEAQNGIKFRKLYGGIKDVLVPKMYTEYSTSKVLVMEWVEGQKLNEVNDLYLVEVGVYCSFNQLLEYGFYHADPHPGNFLRTYDGQLAYLDFGMMGDFRPELRDGFMEACLHLVNRDFKALAKDFVTLGLLPPTAEKSAVTKALTDVFQDAISRGVRNISFGDLLGDLGKTMYRFKFRIPPYFSLVIRSLAVLEGIAIGISPNYKVLGSTYPWIARKILTDSSPQLKSSLQNLLYESLRTETALVQKPVVGTESNIAMKQMLAFTFTEQGSFVREILLREFAKGLDAYGLATLDSFTFSGSGPSSSLTEEDMTNLRTFYRLISLFSGMQKAKSVSTQVKAVSKYGEALTPLDEASLVMYQLPSAQEMLPILSILPELPQESQQRLLQLPGDLVGRLVTRAFARTIRRIFL

SEQ ID NO: 82999 - protein, 387 aa, Arabidopsis thaliana
  peptide (1)..(387): Ceres Seq. ID no. 12668158
MYTEYSTSKVLVMEWVEGQKLNEVNDLYLVEVGVYCSFNQLLEYGFYHADPHPGNFLRTYDGQLAYLDFGMMGDFRPELRDGFMEACLHLVNRDFKALAKDFVTLGLLPPTAEKSAVTKALTDVFQDAISRGVRNISFGDLLGDLGKTMYRFKFRIPPYFSLVIRSLAVLEGIAIGISPNYKVLGSTYPWIARKILTDSSPQLKSSLQNLLYESLRTETALVQKPVVGTESNIAMKQMLAFTFTEQGSFVREILLREFAKGLDAYGLATLDSFTFSGSGPSSSLTEEDMTNLRTFYRLISLFSGMQKAKSVSTQVKAVSKYGEALTPLDEASLVMYQLPSAQEMLPILSILPELPQESQQRLLQLPGDLVGRLVTRAFARTIRRIFL

SEQ ID NO: 83000 - DNA, 1714 bp, Arabidopsis thaliana
  misc_feature (1)..(1714): Ceres Seq. ID no. 12668176
  misc_feature (1)..(1714): Ortholog of  Ceres SEQ ID NO 12613725 as cited in SEQ ID NO 68196
gtctctttcgttggagagacagaggaaaaaatgacgactacttcagaaatttctcttcaagaagaatacgtcaccgacgccgttgaccaccgtggacttgccgccagaagatccaataccggtagatggagagccgccttgttcataatcggtgtggaggtggctgagaggttcgcttactatggaatcggatcaaacttaataagctacttgactggaccacttggtgaatccacggctgtagccgccgctaatgtcaacgcgtggtcaggaattgccactcttcttcctgttcttggagcttttgtcgccgacgcatttctcggtcgttaccgaacaattatcatctcttctcttatctacgtcctgggattggcgtttctgactttatctgcgtttctgattcccaatactactgaagtgacatcttcaacttcttcttttctcaatgtactcttcttcttctctctgtatttggtggctattggacaaagtggacacaagccttgtgttcaagcttttggtgctgaccagtttgatgaaaaagactctcaagagaaatctgacagaagctccttcttcaactggtggtaccttagtctgtctgcaggaatctgctttgcgattttagttgttgtatacatccaggaagagttcagctgggcttttgggtttggaatcccatgtgtgttcatggtgatctctcttgttcttttcgtgtcagggagaaggatttataggtacagtaaaagaagacatgaagaggaaataaacccttttacgaggataggtagagtcttctttgtagcactcaagaaccaaagattgagttcatcagacttgtgcaaagttgagctagaggcaaatacatccccagagaaacagagttttttcaacaaagcattgcttgtacccaatgattcttctcaaggagaaaacgcatccaagtctagtgatgttgaagatgccacagctcttatcaggctaattccagtatggtttacgactctggcttacgcgataccctacgcgcaatacatgacatttttcactaagcaaggcgtcacaatggatagaacaattcttcctggtgttaagatcccacctgcttctcttcaggtctttatcggcatatcaatagtcctctttgtccccatctacgaccgagttttcgtccccatcgccaggttaataaccaaagaaccttgtggcatcacaaccctcaaaagaattggaactggaattgtactgtcgactatcactatggtaattgcagctctggttgagttcaagcggctcgagactgcgaaagaacacgggcttatagaccaaccggaagcaactcttccaatgtcgatatggtggttaatccctcagtacttgttgctgggattggctgacgtatatactttagtgggaatgcaagagttcttctacagccaagtccctactgagctgagaagcatcggtctcgcgctttacttaagcgcgttgggcgtgggaagcttattaagcagcttactcatctctctgatagacttggccactggaggagacgcaggaaacagctggtttaacagtaatctgaacagagctcatcttgattacttctattggttactagcgattgttagcgccgttgggttctttacgttcttgttcatttccaagtcgtacatctatcgtcgagtggatcgagtgtagtttccaaatg

SEQ ID NO: 83001 - protein, 567 aa, Arabidopsis thaliana
  peptide (1)..(567): Ceres Seq. ID no. 12668177
VSFVGETEEKMTTTSEISLQEEYVTDAVDHRGLAARRSNTGRWRAALFIIGVEVAERFAYYGIGSNLISYLTGPLGESTAVAAANVNAWSGIATLLPVLGAFVADAFLGRYRTIIISSLIYVLGLAFLTLSAFLIPNTTEVTSSTSSFLNVLFFFSLYLVAIGQSGHKPCVQAFGADQFDEKDSQEKSDRSSFFNWWYLSLSAGICFAILVVVYIQEEFSWAFGFGIPCVFMVISLVLFVSGRRIYRYSKRRHEEEINPFTRIGRVFFVALKNQRLSSSDLCKVELEANTSPEKQSFFNKALLVPNDSSQGENASKSSDVEDATALIRLIPVWFTTLAYAIPYAQYMTFFTKQGVTMDRTILPGVKIPPASLQVFIGISIVLFVPIYDRVFVPIARLITKEPCGITTLKRIGTGIVLSTITMVIAALVEFKRLETAKEHGLIDQPEATLPMSIWWLIPQYLLLGLADVYTLVGMQEFFYSQVPTELRSIGLALYLSALGVGSLLSSLLISLIDLATGGDAGNSWFNSNLNRAHLDYFYWLLAIVSAVGFFTFLFISKSYIYRRVDRV

SEQ ID NO: 83002 - protein, 557 aa, Arabidopsis thaliana
  peptide (1)..(557): Ceres Seq. ID no. 12668178
MTTTSEISLQEEYVTDAVDHRGLAARRSNTGRWRAALFIIGVEVAERFAYYGIGSNLISYLTGPLGESTAVAAANVNAWSGIATLLPVLGAFVADAFLGRYRTIIISSLIYVLGLAFLTLSAFLIPNTTEVTSSTSSFLNVLFFFSLYLVAIGQSGHKPCVQAFGADQFDEKDSQEKSDRSSFFNWWYLSLSAGICFAILVVVYIQEEFSWAFGFGIPCVFMVISLVLFVSGRRIYRYSKRRHEEEINPFTRIGRVFFVALKNQRLSSSDLCKVELEANTSPEKQSFFNKALLVPNDSSQGENASKSSDVEDATALIRLIPVWFTTLAYAIPYAQYMTFFTKQGVTMDRTILPGVKIPPASLQVFIGISIVLFVPIYDRVFVPIARLITKEPCGITTLKRIGTGIVLSTITMVIAALVEFKRLETAKEHGLIDQPEATLPMSIWWLIPQYLLLGLADVYTLVGMQEFFYSQVPTELRSIGLALYLSALGVGSLLSSLLISLIDLATGGDAGNSWFNSNLNRAHLDYFYWLLAIVSAVGFFTFLFISKSYIYRRVDRV

SEQ ID NO: 83003 - protein, 336 aa, Arabidopsis thaliana
  peptide (1)..(336): Ceres Seq. ID no. 12668179
MVISLVLFVSGRRIYRYSKRRHEEEINPFTRIGRVFFVALKNQRLSSSDLCKVELEANTSPEKQSFFNKALLVPNDSSQGENASKSSDVEDATALIRLIPVWFTTLAYAIPYAQYMTFFTKQGVTMDRTILPGVKIPPASLQVFIGISIVLFVPIYDRVFVPIARLITKEPCGITTLKRIGTGIVLSTITMVIAALVEFKRLETAKEHGLIDQPEATLPMSIWWLIPQYLLLGLADVYTLVGMQEFFYSQVPTELRSIGLALYLSALGVGSLLSSLLISLIDLATGGDAGNSWFNSNLNRAHLDYFYWLLAIVSAVGFFTFLFISKSYIYRRVDRV

SEQ ID NO: 83004 - DNA, 1940 bp, Arabidopsis thaliana
  misc_feature (1)..(1940): Ceres Seq. ID no. 12668180
  misc_feature (1)..(1940): Ortholog of  Ceres SEQ ID NO 13600098 as cited in SEQ ID NO 0
aatttctgagcgtggaggacaaggcaaaattcggtgtgcaaggcactggatattgggacccttgtttcctcgtgagagaattttcaatcctagggcttaaagagcacgttcctagtataaagctgattcacagatgcggagattcttgattaaccaagctaaaggtctcgtcgaccattctcgtcgtcaacatcaccacaaaagtccaagctttctctctcctcaacctcgtccccttgcttcttctcctcctgctctgtctcgtttcttctcttctacttcggagatgtctgcttctgattccacttcttctcttcccgttactcttgactccatcaatcccaaggttctgaaatgtgagtatgctgttcgaggagaaattgtcaacattgctcagaagttacaagaagacttgaagactaataaggatgcttatccctttgatgagataatctattgcaacattgggaatcctcaatctcttggtcagctgcctataaagttcttccgtgaggttctcgcattgtgtgaccacgcaagtcttttggatgagtctgaaacccatggtttgttcagtaccgattcaattgaccgagcatggaggattttggaccatattcccggaagagcaactggggcttacagtcatagccagggtatcaagggtttacgtgatgtaattgcagctggaatcgaagcacgtgatggtttccctgctgatccaaatgatattttcttgactgatggtgcaagtccagcggttcacatgatgatgcaacttctcttgagctcagagaaagatggtattctttccccgattcctcagtatccattgtactcggcttcaattgcccttcatggtggatctttggttccgtactatcttgatgaagcaacaggatggggactggaaatatctgaccttaagaagcaactagaggaagctaggtccaagggcatctctgtaagggccttggttgtcataaaccccggtaacccaactgggcaggttcttgcggaagaaaaccagcgtgacattgttaatttctgcaagcaagagggtttggttcttttagctgatgaagtctaccaagaaaatgtttacgtccctgacaaaaagttccattctttcaagaaagtggctcggtctttgggctatggagaaaaagatatctcgttagtctcgttccaatcagtctccaaaggatattatggagaatgtggaaaaagaggaggttacatggaggttactggattcacttctgatgtaagagaacagatatacaaaatggcttctgtgaatctttgttctaacatctctggtcaaattcttgctagccttgtcatgagcccacccaagcctggtgatgactcatatgactcatacatggcagaaagagatggaattctctcatccatggctaaacgtgcaaagactttggaagacgctctcaacagtttagaaggtgttacatgtaacagagccgaaggagcaatgtatctcttcccgcgaattaaccttcctcaaaaggctatcgaagctgctgaggctgaaaaaactgcaccagatgcgttctactgcaaacgccttctcaatgctactggtgtagttgtagtccctggttctggctttggacaggttcctggaacatggcactttagatgcacaatacttccacaagaagacaagattccagcgatagtgaatcgtctgacagagttccacaagagcttcatggacgagttccgcaactaaaaggacctgaccatgaagatgaacttaaagacccttttgaagaaaagtgtgatcagtttgagttattaaaaaaaagaaaacttgtgttttgaatttgatcaggcaattgtgatcagctaatttaattttagaatattttgtacttccattccatggcatgtcatatgaagatatgaaaattagt

SEQ ID NO: 83005 - protein, 540 aa, Arabidopsis thaliana
  peptide (1)..(540): Ceres Seq. ID no. 12668181
MRRFLINQAKGLVDHSRRQHHHKSPSFLSPQPRPLASSPPALSRFFSSTSEMSASDSTSSLPVTLDSINPKVLKCEYAVRGEIVNIAQKLQEDLKTNKDAYPFDEIIYCNIGNPQSLGQLPIKFFREVLALCDHASLLDESETHGLFSTDSIDRAWRILDHIPGRATGAYSHSQGIKGLRDVIAAGIEARDGFPADPNDIFLTDGASPAVHMMMQLLLSSEKDGILSPIPQYPLYSASIALHGGSLVPYYLDEATGWGLEISDLKKQLEEARSKGISVRALVVINPGNPTGQVLAEENQRDIVNFCKQEGLVLLADEVYQENVYVPDKKFHSFKKVARSLGYGEKDISLVSFQSVSKGYYGECGKRGGYMEVTGFTSDVREQIYKMASVNLCSNISGQILASLVMSPPKPGDDSYDSYMAERDGILSSMAKRAKTLEDALNSLEGVTCNRAEGAMYLFPRINLPQKAIEAAEAEKTAPDAFYCKRLLNATGVVVVPGSGFGQVPGTWHFRCTILPQEDKIPAIVNRLTEFHKSFMDEFRN

SEQ ID NO: 83006 - protein, 489 aa, Arabidopsis thaliana
  peptide (1)..(489): Ceres Seq. ID no. 12668182
MSASDSTSSLPVTLDSINPKVLKCEYAVRGEIVNIAQKLQEDLKTNKDAYPFDEIIYCNIGNPQSLGQLPIKFFREVLALCDHASLLDESETHGLFSTDSIDRAWRILDHIPGRATGAYSHSQGIKGLRDVIAAGIEARDGFPADPNDIFLTDGASPAVHMMMQLLLSSEKDGILSPIPQYPLYSASIALHGGSLVPYYLDEATGWGLEISDLKKQLEEARSKGISVRALVVINPGNPTGQVLAEENQRDIVNFCKQEGLVLLADEVYQENVYVPDKKFHSFKKVARSLGYGEKDISLVSFQSVSKGYYGECGKRGGYMEVTGFTSDVREQIYKMASVNLCSNISGQILASLVMSPPKPGDDSYDSYMAERDGILSSMAKRAKTLEDALNSLEGVTCNRAEGAMYLFPRINLPQKAIEAAEAEKTAPDAFYCKRLLNATGVVVVPGSGFGQVPGTWHFRCTILPQEDKIPAIVNRLTEFHKSFMDEFRN

SEQ ID NO: 83007 - protein, 329 aa, Arabidopsis thaliana
  peptide (1)..(329): Ceres Seq. ID no. 12668183
MMMQLLLSSEKDGILSPIPQYPLYSASIALHGGSLVPYYLDEATGWGLEISDLKKQLEEARSKGISVRALVVINPGNPTGQVLAEENQRDIVNFCKQEGLVLLADEVYQENVYVPDKKFHSFKKVARSLGYGEKDISLVSFQSVSKGYYGECGKRGGYMEVTGFTSDVREQIYKMASVNLCSNISGQILASLVMSPPKPGDDSYDSYMAERDGILSSMAKRAKTLEDALNSLEGVTCNRAEGAMYLFPRINLPQKAIEAAEAEKTAPDAFYCKRLLNATGVVVVPGSGFGQVPGTWHFRCTILPQEDKIPAIVNRLTEFHKSFMDEFRN

SEQ ID NO: 83008 - DNA, 809 bp, Arabidopsis thaliana
  misc_feature (1)..(809): Ceres Seq. ID no. 12668200
  misc_feature (1)..(809): Ortholog of  Ceres SEQ ID NO 13638595 as cited in SEQ ID NO 52050
  misc_feature (1)..(809): Ortholog of  Ceres SEQ ID NO 14301870 as cited in SEQ ID NO 61501
  misc_feature (1)..(809): Ortholog of  Ceres SEQ ID NO 12583993 as cited in SEQ ID NO 68098
gtactatcttcctcttaaaccaaccattcaaaatgttgcgtactatcttcctcttatctcttctctttgctctatccaatgcctctgttcaagatttctgtgtcgcaaacctgaaacgcgctgaaacccctgcgggttacccttgcattcgtcccattcatgtcaaagctacagactttgtcttctctggcttaggcactcctggaaacactacaaacatcatcaacgccgctgtcacacccgctttcgcagctcagttcccgggtctgaacggtctaggcctctctacagctagacttgacttagctcctaaaggtgtgatcccaatgcacactcaccctggtgcctctgaggttctctttgtccttactggctccattaccgctgggtttgtctcctcggcaaacgctgtctacgtgcagacactcaaaccaggacaggtcatggttttcccacagggcttgcttcatttccagatcaacgcgggaaaatcctctgcttcagccgttgtcactttcaacagcgctaatccgggtctgcagattctcgacttcgcactctttgctaacagtcttcccactgaactcgtcgtgggtactactttccttgacgccactacagtcaagaagctaaagggtgttcttggaggaactggctaaaaaaagacttaggactactccttgactaaaacaccaaaacctgtttcttcatctttttttctctttaattgattcttgtcttctctgttttgtgtgccttgtaattcttcaaaacctgtcaaaattgttacattgtatgtgagttttttc

SEQ ID NO: 83009 - protein, 218 aa, Arabidopsis thaliana
  peptide (1)..(218): Ceres Seq. ID no. 12668201
TIFLLNQPFKMLRTIFLLSLLFALSNASVQDFCVANLKRAETPAGYPCIRPIHVKATDFVFSGLGTPGNTTNIINAAVTPAFAAQFPGLNGLGLSTARLDLAPKGVIPMHTHPGASEVLFVLTGSITAGFVSSANAVYVQTLKPGQVMVFPQGLLHFQINAGKSSASAVVTFNSANPGLQILDFALFANSLPTELVVGTTFLDATTVKKLKGVLGGTG

SEQ ID NO: 83010 - protein, 208 aa, Arabidopsis thaliana; identical to SEQ ID NO: 23207
  peptide (1)..(208): Ceres Seq. ID no. 12668202

SEQ ID NO: 83011 - protein, 110 aa, Arabidopsis thaliana; identical to SEQ ID NO: 31047
  peptide (1)..(110): Ceres Seq. ID no. 12668203

SEQ ID NO: 83012 - DNA, 1086 bp, Arabidopsis thaliana
  misc_feature (1)..(1086): Ceres Seq. ID no. 12668215
  misc_feature (1)..(1086): Ortholog of  Ceres SEQ ID NO 13582073 as cited in SEQ ID NO 56218
atttctcatttcggcaaccaaaccaaacattcagagagacacaacacaaccacatcatcacacgtttctctctctctctttcctctccgtcgtctctctctctctagccaccaccaaaatccttaaaacctagacttttctcttccatcgatggcggctaataacagatccgatcatgggtcagacgaaaacacaagactttacaatccttaccaaaactacgaagtcccaatcaacaaatctcagtacctttacaagcttcctacctcccctgagtttctcttcacggaggaggctttaaggcaacgtagatcttggggtgagaatctcactttctacaccggaacagcttacctcggtggctccgttgccggagcttctgttggagtcatcactggagtcaaaagcttcgaatctggcgacactactaagctcaaaatcaacaggatcttgaactcttctggtcaaactggtcgaacttggggtaatcggattggtatcattggattggtttacgcagggatcgagagtggtattgtggctgccacggatagagatgatgtttggaccagtgtggtggctggtcttggaaccggagctgtttgtagagcggcgagaggagtgagatctgcagctgtagctggtgctcttggtggacttgcggctggagctgttgtagctgggaagcaaattgtgaagcggtatgtgcccatttgaagactgcaagagtctaattggcagactctttttcgggtcgttgttgaaatttttgataggggaaatggtgagaatttgataggtttggtatgtcttggaatcataaaaatgaaaactttatttggtttctagaggtacaacaagtctgtatgtcaagtcataatgcagtttcactttgaagaataacctgcaaacctttttcttatattcatactgattaaatgttttgccgattggtaatttaatttgtcatgagtgtgtttgttctagttagtgttttatgtttctgtttttgatcaatgttaactctttcttgattcgttgagaaactgatgtgttgtattacatttgaaaatgaagctcttctct

SEQ ID NO: 83013 - protein, 188 aa, Arabidopsis thaliana; identical to SEQ ID NO: 27627
  peptide (1)..(188): Ceres Seq. ID no. 12668216

SEQ ID NO: 83014 - DNA, 2106 bp, Arabidopsis thaliana
  misc_feature (1)..(2106): Ceres Seq. ID no. 12668217
  misc_feature (1)..(2106): Ortholog of  Ceres SEQ ID NO 14312408 as cited in SEQ ID NO 55042
attcatcaaaagccacataagaagttgatgcagaagcaataataacaaaacaaaaaaacattaaaaaaaaaagctcttcagttttggtttctgcagtctccaatggctctcaagctctttctctttgctcttcttctctgtctcccgacttctctctcctccactgcctctaaaggtaaagagaagaagtcgaagtttaatccatacagatacacattcatcgataaagcaagcacattctcatcatcttcctcatcttcattttcatccaacggtcaagattcgtcctacgactacatagtcatcggaggtggaaccgcagggtgtcctctcgccgcaacgttgtcgcagaatttcagcgttcttgttttagagagaggtggcgttccgtttacaaacgcaaacgtttctttcctcaggaattttcacatcggacttgctgacatttcagcttcttccgcgtctcaagcgtttgtttccactgacggcgtttacaacgcccgtgctagagttctcggtggcggttcctgtattaacgccggtttttactccagagccgatgctgcgttcgtgaagcgagcaggatgggatccgaagctggtgaaggagtcgtatccatgggtggagagagagattgttcatcagccaaagttaacgttatggcagaaagctctcagagacagtcttttagaggttggagtcagacctttcaatggtttcacttacgatcacgtttccggaaccaaaatcggcggtacaattttcgacagattcggccgtcgtcacaccgcggcggagcttctcgcttacgctaatcctcagaagcttagagtcttgatctacgccaccgtgcaaaaaatcgtctttgacacttctggaacaaggcctcgagtaacaggagtaatattcaaagatgagaaaggtaatcaacaccaggctttactctcgaatagaaagggaagtgaagtgatcttatctagtggagctattgggtcaccacagatgctgatgttaagtgggattggacctaagaaggagcttcagaggctgaagattcctgtggttttagagaatgagcatgtaggaaaaggaatggctgataatcccatgaacacgatcttggtgccttcaaaggcgcctatagagcagtcacttattcagactgttggaattacaaagatgggtgtgtatgttgaagccagtactggctttgggcaatctcctgagagtattcatactcactatgggattatgtcgaacaagaatgaattgttttccaccattcctgcaaagcagagaagaccagaagcaacgcaagcttacatcacaagaaacaaataccaacttcacgaagcattcaatggaagtttcatcttggagaaacttgcttacccgatctctagagggcatttgagcttggtcaacacaaatgttgatgacaacccttcagtcaccttcaattactttaaacacccggtggatctccaacgctgtgttgaagccattcgtcttgtttccaaagtggtgacgtctaaccgtttcttaaactacacgcagtgtgacaagcaaaacgtacacaagatgcttagcttaagcgtcaaggcaaacatcaatctaaggccaaagcaactgaacgataccaaatcaatggctcagttctgcaaagacactgttgtcacaatctggcactaccatggtggatgtcttgtgggtaaagttgtgagccctaaccgcaaagttcttggtgtcgacaggctcagagttattgatggttcaacgtttgacgagtctccaggaaccaacccgcaagctactatgatgatgatgggaagatacatgggagtcaagattcttcgggagagacttggaaacaaagctggtgtttagtttgcagattgagcttttatggtagacaaattcgtagcagataattctgttgtggaattgtgttggagaatatctctctctgtctccttctctgttatttgatattcgattcattaaagtataggatcatattgtctaatgaactgtgtaaccctctattgggcaatcggctctgttgcttattagcttgtgtgaaaagttaatcacgttttctgtttc

SEQ ID NO: 83015 - protein, 594 aa, Arabidopsis thaliana; identical to SEQ ID NO: 76779
  peptide (1)..(594): Ceres Seq. ID no. 12668218

SEQ ID NO: 83016 - DNA, 1834 bp, Arabidopsis thaliana
  misc_feature (1)..(1834): Ceres Seq. ID no. 12668230
  misc_feature (1)..(1834): Ortholog of  Ceres SEQ ID NO 15179554 as cited in SEQ ID NO 1174
  misc_feature (1)..(1834): Ortholog of  Ceres SEQ ID NO 15177814 as cited in SEQ ID NO 55489
accacagagaaccacaacatacaaaaaaagaaccctatagaactctgatttttttcttgttgtcaatagtcaatggctcacagtcacactaatggcgccatctctccttctttctccaaagacttatgcgaggagcgtgaaatccaaaagaattactggaaagagcattcagtgggattgagtgttgaagctatgatgcttgattccaaagcttctgacctcgacaaagaagaacgtcctgagatacttgcgtttcttccacctattgaagggacaacagtgctagagtttggtgctggaattggtcgttttactactgaattagctcagaaggccggccaggtcattgcggttgacttcattgaaagtgttatcaaaaagaatgagaacattaacggtcactacaagaacgtcaaatttctgtgcgctgatgtcacatcaccaaatatgaactttccaaatgagtctatggatctgatattctccaactggctgctaatgtatctctctgatcaagaggttgaagatttggcgaaaaagatgttacaatggacaaaggttggcgggtatattttctttcgggagtcttgtttccatcagtctggtgataacaagcggaagtacaacccaacacactaccgtgaacctaaattttacacaaagcttttcaaagaatgccatatgaatgacgaagatgggaattcgtatgaactctctttggttagctgtaaatgcattggagcttatgtgagaaacaaaaagaaccagaaccagatatgctggctttggcagaaagtcagttcggataatgataggggcttccaacgcttcttggacaatgtccagtataagtctagtggtatcttacgctatgagcgtgtctttggagaagggtttgttagcacagggggactcgagacaacaaaggaattcgtggatatgctggatctgaaacctggccaaaaagttctagacgttgggtgcggaataggaggaggggacttctacatggctgagaactttgacgtggatgttgtgggcattgatctatctgtaaacatgatctcttttgcgcttgaacacgcaataggactcaaatgctctgtagaattcgaagtagctgattgcaccaagaaggagtatcctgataacacctttgatgttatttatagcagagacaccattctacatatccaagtataagcttccgctatttcttcttcccttatgactttaatttggtatccattttgtaatccctggtcttactctcaggacaagccagcattgttcagaagattctacaaatggttgaagccgggagggaaagttctcatcactgattactgcagaagccccaaaaccccatctccagactttgcaatctacatcaagaaacgaggttatgatcttcatgatgtacaagcatacggtcagatgctgagagatgctggtttcgaggaggtaatcgcggaggatagaaccgatcagttcatgaaagtcctgaaacgggaactggatgcagtggagaaggagaaggaagaattcatcagtgacttctcgaaagaggattacgaggatattataggcgggtggaagtcaaagctacttaggagctcaagtggtgagcagaagtggggtttgttcatcgccaagagaaactgattatggcatttactataagttggaaataaatttgggtatgtatgtagatcatcaaaacccagtaccctgctattatctctacaagctatatatatgtggctgtgaggttcctttaatgtctccattttacagcatatccagtttggtatttaatatatgtgatattttg

SEQ ID NO: 83017 - protein, 376 aa, Arabidopsis thaliana
  peptide (1)..(376): Ceres Seq. ID no. 12668231
MAHSHTNGAISPSFSKDLCEEREIQKNYWKEHSVGLSVEAMMLDSKASDLDKEERPEILAFLPPIEGTTVLEFGAGIGRFTTELAQKAGQVIAVDFIESVIKKNENINGHYKNVKFLCADVTSPNMNFPNESMDLIFSNWLLMYLSDQEVEDLAKKMLQWTKVGGYIFFRESCFHQSGDNKRKYNPTHYREPKFYTKLFKECHMNDEDGNSYELSLVSCKCIGAYVRNKKNQNQICWLWQKVSSDNDRGFQRFLDNVQYKSSGILRYERVFGEGFVSTGGLETTKEFVDMLDLKPGQKVLDVGCGIGGGDFYMAENFDVDVVGIDLSVNMISFALEHAIGLKCSVEFEVADCTKKEYPDNTFDVIYSRDTILHIQV

SEQ ID NO: 83018 - protein, 336 aa, Arabidopsis thaliana
  peptide (1)..(336): Ceres Seq. ID no. 12668232
MMLDSKASDLDKEERPEILAFLPPIEGTTVLEFGAGIGRFTTELAQKAGQVIAVDFIESVIKKNENINGHYKNVKFLCADVTSPNMNFPNESMDLIFSNWLLMYLSDQEVEDLAKKMLQWTKVGGYIFFRESCFHQSGDNKRKYNPTHYREPKFYTKLFKECHMNDEDGNSYELSLVSCKCIGAYVRNKKNQNQICWLWQKVSSDNDRGFQRFLDNVQYKSSGILRYERVFGEGFVSTGGLETTKEFVDMLDLKPGQKVLDVGCGIGGGDFYMAENFDVDVVGIDLSVNMISFALEHAIGLKCSVEFEVADCTKKEYPDNTFDVIYSRDTILHIQV

SEQ ID NO: 83019 - protein, 335 aa, Arabidopsis thaliana
  peptide (1)..(335): Ceres Seq. ID no. 12668233
MLDSKASDLDKEERPEILAFLPPIEGTTVLEFGAGIGRFTTELAQKAGQVIAVDFIESVIKKNENINGHYKNVKFLCADVTSPNMNFPNESMDLIFSNWLLMYLSDQEVEDLAKKMLQWTKVGGYIFFRESCFHQSGDNKRKYNPTHYREPKFYTKLFKECHMNDEDGNSYELSLVSCKCIGAYVRNKKNQNQICWLWQKVSSDNDRGFQRFLDNVQYKSSGILRYERVFGEGFVSTGGLETTKEFVDMLDLKPGQKVLDVGCGIGGGDFYMAENFDVDVVGIDLSVNMISFALEHAIGLKCSVEFEVADCTKKEYPDNTFDVIYSRDTILHIQV

SEQ ID NO: 83020 - DNA, 1355 bp, Arabidopsis thaliana
  misc_feature (1)..(1355): Ceres Seq. ID no. 12668276
  misc_feature (1)..(1355): Ortholog of  Ceres SEQ ID NO 13654285 as cited in SEQ ID NO 68661
gtttattccattttcttgtgtgtttttttccccataatttataaattttataagcaatatggagtcccacaacaacaaccagagcaacaacaacaccactggttcggcccatctggtcccatccatgggaccaatctccggttcagtctcattaaccaccactgctccaaactccactaccaccaccgtcaccgccgctaaaacacccgcaaaacgaccgtccaaggaccgtcacatcaaagtagacggacgtggccggaggatacgtatgccggctatctgcgcagcacgtgtcttccaactaacacgtgagttacaacacaaatcggacggcgagactatagagtggctgctccaacaagcggagccagctatcatcgcagccaccggaactggaaccataccggcgaatatctctactttgaacatctctcttcgaagcagtggctctactctttcagctccactgtctaaatctttccacatgggaagagcggctcaaaacgctgccgtttttgggttccagcaacagctttatcatcctcatcatatcacgacagattcttcttcttcttctcttcccaaaacattccgtgaagaagatctttttaaagatcctaattttctagatcaagaacccggttcaagatcacctaaaccgggatccgaagctcctgatcaagatccgggttcgacccggtcaagaacacaaaatatgataccgccgatgtgggcactagcgccaacgccagcctccacaaacggaggtagtgctttttggatgttaccagtcggaggaggaggaggtccggctaacgttcaggatccatcacagcacatgtgggcgtttaatccgggtcattacccgggtcgaatcgggtcggttcagctagggtctatgttagtgggaggtcaacagttagggttaggtgttgcagaaaataacaatttggggctattttccggcggaggaggagacggtggtcgggttggtctcggaatgagtcttgagcaaaagcctcaacatcaagtgagtgatcatgctactagagaccaaaatcctactatagatggttctccttgaaagacttcatgatttctttggtttttaaaaagtgtgaatgtgtgatttattgcaacttttgttgaggactccaatgttaatatgggttttagggttggcttttcgggattgccaaattgttatttaagaaaatggatttattgttttggttgcataataattaacgagttttgcaactctttttattcgatgcaaaagcatgtcacttaaaggaaatatagttgaatctctatgtgtaacataatggacaaaagaataaattaaatattta

SEQ ID NO: 83021 - protein, 341 aa, Arabidopsis thaliana
  peptide (1)..(341): Ceres Seq. ID no. 12668277
MESHNNNQSNNNTTGSAHLVPSMGPISGSVSLTTTAPNSTTTTVTAAKTPAKRPSKDRHIKVDGRGRRIRMPAICAARVFQLTRELQHKSDGETIEWLLQQAEPAIIAATGTGTIPANISTLNISLRSSGSTLSAPLSKSFHMGRAAQNAAVFGFQQQLYHPHHITTDSSSSSLPKTFREEDLFKDPNFLDQEPGSRSPKPGSEAPDQDPGSTRSRTQNMIPPMWALAPTPASTNGGSAFWMLPVGGGGGPANVQDPSQHMWAFNPGHYPGRIGSVQLGSMLVGGQQLGLGVAENNNLGLFSGGGGDGGRVGLGMSLEQKPQHQVSDHATRDQNPTIDGSP

SEQ ID NO: 83022 - protein, 319 aa, Arabidopsis thaliana
  peptide (1)..(319): Ceres Seq. ID no. 12668278
MGPISGSVSLTTTAPNSTTTTVTAAKTPAKRPSKDRHIKVDGRGRRIRMPAICAARVFQLTRELQHKSDGETIEWLLQQAEPAIIAATGTGTIPANISTLNISLRSSGSTLSAPLSKSFHMGRAAQNAAVFGFQQQLYHPHHITTDSSSSSLPKTFREEDLFKDPNFLDQEPGSRSPKPGSEAPDQDPGSTRSRTQNMIPPMWALAPTPASTNGGSAFWMLPVGGGGGPANVQDPSQHMWAFNPGHYPGRIGSVQLGSMLVGGQQLGLGVAENNNLGLFSGGGGDGGRVGLGMSLEQKPQHQVSDHATRDQNPTIDGSP

SEQ ID NO: 83023 - protein, 271 aa, Arabidopsis thaliana
  peptide (1)..(271): Ceres Seq. ID no. 12668279
MPAICAARVFQLTRELQHKSDGETIEWLLQQAEPAIIAATGTGTIPANISTLNISLRSSGSTLSAPLSKSFHMGRAAQNAAVFGFQQQLYHPHHITTDSSSSSLPKTFREEDLFKDPNFLDQEPGSRSPKPGSEAPDQDPGSTRSRTQNMIPPMWALAPTPASTNGGSAFWMLPVGGGGGPANVQDPSQHMWAFNPGHYPGRIGSVQLGSMLVGGQQLGLGVAENNNLGLFSGGGGDGGRVGLGMSLEQKPQHQVSDHATRDQNPTIDGSP

SEQ ID NO: 83024 - DNA, 1733 bp, Arabidopsis thaliana
  misc_feature (1)..(1733): Ceres Seq. ID no. 12668296
  misc_feature (1)..(1733): Ortholog of  Ceres SEQ ID NO 13596509 as cited in SEQ ID NO 62004
  misc_feature (1)..(1733): Ortholog of  Ceres SEQ ID NO 13500385 as cited in SEQ ID NO 67583
aacaaagaaaaagtctgtttatcatcttcttcttcttcaaatcgagatcgaagaagaaccaacaaaaaaccaaaaatggagacgaagccaaaccctagacgtccttcaaacacagttctaccatatcaaacaccacgattaagagatcattaccttctgggaaaaaagctaggccaaggccaatttggaacaacctatctctgcacagagaaatcaacctccgctaattacgcctgcaaatcgatcccgaagcgaaagctcgtgtgtcgcgaggattacgaagatgtatggcgtgagattcagatcatgcatcatctctctgagcatccaaatgttgttaggatcaaagggacttatgaagattcggtgtttgttcatattgttatggaggtttgtgaaggtggtgagctttttgatcggattgtttctaaaggtcattttagtgagcgtgaagctgtcaagcttattaagacgattcttggtgttgttgaggcttgtcattctcttggtgttatgcatagagatctcaaacctgagaatttcttgtttgatagtcctaaagatgatgctaagcttaaggctaccgattttggtttgtctgtcttctataagccaggacaatatttatatgacgtagttggaagtccgtactatgttgcaccagaggtgctaaagaaatgttatggacctgaaatagatgtgtggagtgctggtgttatcctctacattttactcagcggtgttcctcccttctgggcagagactgagtctggaatctttagacagatattgcaagggaagttagatttcaaatctgacccgtggcctactatctcagaagctgctaaagatttgatctataaaatgctcgaaaggagccccaagaaacgcatttctgctcatgaagccttgtgtcacccatggattgtcgatgaacaagcagcaccagacaagcctcttgatccagcagtcttatctcgtctaaagcagttttctcaaatgaataagattaagaaaatggcattacgggtaattgctgagagactttcagaggaagaaattggaggtctgaaggaattgttcaagatgatagacacagacaacagcggaacgattacttttgaagagctcaaagcgggtttgaagagagtcggatctgaactgatggaatcagaaatcaagtctctcatggatgcggctgatatcgacaacagtggtacaatagactacggagaattcctagcagcaaccttacacatgaacaagatggagagagaggagaatctggtggctgcattttcgtactttgacaaagacggaagcggttatatcaccatcgatgagcttcagtcagcttgcacagagtttggtctatgtgatacacctctggacgacatgatcaaggagattgatcttgacaatgacgggaagatcgatttctcggagtttacagcaatgatgaggaaaggagatggagttgggagaagcagaaccatgatgaagaacttgaacttcaacattgctgatgcttttggagttgatggtgaaaaatctgatgactgactcatcattcttccacaatttctgttttttttctctttaatttcgtttatattttgaattctaatttctaaggatacaaaaatatattctggcttgttttttgctttcctttttatttttgtacatgagcaactttctaaatttttatcctcatatggataatttttgct

SEQ ID NO: 83025 - protein, 520 aa, Arabidopsis thaliana
  peptide (1)..(520): Ceres Seq. ID no. 12668297
NKEKVCLSSSSSSNRDRRRTNKKPKMETKPNPRRPSNTVLPYQTPRLRDHYLLGKKLGQGQFGTTYLCTEKSTSANYACKSIPKRKLVCREDYEDVWREIQIMHHLSEHPNVVRIKGTYEDSVFVHIVMEVCEGGELFDRIVSKGHFSEREAVKLIKTILGVVEACHSLGVMHRDLKPENFLFDSPKDDAKLKATDFGLSVFYKPGQYLYDVVGSPYYVAPEVLKKCYGPEIDVWSAGVILYILLSGVPPFWAETESGIFRQILQGKLDFKSDPWPTISEAAKDLIYKMLERSPKKRISAHEALCHPWIVDEQAAPDKPLDPAVLSRLKQFSQMNKIKKMALRVIAERLSEEEIGGLKELFKMIDTDNSGTITFEELKAGLKRVGSELMESEIKSLMDAADIDNSGTIDYGEFLAATLHMNKMEREENLVAAFSYFDKDGSGYITIDELQSACTEFGLCDTPLDDMIKEIDLDNDGKIDFSEFTAMMRKGDGVGRSRTMMKNLNFNIADAFGVDGEKSDD

SEQ ID NO: 83026 - protein, 495 aa, Arabidopsis thaliana
  peptide (1)..(495): Ceres Seq. ID no. 12668298
METKPNPRRPSNTVLPYQTPRLRDHYLLGKKLGQGQFGTTYLCTEKSTSANYACKSIPKRKLVCREDYEDVWREIQIMHHLSEHPNVVRIKGTYEDSVFVHIVMEVCEGGELFDRIVSKGHFSEREAVKLIKTILGVVEACHSLGVMHRDLKPENFLFDSPKDDAKLKATDFGLSVFYKPGQYLYDVVGSPYYVAPEVLKKCYGPEIDVWSAGVILYILLSGVPPFWAETESGIFRQILQGKLDFKSDPWPTISEAAKDLIYKMLERSPKKRISAHEALCHPWIVDEQAAPDKPLDPAVLSRLKQFSQMNKIKKMALRVIAERLSEEEIGGLKELFKMIDTDNSGTITFEELKAGLKRVGSELMESEIKSLMDAADIDNSGTIDYGEFLAATLHMNKMEREENLVAAFSYFDKDGSGYITIDELQSACTEFGLCDTPLDDMIKEIDLDNDGKIDFSEFTAMMRKGDGVGRSRTMMKNLNFNIADAFGVDGEKSDD

SEQ ID NO: 83027 - protein, 418 aa, Arabidopsis thaliana
  peptide (1)..(418): Ceres Seq. ID no. 12668299
MHHLSEHPNVVRIKGTYEDSVFVHIVMEVCEGGELFDRIVSKGHFSEREAVKLIKTILGVVEACHSLGVMHRDLKPENFLFDSPKDDAKLKATDFGLSVFYKPGQYLYDVVGSPYYVAPEVLKKCYGPEIDVWSAGVILYILLSGVPPFWAETESGIFRQILQGKLDFKSDPWPTISEAAKDLIYKMLERSPKKRISAHEALCHPWIVDEQAAPDKPLDPAVLSRLKQFSQMNKIKKMALRVIAERLSEEEIGGLKELFKMIDTDNSGTITFEELKAGLKRVGSELMESEIKSLMDAADIDNSGTIDYGEFLAATLHMNKMEREENLVAAFSYFDKDGSGYITIDELQSACTEFGLCDTPLDDMIKEIDLDNDGKIDFSEFTAMMRKGDGVGRSRTMMKNLNFNIADAFGVDGEKSDD

SEQ ID NO: 83028 - DNA, 3658 bp, Arabidopsis thaliana
  misc_feature (1)..(3658): Ceres Seq. ID no. 12668300
  misc_feature (1)..(3658): Ortholog of  Ceres SEQ ID NO 14314869 as cited in SEQ ID NO 58320
  misc_feature (1)..(3658): Ortholog of  Ceres SEQ ID NO 14313743 as cited in SEQ ID NO 59555
atgggttttgcagagaagaatctttatgattttcgttttcttttgttcatttccattattttgagctgttccatttcagcttctgcaactatcgcagaagcaaatgctcttctgaaatggaaatccactttcacgaactcatcaaaactgtcttcatgggtccatgatgcaaacaccaatactagcttttcctgcaccagttggtatggtgtttcttgcaactcacgagggagtatcgaagagttaaacctcactaacactggtatagaaggtactttccaagatttccccttcatttctctctcaaaccttgcttacgtagatcttagcatgaaccttttatctggaaccatccctcctcaattcggaaacctctctaaactcatctactttgacctctccacaaatcacttaaccggagaaatctctccttccttaggaaatctcaagaacttgacggtactttatcttcaccaaaactatctaactagtgtcattccctcggaactaggcaacatggaatccatgacagatttagcgctaagtcagaacaaacttaccggttcaattccttcttccttaggaaatctcaagaacttgatggttctttatctttacgagaactatctaactggtgtcattcccccggaactaggtaacatggaatccatgacagatttagctttaagtcagaacaaacttaccggttcaattccttctaccttaggaaatctcaagaacttgatggttctttatctttacgagaactatctaactggtgtcattcccccagaaataggcaacatggaatccatgacaaatttagcgctaagtcagaacaaacttactggttcaattccttcttccttaggtaatctcaagaacttgacgcttctttctcttttccagaactatctaactggtggcattcccccgaaactaggcaacatagaatccatgatcgatttagagttgagtaacaacaaacttaccggttcaattccttcttccttaggaaatctcaagaatttgactattctttatctttacgagaactatttaactggtgtcattcccccggaactaggcaacatggaatcgatgattgatttacagttgaataacaacaaacttaccggttcaattccttcttccttcggaaatctcaagaacttgacgtatctttatctttacctgaattatttaactggtgtcattccccaggagctaggcaacatggaatccatgatcaatttagatttaagtcagaacaaacttacaggttctgttcctgattcctttggtaactttaccaagctggaaagtttgtaccttcgtgttaaccacctctctggtgcgatcccgccaggagtagcaaactcttcacatctaactaccttgatacttgacaccaacaacttcactggtttctttcctgaaactgtttgcaaaggtaggaagcttcaaaatatctcattggattacaatcacctcgaaggtcctatcccgaaaagcttgagagattgcaagagcctgatcagagcaagatttctaggaaacaaattcactggcgatatttttgaagcttttgggatttacccagaccttaacttcattgatttcagccacaacaaattccacggtgagatttctagcaactgggagaagagtccaaagctaggtgccttgatcatgtcaaacaacaacatcacgggtgctatcccaacagagatttggaacatgacacaactagttgagctggatctatctaccaacaacctctttggtgaacttccagaagcaattggaaatctcacgaatttgtcgaggctacgacttaatgggaatcagttatctggaagagttcctgcaggtttaagtttcttaaccaatcttgagtctcttgacttatcctcaaacaatttcagctcagagatcccacaaacctttgactcctttttaaagcttcatgacatgaacctgagcagaaacaaattcgacggaagcattccccgactatcaaagctgactcagttaacgcaacttgatctcagccacaaccagctcgacggagaaatcccatcacaactaagctccctgcaaagcctcgacaagctcgacctctcacacaacaatctctcaggtctcattccaacaactttcgagggcatgatagcgctgacgaacgtcgatatatcaaacaataaactcgaaggtccgcttccagatactccaacgtttcgaaaagcaacagcagatgcattggaggaaaacataggcttatgcagtaatattcctaaacaaagattgaaaccatgccgtgagttgaagaaaccgaagaaaaatggcaaccttgttgtgtggatattagtgccaatcctaggagtactcgtcattctctctatatgtgcaaacacattcacctactgcattcggaaacgaaaactacaaaatggaagaaacacagatcctgaaacaggagagaatatgtccatattcagcgttgatggcaaattcaaataccaagatatcatcgaatcaacaaacgaattcgatccaacacacctcatcggaaccggaggatacagcaaagtctacagagcaaacctccaagatacaatcatagccgttaaacgactacatgacacaatagacgaagagatatcaaagccagttgtgaagcaagagttcctaaacgaggtaaaagcattaacagagatccgtcaccgcaacgttgtgaagctcttcggcttctgctcccaccgccgccacacatttctgatctacgagtacatggaaaaaggaagtttaaacaaactcttagccaacgacgaagaagctaagcgactcacttggaccaaaaggatcaacgtcgtgaaaggtgtggctcacgctttatcgtatatgcaccatgaccgaataacaccgatcgttcaccgtgatattagcagcggaaacatccttctcgataacgattacacagctaagatctccgattttggtacagcaaaacttctaaagacggattcatcaaactggtccgccgttgctggaacctacggctacgttgcaccagagtttgcttacacgatgaaggtgacggagaaatgcgatgtgtatagcttcggggttttgatactcgaattgataattgggaaacatccgggagatttggtatcgagtttgtcttcgtctccaggagaagctctgtcgctaagaagcatttccgatgaacgtgtattagaaccacggggacaaaatagagagaagctcttgaagatggtggaaatggctttattgtgtttacaagcaaatccagaatctcggccaacgatgttgtcaatctccactacattttcttagaaactgaacttctccatcaatttctatgttatcattgtgtttatctatacagcaacagtaatctctgttggcttttgttctctgttcttgcttgtgtttgcaggaaggggtgtcgactctcgtttcagcttttgttgttgttgtttgggcttctcggcctgcttcagcttttgtatgtattgggctgcgcccttgttggtctttgggccttgtttgtttttatctttgcggcttgcgtgccatgttaggccttttggtcttgtaatgtgtttggttaatggaaatctatgaagtt

SEQ ID NO: 83029 - protein, 1120 aa, Arabidopsis thaliana
  peptide (1)..(1120): Ceres Seq. ID no. 12668301
MGFAEKNLYDFRFLLFISIILSCSISASATIAEANALLKWKSTFTNSSKLSSWVHDANTNTSFSCTSWYGVSCNSRGSIEELNLTNTGIEGTFQDFPFISLSNLAYVDLSMNLLSGTIPPQFGNLSKLIYFDLSTNHLTGEISPSLGNLKNLTVLYLHQNYLTSVIPSELGNMESMTDLALSQNKLTGSIPSSLGNLKNLMVLYLYENYLTGVIPPELGNMESMTDLALSQNKLTGSIPSTLGNLKNLMVLYLYENYLTGVIPPEIGNMESMTNLALSQNKLTGSIPSSLGNLKNLTLLSLFQNYLTGGIPPKLGNIESMIDLELSNNKLTGSIPSSLGNLKNLTILYLYENYLTGVIPPELGNMESMIDLQLNNNKLTGSIPSSFGNLKNLTYLYLYLNYLTGVIPQELGNMESMINLDLSQNKLTGSVPDSFGNFTKLESLYLRVNHLSGAIPPGVANSSHLTTLILDTNNFTGFFPETVCKGRKLQNISLDYNHLEGPIPKSLRDCKSLIRARFLGNKFTGDIFEAFGIYPDLNFIDFSHNKFHGEISSNWEKSPKLGALIMSNNNITGAIPTEIWNMTQLVELDLSTNNLFGELPEAIGNLTNLSRLRLNGNQLSGRVPAGLSFLTNLESLDLSSNNFSSEIPQTFDSFLKLHDMNLSRNKFDGSIPRLSKLTQLTQLDLSHNQLDGEIPSQLSSLQSLDKLDLSHNNLSGLIPTTFEGMIALTNVDISNNKLEGPLPDTPTFRKATADALEENIGLCSNIPKQRLKPCRELKKPKKNGNLVVWILVPILGVLVILSICANTFTYCIRKRKLQNGRNTDPETGENMSIFSVDGKFKYQDIIESTNEFDPTHLIGTGGYSKVYRANLQDTIIAVKRLHDTIDEEISKPVVKQEFLNEVKALTEIRHRNVVKLFGFCSHRRHTFLIYEYMEKGSLNKLLANDEEAKRLTWTKRINVVKGVAHALSYMHHDRITPIVHRDISSGNILLDNDYTAKISDFGTAKLLKTDSSNWSAVAGTYGYVAPEFAYTMKVTEKCDVYSFGVLILELIIGKHPGDLVSSLSSSPGEALSLRSISDERVLEPRGQNREKLLKMVEMALLCLQANPESRPTMLSISTTFS

SEQ ID NO: 83030 - protein, 1010 aa, Arabidopsis thaliana
  peptide (1)..(1010): Ceres Seq. ID no. 12668302
MNLLSGTIPPQFGNLSKLIYFDLSTNHLTGEISPSLGNLKNLTVLYLHQNYLTSVIPSELGNMESMTDLALSQNKLTGSIPSSLGNLKNLMVLYLYENYLTGVIPPELGNMESMTDLALSQNKLTGSIPSTLGNLKNLMVLYLYENYLTGVIPPEIGNMESMTNLALSQNKLTGSIPSSLGNLKNLTLLSLFQNYLTGGIPPKLGNIESMIDLELSNNKLTGSIPSSLGNLKNLTILYLYENYLTGVIPPELGNMESMIDLQLNNNKLTGSIPSSFGNLKNLTYLYLYLNYLTGVIPQELGNMESMINLDLSQNKLTGSVPDSFGNFTKLESLYLRVNHLSGAIPPGVANSSHLTTLILDTNNFTGFFPETVCKGRKLQNISLDYNHLEGPIPKSLRDCKSLIRARFLGNKFTGDIFEAFGIYPDLNFIDFSHNKFHGEISSNWEKSPKLGALIMSNNNITGAIPTEIWNMTQLVELDLSTNNLFGELPEAIGNLTNLSRLRLNGNQLSGRVPAGLSFLTNLESLDLSSNNFSSEIPQTFDSFLKLHDMNLSRNKFDGSIPRLSKLTQLTQLDLSHNQLDGEIPSQLSSLQSLDKLDLSHNNLSGLIPTTFEGMIALTNVDISNNKLEGPLPDTPTFRKATADALEENIGLCSNIPKQRLKPCRELKKPKKNGNLVVWILVPILGVLVILSICANTFTYCIRKRKLQNGRNTDPETGENMSIFSVDGKFKYQDIIESTNEFDPTHLIGTGGYSKVYRANLQDTIIAVKRLHDTIDEEISKPVVKQEFLNEVKALTEIRHRNVVKLFGFCSHRRHTFLIYEYMEKGSLNKLLANDEEAKRLTWTKRINVVKGVAHALSYMHHDRITPIVHRDISSGNILLDNDYTAKISDFGTAKLLKTDSSNWSAVAGTYGYVAPEFAYTMKVTEKCDVYSFGVLILELIIGKHPGDLVSSLSSSPGEALSLRSISDERVLEPRGQNREKLLKMVEMALLCLQANPESRPTMLSISTTFS

SEQ ID NO: 83031 - protein, 948 aa, Arabidopsis thaliana
  peptide (1)..(948): Ceres Seq. ID no. 12668303
MESMTDLALSQNKLTGSIPSSLGNLKNLMVLYLYENYLTGVIPPELGNMESMTDLALSQNKLTGSIPSTLGNLKNLMVLYLYENYLTGVIPPEIGNMESMTNLALSQNKLTGSIPSSLGNLKNLTLLSLFQNYLTGGIPPKLGNIESMIDLELSNNKLTGSIPSSLGNLKNLTILYLYENYLTGVIPPELGNMESMIDLQLNNNKLTGSIPSSFGNLKNLTYLYLYLNYLTGVIPQELGNMESMINLDLSQNKLTGSVPDSFGNFTKLESLYLRVNHLSGAIPPGVANSSHLTTLILDTNNFTGFFPETVCKGRKLQNISLDYNHLEGPIPKSLRDCKSLIRARFLGNKFTGDIFEAFGIYPDLNFIDFSHNKFHGEISSNWEKSPKLGALIMSNNNITGAIPTEIWNMTQLVELDLSTNNLFGELPEAIGNLTNLSRLRLNGNQLSGRVPAGLSFLTNLESLDLSSNNFSSEIPQTFDSFLKLHDMNLSRNKFDGSIPRLSKLTQLTQLDLSHNQLDGEIPSQLSSLQSLDKLDLSHNNLSGLIPTTFEGMIALTNVDISNNKLEGPLPDTPTFRKATADALEENIGLCSNIPKQRLKPCRELKKPKKNGNLVVWILVPILGVLVILSICANTFTYCIRKRKLQNGRNTDPETGENMSIFSVDGKFKYQDIIESTNEFDPTHLIGTGGYSKVYRANLQDTIIAVKRLHDTIDEEISKPVVKQEFLNEVKALTEIRHRNVVKLFGFCSHRRHTFLIYEYMEKGSLNKLLANDEEAKRLTWTKRINVVKGVAHALSYMHHDRITPIVHRDISSGNILLDNDYTAKISDFGTAKLLKTDSSNWSAVAGTYGYVAPEFAYTMKVTEKCDVYSFGVLILELIIGKHPGDLVSSLSSSPGEALSLRSISDERVLEPRGQNREKLLKMVEMALLCLQANPESRPTMLSISTTFS

SEQ ID NO: 83032 - DNA, 1251 bp, Arabidopsis thaliana
  misc_feature (1)..(1251): Ceres Seq. ID no. 12668330
  misc_feature (1)..(1251): Ortholog of  Ceres SEQ ID NO 14313155 as cited in SEQ ID NO 54706
  misc_feature (1)..(1251): Ortholog of  Ceres SEQ ID NO 13639022 as cited in SEQ ID NO 59811
atggccgggatcttgaataaattgcggaatctagatgcatatcctaagatcaatgaagatttttacagccgtacattatccggcggagttatcactctcctctcctccgttgttatgttccttctcttcttctccgagctccgtacgtctttatcttcatacagtcaccgagacgaagcttatagtagatacttcaaggggagagacgttacgcatcaacgtaattttgatattacgtttcctgctctagcatgttcgattcttagtgttgatgctatggatattagtggagagcttcatcttgacgtgaaacatgatatcataaagagaagattagattctaatggcaacactatagaggcaagacaggacggaataggcgctactaagattgaaaacccactgcagaaacatggtggcaggctgggacataatgagacttactgtggttcttgctatggggctgaagcggtaattgtgttatctctctatttgactttgtggagcatggtttctcaactttcatctgaagtatgttttttccccgtgcaggaagagcatgactgctgcaattcgtgtgaggatgttcgtgaagcatatagaaagaaaggttggggggttactaatccagatttgattgaccagtgtaaacgagaaggttttctacaaagagtaaaggatgaagaaggtgaagggtgtaatatatatgggttcttggaggtcaataaggtggctgggaacttccactttgctcctgggaaaagctttcatcagtcgggcgtgcatgttcacgatcttcttgcttttcagaaagacagttttaacataagtcacaagatcaatagacttacttatggagactactttcctggcgtcgttaaccctcttgacaaagtcgagtggagtcaagacacacctaatgctatgtaccaatactttatcaaggttgtaccaacagtatacacagatatcagaggacacacaattcaatcgaatcagttctcagtgaccgaacatgtaaagagctcagaagcaggtcaactgcaatctttacctggagttttcttcttctatgatctctctccaatcaaggtaacatttacggaggaacacatatcattcttgcacttcttgacgaatgtttgcgccatagttggaggtgtcttcacagtgtccgggataatagacgcgtttatataccatggtcaaaaagctatcaagaagaagatggaaattggtaaatttagctaa

SEQ ID NO: 83033 - protein, 416 aa, Arabidopsis thaliana
  peptide (1)..(416): Ceres Seq. ID no. 12668331
MAGILNKLRNLDAYPKINEDFYSRTLSGGVITLLSSVVMFLLFFSELRTSLSSYSHRDEAYSRYFKGRDVTHQRNFDITFPALACSILSVDAMDISGELHLDVKHDIIKRRLDSNGNTIEARQDGIGATKIENPLQKHGGRLGHNETYCGSCYGAEAVIVLSLYLTLWSMVSQLSSEVCFFPVQEEHDCCNSCEDVREAYRKKGWGVTNPDLIDQCKREGFLQRVKDEEGEGCNIYGFLEVNKVAGNFHFAPGKSFHQSGVHVHDLLAFQKDSFNISHKINRLTYGDYFPGVVNPLDKVEWSQDTPNAMYQYFIKVVPTVYTDIRGHTIQSNQFSVTEHVKSSEAGQLQSLPGVFFFYDLSPIKVTFTEEHISFLHFLTNVCAIVGGVFTVSGIIDAFIYHGQKAIKKKMEIGKFS

SEQ ID NO: 83034 - protein, 378 aa, Arabidopsis thaliana
  peptide (1)..(378): Ceres Seq. ID no. 12668332
MFLLFFSELRTSLSSYSHRDEAYSRYFKGRDVTHQRNFDITFPALACSILSVDAMDISGELHLDVKHDIIKRRLDSNGNTIEARQDGIGATKIENPLQKHGGRLGHNETYCGSCYGAEAVIVLSLYLTLWSMVSQLSSEVCFFPVQEEHDCCNSCEDVREAYRKKGWGVTNPDLIDQCKREGFLQRVKDEEGEGCNIYGFLEVNKVAGNFHFAPGKSFHQSGVHVHDLLAFQKDSFNISHKINRLTYGDYFPGVVNPLDKVEWSQDTPNAMYQYFIKVVPTVYTDIRGHTIQSNQFSVTEHVKSSEAGQLQSLPGVFFFYDLSPIKVTFTEEHISFLHFLTNVCAIVGGVFTVSGIIDAFIYHGQKAIKKKMEIGKFS

SEQ ID NO: 83035 - protein, 324 aa, Arabidopsis thaliana
  peptide (1)..(324): Ceres Seq. ID no. 12668333
MDISGELHLDVKHDIIKRRLDSNGNTIEARQDGIGATKIENPLQKHGGRLGHNETYCGSCYGAEAVIVLSLYLTLWSMVSQLSSEVCFFPVQEEHDCCNSCEDVREAYRKKGWGVTNPDLIDQCKREGFLQRVKDEEGEGCNIYGFLEVNKVAGNFHFAPGKSFHQSGVHVHDLLAFQKDSFNISHKINRLTYGDYFPGVVNPLDKVEWSQDTPNAMYQYFIKVVPTVYTDIRGHTIQSNQFSVTEHVKSSEAGQLQSLPGVFFFYDLSPIKVTFTEEHISFLHFLTNVCAIVGGVFTVSGIIDAFIYHGQKAIKKKMEIGKFS

SEQ ID NO: 83036 - DNA, 3459 bp, Arabidopsis thaliana
  misc_feature (1)..(3459): Ceres Seq. ID no. 12668375
  misc_feature (1)..(3459): Ortholog of  Ceres SEQ ID NO 13595562 as cited in SEQ ID NO 59873
atgaccaaaccagtcgacggatctaccgctactacagcttcttctgaaaaggatgcaatctctgcatctccctactacttgcatccatcggatcatcctcatcatgttctcacacccatgttgttgaacggtgagaactatgaacgatgggctaaacttactcgcaacaacttgcaagccaaacaaaagcttggtttcatcgatggcaccctaacgaagccatcatctgactctccggactatccacggtggctgcagacaaactcgatgttagtaggctggttgtatgcaagtcttgatccccaggtgcagaaatcaatctctgttgttgataatgcacgagtcatgtgggaaagcttgcgaacccgatactctgttggtaacgcctctcgtgttcaccaattaaaatatgacatcgtagcttgtcgtcaagatgggcaaacagctgccaactattttggtaaactcaaagtcatgtgggatgacctagacgactacgaacctctcttaacttgttgttgtaatagaccatcatgcactcacagagttcgtcagagtcaacgacgtgatcatgaaaggattcatcaatttcttatgggacttgatgcagcaaaatttggcaccagtagaaccaatatattgggtcgtttaagtcgtgatgataatatttctctcgacagcatctactctgaaattattgcagaagaacgacatctaacaattacgaggagcaaagaagagcgtgttgatgctgtcggcttcgctgttcaaactggagttaatgcaattgcttcggtgactcgagtcaataatatgggtccatgtactcattgtgggagatcaaatcacagtgctgatacatgctttaagctacatggtgttcctgaatggtacactgaaaaatacggtgatactagctcaggccgtggtcgcgggcgcagcagcacaccacgtggcagaggaaggggacatggaaactcatacaaagccaacaatgctcaaacttctcatccgtcatcctctgcttcagaattttctgacattccaggcgttagcaaagaggcatggtctgctatcagaaatctgctgaaacaagacacagctacttcatcagaaaaactctctggtaagacaaattgtgtcgattttctaattgattcaggcgcctcacatcacatgactggttttctggatttgctcactgagatttacgaaatccctcatagtgttgttgtgctacctaacgctaaacatactattgctaccaaaaaaggcaccctaatactcggtgcaaatatgaaacttacacatgttttatttgtacctgatctctcctgcacactcatctctgtggctcgtcttctgcgtgagttgcattgcttcgcaatattcactgataaagtttgcgtgatacaggaccgtacttccaagatgctgattggggttgggacagagagtaatggagtctatcatttacaaagagctgaagtcgttgcaacaagtgctaatgtggtgaagtggaaaaccaataaagctttgtggcatatgcgactaggccatccatcttcgaaagttttatcttctgttttgccatctttagaggattttgatagttgtagttctgatttaaagacgatttgtgacgtttgtgttcgagccaaacaaactcgtgcaagtttttctgaaagtttcaataaagccgaagagtgtttttcttttattcactatgatgtttggggaccatacaaacatgcttcctcttgcggagctcattactttctaactattgttgatgatcactctagagcggtttggatacatctcatgcttgctaagagtgaggttgcctctctccttcaacagttcattgcaatggcgtcccgacaattcaacaaacaagttaaaacagtaagaagcaataatggcactgaatttatgagtctcaaatcatattttgctgaacgaggaattgttcatcaaatctcttgtgtctatacacatcagcaaaatggacgtgtcgagcgtaagcatagacacatcttgaatgtagcacgttcactcttatttcaagcagaacttcccattagcttctgggaagaaagtgttcttacagccgcctacctcataaatcgaactcctactccaattctagatggcaaaaccccatacaagattctctactcacaaccaccgtcttatgcttcacttcgtgtctttggcagcctctgttttgcaagaaaacacactggtcgtttggataaatttcaagagagaggacgaaaatgcatattcgttggctatccccatggacaaaaaggttggcgtatttatgatattgaatcacaaattttttttgtctctcgcgatgtggtctttcaggaagatattttcccatttgctgacaaaaagaataaagatacattctcttcacctgctgccgtcattccatctccaattttgccatatgatgatgaattccttgacatataccaaattggtgacgttcccgctacgaatcctctcccggctattattgatgtcaacgactcacctccaagctctcctataattactgcaacaccggctgctgcatcacctcctcctcttcgtcgcggtttacgtcaaagacaagaaaatgtgcgcctaaaagactatcaaacttattcggctcaatgtgagtcaactcaaactctgtccgacaacattggtacgtgtatctaccccatggccaactatgtatcgggtgaaatattctctccaagtaatcaacacttcttagctgccattagtatggttgatcctcctcagacttataatcaagccattcgagagaaagaatggcgtaatgcagttttttttgaagtcgatgctcttgaagatcaaggaacttgggatattaccaaacttccgcaaggagttaaagctattggatcaaagtgggtatttcgtatcaagtataactctaatggtaccgtcgaacgttacaaagcgcgtcttgtggctttaggcaatcatcaaaaggaaggtattgatttcacaaagacatttgctccagttgtcaaaatgcaaacagtgagacttttattggatgttgcggcagcaaaggactgggaacttcatcaaatggatgttcataacgcttttcttcatggtgatttaaaagaagacatctatatgaaaccacctccgggttttaaaacaacagatccatctcttgtatgcaagctcaagaaatctatctatggtttgaaacaagcgcctcgttgctggttcgaaaagttgtctacatctctactcaagtttggttttactcagtctaagaaagattattctcttttcacatcaattcggggatccaaagttcttcatgtcattgtctacgtcgatgatgtagtcatttgcggaaaggctgtccgggaaaataatacctcaaaactcgctctcgggtcgtcaccctaa

SEQ ID NO: 83037 - protein, 1152 aa, Arabidopsis thaliana
  peptide (1)..(1152): Ceres Seq. ID no. 12668376
MTKPVDGSTATTASSEKDAISASPYYLHPSDHPHHVLTPMLLNGENYERWAKLTRNNLQAKQKLGFIDGTLTKPSSDSPDYPRWLQTNSMLVGWLYASLDPQVQKSISVVDNARVMWESLRTRYSVGNASRVHQLKYDIVACRQDGQTAANYFGKLKVMWDDLDDYEPLLTCCCNRPSCTHRVRQSQRRDHERIHQFLMGLDAAKFGTSRTNILGRLSRDDNISLDSIYSEIIAEERHLTITRSKEERVDAVGFAVQTGVNAIASVTRVNNMGPCTHCGRSNHSADTCFKLHGVPEWYTEKYGDTSSGRGRGRSSTPRGRGRGHGNSYKANNAQTSHPSSSASEFSDIPGVSKEAWSAIRNLLKQDTATSSEKLSGKTNCVDFLIDSGASHHMTGFLDLLTEIYEIPHSVVVLPNAKHTIATKKGTLILGANMKLTHVLFVPDLSCTLISVARLLRELHCFAIFTDKVCVIQDRTSKMLIGVGTESNGVYHLQRAEVVATSANVVKWKTNKALWHMRLGHPSSKVLSSVLPSLEDFDSCSSDLKTICDVCVRAKQTRASFSESFNKAEECFSFIHYDVWGPYKHASSCGAHYFLTIVDDHSRAVWIHLMLAKSEVASLLQQFIAMASRQFNKQVKTVRSNNGTEFMSLKSYFAERGIVHQISCVYTHQQNGRVERKHRHILNVARSLLFQAELPISFWEESVLTAAYLINRTPTPILDGKTPYKILYSQPPSYASLRVFGSLCFARKHTGRLDKFQERGRKCIFVGYPHGQKGWRIYDIESQIFFVSRDVVFQEDIFPFADKKNKDTFSSPAAVIPSPILPYDDEFLDIYQIGDVPATNPLPAIIDVNDSPPSSPIITATPAAASPPPLRRGLRQRQENVRLKDYQTYSAQCESTQTLSDNIGTCIYPMANYVSGEIFSPSNQHFLAAISMVDPPQTYNQAIREKEWRNAVFFEVDALEDQGTWDITKLPQGVKAIGSKWVFRIKYNSNGTVERYKARLVALGNHQKEGIDFTKTFAPVVKMQTVRLLLDVAAAKDWELHQMDVHNAFLHGDLKEDIYMKPPPGFKTTDPSLVCKLKKSIYGLKQAPRCWFEKLSTSLLKFGFTQSKKDYSLFTSIRGSKVLHVIVYVDDVVICGKAVRENNTSKLALGSSP

SEQ ID NO: 83038 - protein, 1113 aa, Arabidopsis thaliana
  peptide (1)..(1113): Ceres Seq. ID no. 12668377
MLLNGENYERWAKLTRNNLQAKQKLGFIDGTLTKPSSDSPDYPRWLQTNSMLVGWLYASLDPQVQKSISVVDNARVMWESLRTRYSVGNASRVHQLKYDIVACRQDGQTAANYFGKLKVMWDDLDDYEPLLTCCCNRPSCTHRVRQSQRRDHERIHQFLMGLDAAKFGTSRTNILGRLSRDDNISLDSIYSEIIAEERHLTITRSKEERVDAVGFAVQTGVNAIASVTRVNNMGPCTHCGRSNHSADTCFKLHGVPEWYTEKYGDTSSGRGRGRSSTPRGRGRGHGNSYKANNAQTSHPSSSASEFSDIPGVSKEAWSAIRNLLKQDTATSSEKLSGKTNCVDFLIDSGASHHMTGFLDLLTEIYEIPHSVVVLPNAKHTIATKKGTLILGANMKLTHVLFVPDLSCTLISVARLLRELHCFAIFTDKVCVIQDRTSKMLIGVGTESNGVYHLQRAEVVATSANVVKWKTNKALWHMRLGHPSSKVLSSVLPSLEDFDSCSSDLKTICDVCVRAKQTRASFSESFNKAEECFSFIHYDVWGPYKHASSCGAHYFLTIVDDHSRAVWIHLMLAKSEVASLLQQFIAMASRQFNKQVKTVRSNNGTEFMSLKSYFAERGIVHQISCVYTHQQNGRVERKHRHILNVARSLLFQAELPISFWEESVLTAAYLINRTPTPILDGKTPYKILYSQPPSYASLRVFGSLCFARKHTGRLDKFQERGRKCIFVGYPHGQKGWRIYDIESQIFFVSRDVVFQEDIFPFADKKNKDTFSSPAAVIPSPILPYDDEFLDIYQIGDVPATNPLPAIIDVNDSPPSSPIITATPAAASPPPLRRGLRQRQENVRLKDYQTYSAQCESTQTLSDNIGTCIYPMANYVSGEIFSPSNQHFLAAISMVDPPQTYNQAIREKEWRNAVFFEVDALEDQGTWDITKLPQGVKAIGSKWVFRIKYNSNGTVERYKARLVALGNHQKEGIDFTKTFAPVVKMQTVRLLLDVAAAKDWELHQMDVHNAFLHGDLKEDIYMKPPPGFKTTDPSLVCKLKKSIYGLKQAPRCWFEKLSTSLLKFGFTQSKKDYSLFTSIRGSKVLHVIVYVDDVVICGKAVRENNTSKLALGSSP

SEQ ID NO: 83039 - protein, 1063 aa, Arabidopsis thaliana
  peptide (1)..(1063): Ceres Seq. ID no. 12668378
MLVGWLYASLDPQVQKSISVVDNARVMWESLRTRYSVGNASRVHQLKYDIVACRQDGQTAANYFGKLKVMWDDLDDYEPLLTCCCNRPSCTHRVRQSQRRDHERIHQFLMGLDAAKFGTSRTNILGRLSRDDNISLDSIYSEIIAEERHLTITRSKEERVDAVGFAVQTGVNAIASVTRVNNMGPCTHCGRSNHSADTCFKLHGVPEWYTEKYGDTSSGRGRGRSSTPRGRGRGHGNSYKANNAQTSHPSSSASEFSDIPGVSKEAWSAIRNLLKQDTATSSEKLSGKTNCVDFLIDSGASHHMTGFLDLLTEIYEIPHSVVVLPNAKHTIATKKGTLILGANMKLTHVLFVPDLSCTLISVARLLRELHCFAIFTDKVCVIQDRTSKMLIGVGTESNGVYHLQRAEVVATSANVVKWKTNKALWHMRLGHPSSKVLSSVLPSLEDFDSCSSDLKTICDVCVRAKQTRASFSESFNKAEECFSFIHYDVWGPYKHASSCGAHYFLTIVDDHSRAVWIHLMLAKSEVASLLQQFIAMASRQFNKQVKTVRSNNGTEFMSLKSYFAERGIVHQISCVYTHQQNGRVERKHRHILNVARSLLFQAELPISFWEESVLTAAYLINRTPTPILDGKTPYKILYSQPPSYASLRVFGSLCFARKHTGRLDKFQERGRKCIFVGYPHGQKGWRIYDIESQIFFVSRDVVFQEDIFPFADKKNKDTFSSPAAVIPSPILPYDDEFLDIYQIGDVPATNPLPAIIDVNDSPPSSPIITATPAAASPPPLRRGLRQRQENVRLKDYQTYSAQCESTQTLSDNIGTCIYPMANYVSGEIFSPSNQHFLAAISMVDPPQTYNQAIREKEWRNAVFFEVDALEDQGTWDITKLPQGVKAIGSKWVFRIKYNSNGTVERYKARLVALGNHQKEGIDFTKTFAPVVKMQTVRLLLDVAAAKDWELHQMDVHNAFLHGDLKEDIYMKPPPGFKTTDPSLVCKLKKSIYGLKQAPRCWFEKLSTSLLKFGFTQSKKDYSLFTSIRGSKVLHVIVYVDDVVICGKAVRENNTSKLALGSSP

SEQ ID NO: 83040 - DNA, 651 bp, Arabidopsis thaliana
  misc_feature (1)..(651): Ceres Seq. ID no. 12668487
  misc_feature (1)..(651): Ortholog of  Ceres SEQ ID NO 13639514 as cited in SEQ ID NO 55736
  misc_feature (1)..(651): Ortholog of  Ceres SEQ ID NO 13662804 as cited in SEQ ID NO 65394
  misc_feature (1)..(651): Ortholog of  Ceres SEQ ID NO 13656519 as cited in SEQ ID NO 69226
atggagaacgacgacgtaatgactccgccatggctaacaccaatgcttcgagctgattacttcgtgacttgttcgattcattcacaatcgagtaaaagtgaatgtaatctgttttgtttggattgttcaggcaatgccttttgttcttcttgtctcgctcatcacagaacccatcgtgttatccagattcgacgatcgtcgtatcataatgtggtgagagtgagtgagattcaaaaacatattgatatctcttgtattcagacttatgttatcaatagtgctaagatcttcttcttaaacgcgagacctcaatgtcgaactggtaaaagcttaaacaaaacatgtcagatctgttctcgtaaccttctcgattcgttcctgttctgttctcttgcttgtaagcttgaaggtgtgaagaatggagaggatccaaacctgactttatttcatagtggaaagagtgatgactcgtcgaagatcatcaataccgggatttgtagccgtttgatcgacgggatctcgattgcggttgacgaccaacgcagcgaaaccgcgggtgtgttatctccagagacaccttcaatagaaagccaccggaattacccaatgaagagtagaagaaagggtatacctcaacgagcacctttctaa

SEQ ID NO: 83041 - protein, 216 aa, Arabidopsis thaliana
  peptide (1)..(216): Ceres Seq. ID no. 12668488
MENDDVMTPPWLTPMLRADYFVTCSIHSQSSKSECNLFCLDCSGNAFCSSCLAHHRTHRVIQIRRSSYHNVVRVSEIQKHIDISCIQTYVINSAKIFFLNARPQCRTGKSLNKTCQICSRNLLDSFLFCSLACKLEGVKNGEDPNLTLFHSGKSDDSSKIINTGICSRLIDGISIAVDDQRSETAGVLSPETPSIESHRNYPMKSRRKGIPQRAPF

SEQ ID NO: 83042 - protein, 210 aa, Arabidopsis thaliana
  peptide (1)..(210): Ceres Seq. ID no. 12668489
MTPPWLTPMLRADYFVTCSIHSQSSKSECNLFCLDCSGNAFCSSCLAHHRTHRVIQIRRSSYHNVVRVSEIQKHIDISCIQTYVINSAKIFFLNARPQCRTGKSLNKTCQICSRNLLDSFLFCSLACKLEGVKNGEDPNLTLFHSGKSDDSSKIINTGICSRLIDGISIAVDDQRSETAGVLSPETPSIESHRNYPMKSRRKGIPQRAPF

SEQ ID NO: 83043 - protein, 202 aa, Arabidopsis thaliana
  peptide (1)..(202): Ceres Seq. ID no. 12668490
MLRADYFVTCSIHSQSSKSECNLFCLDCSGNAFCSSCLAHHRTHRVIQIRRSSYHNVVRVSEIQKHIDISCIQTYVINSAKIFFLNARPQCRTGKSLNKTCQICSRNLLDSFLFCSLACKLEGVKNGEDPNLTLFHSGKSDDSSKIINTGICSRLIDGISIAVDDQRSETAGVLSPETPSIESHRNYPMKSRRKGIPQRAPF

SEQ ID NO: 83044 - DNA, 1445 bp, Arabidopsis thaliana
  misc_feature (1)..(1445): Ceres Seq. ID no. 12668498
  misc_feature (1)..(1445): Ortholog of  Ceres SEQ ID NO 13592961 as cited in SEQ ID NO 20522
  misc_feature (1)..(1445): Ortholog of  Ceres SEQ ID NO 12583469 as cited in SEQ ID NO 51031
  misc_feature (1)..(1445): Ortholog of  Ceres SEQ ID NO 13596527 as cited in SEQ ID NO 62582
  misc_feature (1)..(1445): Ortholog of  Ceres SEQ ID NO 15226378 as cited in SEQ ID NO 62741
  misc_feature (1)..(1445): Ortholog of  Ceres SEQ ID NO 13597389 as cited in SEQ ID NO 63426
  misc_feature (1)..(1445): Ortholog of  Ceres SEQ ID NO 15169639 as cited in SEQ ID NO 64624
  misc_feature (1)..(1445): Ortholog of  Ceres SEQ ID NO 13595998 as cited in SEQ ID NO 68161
  misc_feature (1)..(1445): Ortholog of  Ceres SEQ ID NO 14303635 as cited in SEQ ID NO 68503
atggcatctttagattctcttccggcgatgaagctcgtgagattcatattatctacccttttggtcacttctgtgaactcgcaaacgcaatgccggaatttcaaatcaatcattagtttcggagattcaattgctgacactggaaacttgcttggtctctcggatcctaacgatcttcctgcttccgcgtttccgccatacggagaaaccttcttccaccacccaaccggtcgttactccgacggccgcctcatcattgatttcattgctgaattcttggggtttccgcttgtgcctcctttttatggatgtcaaaatgcaaactttaaaaagggagttaatttcgcggtcgcgggagcaactgcattagaaccttcctttctagaggagagaggaattcattctactatcaccaacgtcagtctaagcgttcagcttaggagcttcacggaaagtttacctaacttatgtggctcaccttcagattgtagagatatgattgaaaatgctttgatactcatgggagagatcggaggaaatgattataattttgcactcttccaacgcaaacccgttaaggaagttgaagagctggtaccgtttgtgatcgctactatttcttctgcaatcacggaattggtttgcatgggaggaagaacattcctagttcctggaaatttcccgatcggatactcagcatcctatttgacattatacaaaacatcaaacaaggaagagtatgatcctctaacaggatgtttgaaatggcttaacgatttctcagaatactacaataagcagcttcaggaagaactcaacggactcaggaagttgtaccctcatgtcaacatcatatatgctgattactacaacgctttgttgcgccttttccaagaaccagccaaattcgggtttatgaacagacccttgcccgcttgttgcggtgtaggaggatcttacaacttcaactttagtagaagatgtgggagtgtaggagttgaatactgcgatgatccttcacagtatgtgaattatgatggcattcatatgacggaggcggcatacagattgatatctgagggcttactcaagggaccgtatgctattcctcctttcaagtggtcttgcctcagctccgagattatgaataagatgtcattagatactcagattcttgatgaacagctactacaaggttgtctgaaagtttgagagacaagagaaagagtggaaaaaacatataggttcttaagtgtttgtgtcttcttcttttttgttccgggtaacggtgttaattagccttaggtgcatcatgcatgtgttggatcatgtattatctttgtattgtattgttttcgttagtttgggtaagagttagtatccttaattgttggaccatgtacactgtcatatataatttaactatatacaaaacaattaaatgc

SEQ ID NO: 83045 - protein, 403 aa, Arabidopsis thaliana
  peptide (1)..(403): Ceres Seq. ID no. 12668499
MASLDSLPAMKLVRFILSTLLVTSVNSQTQCRNFKSIISFGDSIADTGNLLGLSDPNDLPASAFPPYGETFFHHPTGRYSDGRLIIDFIAEFLGFPLVPPFYGCQNANFKKGVNFAVAGATALEPSFLEERGIHSTITNVSLSVQLRSFTESLPNLCGSPSDCRDMIENALILMGEIGGNDYNFALFQRKPVKEVEELVPFVIATISSAITELVCMGGRTFLVPGNFPIGYSASYLTLYKTSNKEEYDPLTGCLKWLNDFSEYYNKQLQEELNGLRKLYPHVNIIYADYYNALLRLFQEPAKFGFMNRPLPACCGVGGSYNFNFSRRCGSVGVEYCDDPSQYVNYDGIHMTEAAYRLISEGLLKGPYAIPPFKWSCLSSEIMNKMSLDTQILDEQLLQGCLKV

SEQ ID NO: 83046 - protein, 394 aa, Arabidopsis thaliana
  peptide (1)..(394): Ceres Seq. ID no. 12668500
MKLVRFILSTLLVTSVNSQTQCRNFKSIISFGDSIADTGNLLGLSDPNDLPASAFPPYGETFFHHPTGRYSDGRLIIDFIAEFLGFPLVPPFYGCQNANFKKGVNFAVAGATALEPSFLEERGIHSTITNVSLSVQLRSFTESLPNLCGSPSDCRDMIENALILMGEIGGNDYNFALFQRKPVKEVEELVPFVIATISSAITELVCMGGRTFLVPGNFPIGYSASYLTLYKTSNKEEYDPLTGCLKWLNDFSEYYNKQLQEELNGLRKLYPHVNIIYADYYNALLRLFQEPAKFGFMNRPLPACCGVGGSYNFNFSRRCGSVGVEYCDDPSQYVNYDGIHMTEAAYRLISEGLLKGPYAIPPFKWSCLSSEIMNKMSLDTQILDEQLLQGCLKV

SEQ ID NO: 83047 - protein, 238 aa, Arabidopsis thaliana
  peptide (1)..(238): Ceres Seq. ID no. 12668501
MIENALILMGEIGGNDYNFALFQRKPVKEVEELVPFVIATISSAITELVCMGGRTFLVPGNFPIGYSASYLTLYKTSNKEEYDPLTGCLKWLNDFSEYYNKQLQEELNGLRKLYPHVNIIYADYYNALLRLFQEPAKFGFMNRPLPACCGVGGSYNFNFSRRCGSVGVEYCDDPSQYVNYDGIHMTEAAYRLISEGLLKGPYAIPPFKWSCLSSEIMNKMSLDTQILDEQLLQGCLKV

SEQ ID NO: 83048 - DNA, 1532 bp, Arabidopsis thaliana
  misc_feature (1)..(1532): Ceres Seq. ID no. 12668502
  misc_feature (1)..(1532): Ortholog of  Ceres SEQ ID NO 13592961 as cited in SEQ ID NO 20522
  misc_feature (1)..(1532): Ortholog of  Ceres SEQ ID NO 13595998 as cited in SEQ ID NO 68161
accgcggacttctcgtatggcgtcactagattctctagtgagcttctttttatctaccctttttgtcacaatcgtgagctcacaaacgcagtgccggaatctcgagtcgattatcagtttcggtgattcgattaccgacacaggaaacttggttggtctctcggatcgtaaccatcttcctgtgaccgcgtttctgccgtatggagaaaccttcttccaccacccaactggccgttcctgcaacggccgtatcatcatcgactttatcgctgaattcttagggttaccgcatgtgcctcctttttatggatctaaaaatggaaactttgagaaaggagttaatttcgctgttgcgggagcaacggcactagaaacttccattcttgagaagagaggaatttattatcctcacagcaacatcagtttgggaattcagcttaagaccttcaaggagagcttaccaaatctatgtggttcacctacagattgtagagatatgattggaaatgcttttattatcatgggagagattggagggaatgattttaatttcgcattctttgtgaacaaaaccagtgaggtcaaagagttggttccgttggtgatcactaaaatttcttctgcaattgtggtaaacattcttgatcagcgagtccctagaacgagtaattttttcaaaaaactgttatgttttttgttttgtttttgtgttttggtactgaatgttgaatctaggagttggtcgatatgggaggaagaacattcctagttcctggaaacttcccgctcggatgctcagcaacgtatttaacattataccaaacatcaaacaaggaagagtatgatcctctaacaggatgtttgacatggctgaacgatttttcagaatactacaacgagaagcttcaggcagaactcaacagactcagtaaactttaccctcatgtcaacatcatatatggtgactactttaatgctctgttgcgcctttaccaagaaccatccaaatttgggttcatggacagacccttacctgcttgttgcggtttaggaggaccgtacaacttcaccttaagtaaaaaatgtgggagtgtaggagtaaaatattgtagtgatccttcaaagtatgtgaattgggacggcgttcatatgactgaagctgcatacaaatggatagctgatggattactcaagggtccgtatacgattccttcgttccattggttatgcctcggctcaaaaattaagagcaaggagtcattagacacgtagtgttcttttgacaaacagctgaaacaagcttgttggagctctgagagataataagaaaacaaatacgttcttaagtgctttccatggatattttatatcattgtgtattgttgtttgagagagagagagagagtggttaagtgttagtagctaactcatgtgatatcttcagagagatcttagattagaccggtcggagatgcactgttccaaaaatggaccacttcatgagtggtagaaataacagaataggagatgat

SEQ ID NO: 83049 - protein, 255 aa, Arabidopsis thaliana
  peptide (1)..(255): Ceres Seq. ID no. 12668503
PRTSRMASLDSLVSFFLSTLFVTIVSSQTQCRNLESIISFGDSITDTGNLVGLSDRNHLPVTAFLPYGETFFHHPTGRSCNGRIIIDFIAEFLGLPHVPPFYGSKNGNFEKGVNFAVAGATALETSILEKRGIYYPHSNISLGIQLKTFKESLPNLCGSPTDCRDMIGNAFIIMGEIGGNDFNFAFFVNKTSEVKELVPLVITKISSAIVVNILDQRVPRTSNFFKKLLCFLFCFCVLVLNVESRSWSIWEEEHS

SEQ ID NO: 83050 - protein, 250 aa, Arabidopsis thaliana
  peptide (1)..(250): Ceres Seq. ID no. 12668504
MASLDSLVSFFLSTLFVTIVSSQTQCRNLESIISFGDSITDTGNLVGLSDRNHLPVTAFLPYGETFFHHPTGRSCNGRIIIDFIAEFLGLPHVPPFYGSKNGNFEKGVNFAVAGATALETSILEKRGIYYPHSNISLGIQLKTFKESLPNLCGSPTDCRDMIGNAFIIMGEIGGNDFNFAFFVNKTSEVKELVPLVITKISSAIVVNILDQRVPRTSNFFKKLLCFLFCFCVLVLNVESRSWSIWEEEHS

SEQ ID NO: 83051 - protein, 174 aa, Arabidopsis thaliana
  peptide (1)..(174): Ceres Seq. ID no. 12668505
MGGRTFLVPGNFPLGCSATYLTLYQTSNKEEYDPLTGCLTWLNDFSEYYNEKLQAELNRLSKLYPHVNIIYGDYFNALLRLYQEPSKFGFMDRPLPACCGLGGPYNFTLSKKCGSVGVKYCSDPSKYVNWDGVHMTEAAYKWIADGLLKGPYTIPSFHWLCLGSKIKSKESLDT

SEQ ID NO: 83052 - DNA, 1173 bp, Arabidopsis thaliana
  misc_feature (1)..(1173): Ceres Seq. ID no. 12668506
  misc_feature (1)..(1173): Ortholog of  Ceres SEQ ID NO 13592961 as cited in SEQ ID NO 20522
  misc_feature (1)..(1173): Ortholog of  Ceres SEQ ID NO 12583469 as cited in SEQ ID NO 51031
  misc_feature (1)..(1173): Ortholog of  Ceres SEQ ID NO 13597389 as cited in SEQ ID NO 63426
  misc_feature (1)..(1173): Ortholog of  Ceres SEQ ID NO 13595998 as cited in SEQ ID NO 68161
atggcttcttcactggagaagcttatttcaagctttctacttgtcttgtactccaccaccatcattgttgcttcatcagaatctcgatgtaggcgttttaaatcgatcatcagctttggtgattccatcgccgacaccggaaattatctccatctctctgatgttaaccaccttcctcaatccgcctttcttccttatggcgaaagcttcttccatcctccctccggccgttactcggacggccgtctcatcatcgactttatagctgaattcttgggactaccgtacgtaccatcttattttggatcccaaaacgtgagctttgatcaaggtatcaatttcgcggtgtatggtgcaactgcattggatcgtgtgtttcttgtgggaaaaggaattgaatctgatttcaccaatgttagtttaagtgttcagcttaacatcttcaaacagattttacctaatctttgcacctcgtcttctcgtgattgcagagagatgcttggagactcgctgatacttatgggtgagattggagtaaatgactataattaccctttctttgaaggcaaaagtatcaatgaaatcaaacagcttgttcctctagtcatcaaagctatttcttctgctattgtggatttgattgatttagggggcaaaacgtttctggtccctggaaacttcccattaggatgctatcccgcgtatctcactctatttcagaccgcggcagaagaagaccacgaccctttcacaggttgtatcccacggctcaatgaattcggagagtaccacaacgaacagctcaagacagaactcaaaagactccaagaactatacgatcatgtcaatatcatttacgccgactactacaactctttgttccggttatatcaagaaccagtcaaatatgggtttaagaacagacctttggctgcttgttgcggagtcggaggtcaatacaacttcactattggtaaagagtgtggacacagaggagttagctgttgtcaaaatccttctgaatatgtgaattgggacggttatcatttaaccgaggccacacaccagaagatggctcaagttatactcaacggtacctatgcatcacctgctttcgactggtcctgctctggctctgaatcagtggataaagagtattctttcagcagttaa

SEQ ID NO: 83053 - protein, 390 aa, Arabidopsis thaliana
  peptide (1)..(390): Ceres Seq. ID no. 12668507
MASSLEKLISSFLLVLYSTTIIVASSESRCRRFKSIISFGDSIADTGNYLHLSDVNHLPQSAFLPYGESFFHPPSGRYSDGRLIIDFIAEFLGLPYVPSYFGSQNVSFDQGINFAVYGATALDRVFLVGKGIESDFTNVSLSVQLNIFKQILPNLCTSSSRDCREMLGDSLILMGEIGVNDYNYPFFEGKSINEIKQLVPLVIKAISSAIVDLIDLGGKTFLVPGNFPLGCYPAYLTLFQTAAEEDHDPFTGCIPRLNEFGEYHNEQLKTELKRLQELYDHVNIIYADYYNSLFRLYQEPVKYGFKNRPLAACCGVGGQYNFTIGKECGHRGVSCCQNPSEYVNWDGYHLTEATHQKMAQVILNGTYASPAFDWSCSGSESVDKEYSFSS

SEQ ID NO: 83054 - protein, 225 aa, Arabidopsis thaliana
  peptide (1)..(225): Ceres Seq. ID no. 12668508
MLGDSLILMGEIGVNDYNYPFFEGKSINEIKQLVPLVIKAISSAIVDLIDLGGKTFLVPGNFPLGCYPAYLTLFQTAAEEDHDPFTGCIPRLNEFGEYHNEQLKTELKRLQELYDHVNIIYADYYNSLFRLYQEPVKYGFKNRPLAACCGVGGQYNFTIGKECGHRGVSCCQNPSEYVNWDGYHLTEATHQKMAQVILNGTYASPAFDWSCSGSESVDKEYSFSS

SEQ ID NO: 83055 - protein, 217 aa, Arabidopsis thaliana
  peptide (1)..(217): Ceres Seq. ID no. 12668509
MGEIGVNDYNYPFFEGKSINEIKQLVPLVIKAISSAIVDLIDLGGKTFLVPGNFPLGCYPAYLTLFQTAAEEDHDPFTGCIPRLNEFGEYHNEQLKTELKRLQELYDHVNIIYADYYNSLFRLYQEPVKYGFKNRPLAACCGVGGQYNFTIGKECGHRGVSCCQNPSEYVNWDGYHLTEATHQKMAQVILNGTYASPAFDWSCSGSESVDKEYSFSS

SEQ ID NO: 83056 - DNA, 924 bp, Arabidopsis thaliana
  misc_feature (1)..(924): Ceres Seq. ID no. 12668522
  misc_feature (1)..(924): Ortholog of  Ceres SEQ ID NO 13656797 as cited in SEQ ID NO 65756
  misc_feature (1)..(924): Ortholog of  Ceres SEQ ID NO 13658498 as cited in SEQ ID NO 66557
atgacttcctacaataactcctccggcagtctcgccctggccgttgctcttctatttgccggcgccttatatatctacttctcatcacgttcagcttctgatcccatctccggtctcctacaaaatgtcaacactagattgatacagtatccggtggacgagctagagacggtgctggacaaggcgtcgacagggaacaacaagacggtgataatagcaatggtgaacaaagcttacgtggaggaggatggaggagggaggacgatgctggatctgtttttggagagtttttgggaaggagaggggacacgcccgcttcttaaccatctgatggtggttgcagcggatcagacggcctacgatcgctgcctcttcaggaggctccattgctacaagatggatacggaaggggttgacttggagggagagaaagatacggacgtgatgtggctaaggagtcccttgtcccggctaaacgtgagcttggatatgcatataagcgtggacagaaataacgtgagaggacaattgatcaacacgggattctaccatgcccggtccaacaacaagaccatctccctcttccagaaatggtacgacatgaggctcaagtctttgggcatgaaggaacaagacgtcctcaagaatctcctagactctggcttctttaaccagcttggtctcaacgttggcttcctcagtacggccgaattcagcggtttctgccaagacagccctgacatgggggctgtcacaaccgtccacgccaactgttgcgtccacatccctgctaagatctctgatctcagtcttgctcttcgtgactggaaacgctacaaagcctcccgtgtcaacagcaggtggagcccccatgttgagtgcaggcgttcatggaaggacgttcattatgtccccaagctctga

SEQ ID NO: 83057 - protein, 307 aa, Arabidopsis thaliana
  peptide (1)..(307): Ceres Seq. ID no. 12668523
MTSYNNSSGSLALAVALLFAGALYIYFSSRSASDPISGLLQNVNTRLIQYPVDELETVLDKASTGNNKTVIIAMVNKAYVEEDGGGRTMLDLFLESFWEGEGTRPLLNHLMVVAADQTAYDRCLFRRLHCYKMDTEGVDLEGEKDTDVMWLRSPLSRLNVSLDMHISVDRNNVRGQLINTGFYHARSNNKTISLFQKWYDMRLKSLGMKEQDVLKNLLDSGFFNQLGLNVGFLSTAEFSGFCQDSPDMGAVTTVHANCCVHIPAKISDLSLALRDWKRYKASRVNSRWSPHVECRRSWKDVHYVPKL

SEQ ID NO: 83058 - protein, 234 aa, Arabidopsis thaliana
  peptide (1)..(234): Ceres Seq. ID no. 12668524
MVNKAYVEEDGGGRTMLDLFLESFWEGEGTRPLLNHLMVVAADQTAYDRCLFRRLHCYKMDTEGVDLEGEKDTDVMWLRSPLSRLNVSLDMHISVDRNNVRGQLINTGFYHARSNNKTISLFQKWYDMRLKSLGMKEQDVLKNLLDSGFFNQLGLNVGFLSTAEFSGFCQDSPDMGAVTTVHANCCVHIPAKISDLSLALRDWKRYKASRVNSRWSPHVECRRSWKDVHYVPKL

SEQ ID NO: 83059 - protein, 219 aa, Arabidopsis thaliana
  peptide (1)..(219): Ceres Seq. ID no. 12668525
MLDLFLESFWEGEGTRPLLNHLMVVAADQTAYDRCLFRRLHCYKMDTEGVDLEGEKDTDVMWLRSPLSRLNVSLDMHISVDRNNVRGQLINTGFYHARSNNKTISLFQKWYDMRLKSLGMKEQDVLKNLLDSGFFNQLGLNVGFLSTAEFSGFCQDSPDMGAVTTVHANCCVHIPAKISDLSLALRDWKRYKASRVNSRWSPHVECRRSWKDVHYVPKL

SEQ ID NO: 83060 - DNA, 1267 bp, Arabidopsis thaliana
  misc_feature (1)..(1267): Ceres Seq. ID no. 12668526
  misc_feature (1)..(1267): Ortholog of  Ceres SEQ ID NO 13656797 as cited in SEQ ID NO 65756
  misc_feature (1)..(1267): Ortholog of  Ceres SEQ ID NO 13658498 as cited in SEQ ID NO 66557
aaagggcacataaaataggtgagtctcctaaacatgccttccttcaactcctccggcaatctcgcggtggccgttgctcttctctttgcgggcgccttatatttctatttctcatcaattacggtttctgatcctatgtccgatctactacacaatgtcgaaactagatggacagagtatcctgtggacgagctagaggcggtcctagacaaggcagcaatgggaaacaacaaaacggtgattatagcaatggtgaacaaagcttacgtggaggaggttgaaggagggaggacaatgctggatctgtttttggagagtttttgggaaggagagggtactcggccgcttcttgaccatctgatgctagtggcagcggatcagacttcctacgatcgttgcctcttcaggaggctccactgctacaagatggataccgatggggttgacttggagggagagaaggtatatatgtcaaaagatttcattgagatgatgtggcggaggactcacttgctcctagacgtcctcagccgcggctacaatcttactttcacggacacggacgtgatgtggctaaggagcccttttccccgactaagctacaacgagagcttggatatgcagataagcgtggacagtattggcctggttggaggacacttgatcaacacgggattctaccacgtcaggtccaacaacaagaccatctccctcttccagaaatggtacgacatgaggctcaagtcgacgggcatgaaggaacaagatgtccttaagagtctcctagactctggtttctttaaccagcttggcctcaacgttggcttcctcaacactaccgaattcagtggcttctgccaagacagccatgacatgggcgttgtcaccaccgtccatgccaactgttgccgccacatccttgctaagatctctgatctaactcttgttcttcgtgactggaaacgctacaaagcctcccatgtcaacagcaattggagcccccatgttgagtgcgggcgttcatggagtgacactcactatatccccaagctctgaccttcttcgttcatatatgccaattaatgagattgctatagtatacacaacttcatcatctattaactgcatatgttcttcagattaatcctagctagctagaggaacaattctcttttgacaagtaattacaaaacatcatatatgtgtgttacaaccagattgtttttcgctcttcgttacagctacccaaataattgctgataattct

SEQ ID NO: 83061 - protein, 340 aa, Arabidopsis thaliana
  peptide (1)..(340): Ceres Seq. ID no. 12668527
MPSFNSSGNLAVAVALLFAGALYFYFSSITVSDPMSDLLHNVETRWTEYPVDELEAVLDKAAMGNNKTVIIAMVNKAYVEEVEGGRTMLDLFLESFWEGEGTRPLLDHLMLVAADQTSYDRCLFRRLHCYKMDTDGVDLEGEKVYMSKDFIEMMWRRTHLLLDVLSRGYNLTFTDTDVMWLRSPFPRLSYNESLDMQISVDSIGLVGGHLINTGFYHVRSNNKTISLFQKWYDMRLKSTGMKEQDVLKSLLDSGFFNQLGLNVGFLNTTEFSGFCQDSHDMGVVTTVHANCCRHILAKISDLTLVLRDWKRYKASHVNSNWSPHVECGRSWSDTHYIPKL

SEQ ID NO: 83062 - protein, 306 aa, Arabidopsis thaliana
  peptide (1)..(306): Ceres Seq. ID no. 12668528
MSDLLHNVETRWTEYPVDELEAVLDKAAMGNNKTVIIAMVNKAYVEEVEGGRTMLDLFLESFWEGEGTRPLLDHLMLVAADQTSYDRCLFRRLHCYKMDTDGVDLEGEKVYMSKDFIEMMWRRTHLLLDVLSRGYNLTFTDTDVMWLRSPFPRLSYNESLDMQISVDSIGLVGGHLINTGFYHVRSNNKTISLFQKWYDMRLKSTGMKEQDVLKSLLDSGFFNQLGLNVGFLNTTEFSGFCQDSHDMGVVTTVHANCCRHILAKISDLTLVLRDWKRYKASHVNSNWSPHVECGRSWSDTHYIPKL

SEQ ID NO: 83063 - protein, 278 aa, Arabidopsis thaliana
  peptide (1)..(278): Ceres Seq. ID no. 12668529
MGNNKTVIIAMVNKAYVEEVEGGRTMLDLFLESFWEGEGTRPLLDHLMLVAADQTSYDRCLFRRLHCYKMDTDGVDLEGEKVYMSKDFIEMMWRRTHLLLDVLSRGYNLTFTDTDVMWLRSPFPRLSYNESLDMQISVDSIGLVGGHLINTGFYHVRSNNKTISLFQKWYDMRLKSTGMKEQDVLKSLLDSGFFNQLGLNVGFLNTTEFSGFCQDSHDMGVVTTVHANCCRHILAKISDLTLVLRDWKRYKASHVNSNWSPHVECGRSWSDTHYIPKL

SEQ ID NO: 83064 - DNA, 864 bp, Arabidopsis thaliana
  misc_feature (1)..(864): Ceres Seq. ID no. 12668530
  misc_feature (1)..(864): Ortholog of  Ceres SEQ ID NO 14304983 as cited in SEQ ID NO 53862
atgggagaggaagaagaaaagaaagagaaaggcgatgaaatcatcacggccgtttacaaggttcaccttcactgccggaaatgtgcatgcgacatcaaaaagcctctccttcgattccaaggggttcaaaatgtggactttgatttggagaagaacgagatcaaagtaaaagggaaaatagaagtcgtgaagattcacaaacaaatcgagaaatggagcaagaaaaaagttgagctcatctctcccaaaccttctgaggttaagaaaaccaccactacaacaacaactacttctgtggtagaaaagaagaccaccgagattaaaaaggacgttattcgtacgacagtactaaaggtacacattcattgcgcacagtgtgacaaagatcttcagcacaaactcttgaaacataaagctatccacattgtcaaaaccgatacaaaggcgcaaactctaacggtacaagggacgatagaatccgcaaaactcttagcctatataaagaagaaagttcacaaacatgcagagatcataagctcaaagaccgaagaagagaagaagaaggaagaagaggataagaagaagaaggaagaagaggataagaagaagaaggaagatgagaagaagaaagaggaagagaagaagaaagaagaggagaataagaagaaggaaggagaaaaaaagaaagaagaagtaaaagtagaagtaacaaccaaaacgattactcaagttgtggagtataaagagatagtaaaagttgagggccaaaaagataaagatggaaacataccttactttgtccactacgtatacgctccacaattgttcagtgatgaaaaccctaatgcttgtcgcattgtctag

SEQ ID NO: 83065 - protein, 287 aa, Arabidopsis thaliana
  peptide (1)..(287): Ceres Seq. ID no. 12668531
MGEEEEKKEKGDEIITAVYKVHLHCRKCACDIKKPLLRFQGVQNVDFDLEKNEIKVKGKIEVVKIHKQIEKWSKKKVELISPKPSEVKKTTTTTTTTSVVEKKTTEIKKDVIRTTVLKVHIHCAQCDKDLQHKLLKHKAIHIVKTDTKAQTLTVQGTIESAKLLAYIKKKVHKHAEIISSKTEEEKKKEEEDKKKKEEEDKKKKEDEKKKEEEKKKEEENKKKEGEKKKEEVKVEVTTKTITQVVEYKEIVKVEGQKDKDGNIPYFVHYVYAPQLFSDENPNACRIV

SEQ ID NO: 83066 - DNA, 1041 bp, Arabidopsis thaliana
  misc_feature (1)..(1041): Ceres Seq. ID no. 12668532
  misc_feature (1)..(1041): Ortholog of  Ceres SEQ ID NO 13502952 as cited in SEQ ID NO 62271
  misc_feature (1)..(1041): Ortholog of  Ceres SEQ ID NO 13502973 as cited in SEQ ID NO 68052
  misc_feature (1)..(1041): Ortholog of  Ceres SEQ ID NO 13596000 as cited in SEQ ID NO 68188
atggacttcgtagagtttgtgtgtgttgttctaaccatatttttcatggatctaaagatctctgaagctacatctcgtgtcgctttgtacaagccatcatccattgttgattaccaccagcaatggatgattcaattttctcgagtttatgacgatgaatttgagaaacagttgaggcttcaagtgctcacggaaaatttgaaattcattgagagcttcaataatatggggaatcaaagctacaaacttggtgttaacgagttcacagattggactaaagaggagttccttgccacctacaccggtctcagaggcgttaatgtaacttcaccattcgaagtggttaatgaaacgaagccagcttggaattggaccgtcagtgatgtccttggcacgaacaaagattggagaaacgaaggagccgtaacacctgtgaaatcccaaggagaatgtggaggttgttgggcattctcagcgatagcagcggtggaaggtctgacaaagattgcccgtggaaacctcatatcactatccgaacaacaacttctagattgcaccagagagcagaacaatggttgcaagggaggaacatttgtaaatgctttcaactacataattaaacaccgaggcatttcttcagaaaacgaatacccttaccaagtgaaagagggcccatgccggtccaacgctagacccgccatactaatcagagggttcgaaaacgttccaagcaacaacgagcgtgcgttactcgaagccgtgtcaagacaacctgtcgcagtggccattgatgccagtgaggccggtttcgttcattactctgggggagtgtacaatgcgcggaactgtgggactagtgtaaatcatgcagtgacgctcgttggctacggcacgagcccggaagggatgaagtactggttggctaagaactcttggggtaagacttggggagagaatggttacattagaattcgtagagatgtggagtggcctcaaggcatgtgtggtgtagctcagtatgcttcttatccggttgcgtaa

SEQ ID NO: 83067 - protein, 346 aa, Arabidopsis thaliana
  peptide (1)..(346): Ceres Seq. ID no. 12668533
MDFVEFVCVVLTIFFMDLKISEATSRVALYKPSSIVDYHQQWMIQFSRVYDDEFEKQLRLQVLTENLKFIESFNNMGNQSYKLGVNEFTDWTKEEFLATYTGLRGVNVTSPFEVVNETKPAWNWTVSDVLGTNKDWRNEGAVTPVKSQGECGGCWAFSAIAAVEGLTKIARGNLISLSEQQLLDCTREQNNGCKGGTFVNAFNYIIKHRGISSENEYPYQVKEGPCRSNARPAILIRGFENVPSNNERALLEAVSRQPVAVAIDASEAGFVHYSGGVYNARNCGTSVNHAVTLVGYGTSPEGMKYWLAKNSWGKTWGENGYIRIRRDVEWPQGMCGVAQYASYPVA

SEQ ID NO: 83068 - protein, 331 aa, Arabidopsis thaliana
  peptide (1)..(331): Ceres Seq. ID no. 12668534
MDLKISEATSRVALYKPSSIVDYHQQWMIQFSRVYDDEFEKQLRLQVLTENLKFIESFNNMGNQSYKLGVNEFTDWTKEEFLATYTGLRGVNVTSPFEVVNETKPAWNWTVSDVLGTNKDWRNEGAVTPVKSQGECGGCWAFSAIAAVEGLTKIARGNLISLSEQQLLDCTREQNNGCKGGTFVNAFNYIIKHRGISSENEYPYQVKEGPCRSNARPAILIRGFENVPSNNERALLEAVSRQPVAVAIDASEAGFVHYSGGVYNARNCGTSVNHAVTLVGYGTSPEGMKYWLAKNSWGKTWGENGYIRIRRDVEWPQGMCGVAQYASYPVA

SEQ ID NO: 83069 - protein, 304 aa, Arabidopsis thaliana
  peptide (1)..(304): Ceres Seq. ID no. 12668535
MIQFSRVYDDEFEKQLRLQVLTENLKFIESFNNMGNQSYKLGVNEFTDWTKEEFLATYTGLRGVNVTSPFEVVNETKPAWNWTVSDVLGTNKDWRNEGAVTPVKSQGECGGCWAFSAIAAVEGLTKIARGNLISLSEQQLLDCTREQNNGCKGGTFVNAFNYIIKHRGISSENEYPYQVKEGPCRSNARPAILIRGFENVPSNNERALLEAVSRQPVAVAIDASEAGFVHYSGGVYNARNCGTSVNHAVTLVGYGTSPEGMKYWLAKNSWGKTWGENGYIRIRRDVEWPQGMCGVAQYASYPVA

SEQ ID NO: 83070 - DNA, 1215 bp, Arabidopsis thaliana
  misc_feature (1)..(1215): Ceres Seq. ID no. 12668548
  misc_feature (1)..(1215): Ortholog of  Ceres SEQ ID NO 13596474 as cited in SEQ ID NO 62169
  misc_feature (1)..(1215): Ortholog of  Ceres SEQ ID NO 13598714 as cited in SEQ ID NO 62656
  misc_feature (1)..(1215): Ortholog of  Ceres SEQ ID NO 13596969 as cited in SEQ ID NO 63375
  misc_feature (1)..(1215): Ortholog of  Ceres SEQ ID NO 14302240 as cited in SEQ ID NO 64162
  misc_feature (1)..(1215): Ortholog of  Ceres SEQ ID NO 13597519 as cited in SEQ ID NO 64759
  misc_feature (1)..(1215): Ortholog of  Ceres SEQ ID NO 13656123 as cited in SEQ ID NO 65212
  misc_feature (1)..(1215): Ortholog of  Ceres SEQ ID NO 13595926 as cited in SEQ ID NO 67778
  misc_feature (1)..(1215): Ortholog of  Ceres SEQ ID NO 13587054 as cited in SEQ ID NO 0
atcacaaaacttgcaagtatcattcacaggagagggaagggagagctcatcatacgaaatgaggtcaatcacagctttgtttttccttttctgtttccttgctccttctgctttggcgcagctccgaactgggttctacagccgctcatgcccccgtgccgaatctatcgtggctagtgttgttgccaaccgtttcagaagtgacaagtccattactgcagcatttcttcgtatgcagtttcatgattgctttgtcaggggttgtgatgcttccctcttgatcgacccaagacctggaaggccatcagagaaaagcactggaccaaatgcaagcgtgagaggctacgagatcattgatgaggctaagagacagctcgaggctgcatgtccccgaactgtctcatgcgcagacattgtaactcttgccacaagagactcggtcgcattagctggtggtccaaggttctcagtaccaacaggaagacgtgatggattaaggtcaaaccccaatgatgtgaacttacccggaccaacaattccggttagcgcatctatccaattgtttgcagctcaaggtatgaataccaacgatatggttacacttattggtggtggccacagcgtcggtgttgcacattgcagtctcttccaggacaggctttccgaccgtgcaatggaaccctcattgaagtctagcttgaggaggaaatgcagttcccctaacgacccaacaacgtttttggaccaaaagacttcatttactgtggataacgcaatctatggagagatccgaagacaaagaggaattctaagaattgatcaaaacttgggtcttgatagatcaaccagtgggattgtgtctggttatgcatcaagcaatacactcttcagaaagagatttgccgaagcattggtgaaaatgggtaccattaaggttcttaccggacgttctggagagatcaggagaaactgcagagtcttcaacaactgaggacgttgattcttgcacacattctttacaattattcacggagagatccaaagactgagcggaatcctacgttttttcttttctttgctttttttcttacaaatcaaatcggaaagtgtgtttgttccggtatcatgttttatttttccctaaaaattgattcgcgtgtttcattttcatgaactatatattgttctaatttgatattaacttctttttttggc

SEQ ID NO: 83071 - protein, 329 aa, Arabidopsis thaliana
  peptide (1)..(329): Ceres Seq. ID no. 12668549
SQNLQVSFTGEGRESSSYEMRSITALFFLFCFLAPSALAQLRTGFYSRSCPRAESIVASVVANRFRSDKSITAAFLRMQFHDCFVRGCDASLLIDPRPGRPSEKSTGPNASVRGYEIIDEAKRQLEAACPRTVSCADIVTLATRDSVALAGGPRFSVPTGRRDGLRSNPNDVNLPGPTIPVSASIQLFAAQGMNTNDMVTLIGGGHSVGVAHCSLFQDRLSDRAMEPSLKSSLRRKCSSPNDPTTFLDQKTSFTVDNAIYGEIRRQRGILRIDQNLGLDRSTSGIVSGYASSNTLFRKRFAEALVKMGTIKVLTGRSGEIRRNCRVFNN

SEQ ID NO: 83072 - protein, 310 aa, Arabidopsis thaliana
  peptide (1)..(310): Ceres Seq. ID no. 12668550
MRSITALFFLFCFLAPSALAQLRTGFYSRSCPRAESIVASVVANRFRSDKSITAAFLRMQFHDCFVRGCDASLLIDPRPGRPSEKSTGPNASVRGYEIIDEAKRQLEAACPRTVSCADIVTLATRDSVALAGGPRFSVPTGRRDGLRSNPNDVNLPGPTIPVSASIQLFAAQGMNTNDMVTLIGGGHSVGVAHCSLFQDRLSDRAMEPSLKSSLRRKCSSPNDPTTFLDQKTSFTVDNAIYGEIRRQRGILRIDQNLGLDRSTSGIVSGYASSNTLFRKRFAEALVKMGTIKVLTGRSGEIRRNCRVFNN

SEQ ID NO: 83073 - protein, 252 aa, Arabidopsis thaliana
  peptide (1)..(252): Ceres Seq. ID no. 12668551
MQFHDCFVRGCDASLLIDPRPGRPSEKSTGPNASVRGYEIIDEAKRQLEAACPRTVSCADIVTLATRDSVALAGGPRFSVPTGRRDGLRSNPNDVNLPGPTIPVSASIQLFAAQGMNTNDMVTLIGGGHSVGVAHCSLFQDRLSDRAMEPSLKSSLRRKCSSPNDPTTFLDQKTSFTVDNAIYGEIRRQRGILRIDQNLGLDRSTSGIVSGYASSNTLFRKRFAEALVKMGTIKVLTGRSGEIRRNCRVFNN

SEQ ID NO: 83074 - DNA, 2533 bp, Arabidopsis thaliana
  misc_feature (1)..(2533): Ceres Seq. ID no. 12668568
  misc_feature (1)..(2533): Ortholog of  Ceres SEQ ID NO 13600595 as cited in SEQ ID NO 629
aacccaataatacccaatacataacattttcggtggaatcttcttttctccacacacaccaaagaaaaaaaaaacatccaaaggtttgcaaataaggaaaaagatggggttaaatttcagggaaaaggcatggatacttctggggattctttgttgttcatctttgatttgttcagttaaagcaattgtcacttacgatcgtaaagctgtgatcatcaatggtcagagaaggatccttctctctggctccattcactacccaagaagcacacctgagatgtggcctgaccttatacaaaaagccaaagatggagggttggatgttatacagacttatgttttctggaatgggcatgaaccttctcctggacaatattattttgaggacagatatgatctagttaagttcatcaaggtggtacaacaagctggtctttacgttcatctcaggattggtccctatgtttgcgctgaatggaactttggagggtttcctgtgtggctcaaatatgttcccggtatggtatttaggaccgacaatgaacctttcaaggctgcaatgcaaaaattcactgagaagattgtgaggatgatgaaagaagaaaaattatttgagactcaaggaggacccatcattctgtcacagatagagaatgagtatggaccaatagagtgggagataggagcaccagggaaggcatacacaaaatgggtagctgaaatggcacaaggactctccactggtgtcccatggattatgtgcaagcaagatgatgctcctaactctattataaacacatgtaatgggttttattgtgagaatttcaaaccaaactcggacaataagccgaaaatgtggacagagaactggactggttggtttacagagtttggaggtgcagtaccatacaggccagccgaagacattgccttatccgtggctcgcttcatacagaacggtggctctttcatcaactattatatgtaccatggaggaaccaacttcgacagaacagccggtgaattcatcgccaccagctatgactatgatgctcctcttgatgaatacgggttaccgagagaacctaagtatagtcacttgaaaaggctgcataaggtcatcaagctctgcgaaccggcattggtctctgctgatcctacagtcacatcactcggggataaacaagaagctcacgtgttcaagtctaagtcatcttgcgctgcttttctctcaaactacaacacaagttctgctgcaagagtcttgtttggcggatctacatatgatctgcctccttggtctgtcagtattctacccgactgcaaaactgagtattacaacactgccaaggtccgtacatcaagcatacacatgaagatggttcctacaaacacaccattctcttggggttcatacaacgaagagattccttctgcaaatgacaatggtaccttttcacaagatgggcttgtggaacagataagtatcaccagagacaagacagactatttctggtatctgacagatattacaatcagtcctgatgaaaagttcctaactggtgaagaccctcttcttactattgggtcagctgggcatgctcttcatgtattcgttaatggccagcttgcaggaactgcatatggatcactggagaagccaaagctaacatttagtcagaagatcaaattacatgcaggggtcaacaaacttgctctattgagtactgcagcgggtctgccgaacgttggcgtgcattatgagacttggaatactggagttcttggcccagtgacactgaatggagttaactccggaacatgggacatgactaaatggaaatggtcttacaagattggtactaagggtgaagctctgagcgttcataccttagccgggagttcaacggtagaatggaaagaaggatcattagtggctaaaaagcagcccttgacctggtacaaggtaagagaaacagaggaatcaatgaatcatgaccaccaacaaagttagatcaatataatgaaaaccgaaatccacagggcagaattttcaccatctctttttgcagtctacttttgactcaccaacaggcaatgaaccattggctttagacatgaacacaatggggaaaggtcaaatgtggataaatgggcagaacatcggacgccactggccagcatatacagctcgtgggaaatgcgaacgctgcagctatgccgggactttcacagagaagaaatgtttgagtaactgtggagaagcttcacaaagatggtaccatgtgcctcgttcatggctgaagccaactaataaccttgtcattgtacttgaagaatggggtggtgaacccaatgggatctctcttgtaaaaagaacagccaaataatagctttctgactccatttttttcaggataaaatctgtttctttgtgacaaatttaaggctctctgcaagtcattgatagaatacagatataaatgtacatataaactgggaattattggctcatatagatgaaaattatctc

SEQ ID NO: 83075 - protein, 636 aa, Arabidopsis thaliana
  peptide (1)..(636): Ceres Seq. ID no. 12668569
MGLNFREKAWILLGILCCSSLICSVKAIVTYDRKAVIINGQRRILLSGSIHYPRSTPEMWPDLIQKAKDGGLDVIQTYVFWNGHEPSPGQYYFEDRYDLVKFIKVVQQAGLYVHLRIGPYVCAEWNFGGFPVWLKYVPGMVFRTDNEPFKAAMQKFTEKIVRMMKEEKLFETQGGPIILSQIENEYGPIEWEIGAPGKAYTKWVAEMAQGLSTGVPWIMCKQDDAPNSIINTCNGFYCENFKPNSDNKPKMWTENWTGWFTEFGGAVPYRPAEDIALSVARFIQNGGSFINYYMYHGGTNFDRTAGEFIATSYDYDAPLDEYGLPREPKYSHLKRLHKVIKLCEPALVSADPTVTSLGDKQEAHVFKSKSSCAAFLSNYNTSSAARVLFGGSTYDLPPWSVSILPDCKTEYYNTAKVRTSSIHMKMVPTNTPFSWGSYNEEIPSANDNGTFSQDGLVEQISITRDKTDYFWYLTDITISPDEKFLTGEDPLLTIGSAGHALHVFVNGQLAGTAYGSLEKPKLTFSQKIKLHAGVNKLALLSTAAGLPNVGVHYETWNTGVLGPVTLNGVNSGTWDMTKWKWSYKIGTKGEALSVHTLAGSSTVEWKEGSLVAKKQPLTWYKVRETEESMNHDHQQS

SEQ ID NO: 83076 - protein, 578 aa, Arabidopsis thaliana
  peptide (1)..(578): Ceres Seq. ID no. 12668570
MWPDLIQKAKDGGLDVIQTYVFWNGHEPSPGQYYFEDRYDLVKFIKVVQQAGLYVHLRIGPYVCAEWNFGGFPVWLKYVPGMVFRTDNEPFKAAMQKFTEKIVRMMKEEKLFETQGGPIILSQIENEYGPIEWEIGAPGKAYTKWVAEMAQGLSTGVPWIMCKQDDAPNSIINTCNGFYCENFKPNSDNKPKMWTENWTGWFTEFGGAVPYRPAEDIALSVARFIQNGGSFINYYMYHGGTNFDRTAGEFIATSYDYDAPLDEYGLPREPKYSHLKRLHKVIKLCEPALVSADPTVTSLGDKQEAHVFKSKSSCAAFLSNYNTSSAARVLFGGSTYDLPPWSVSILPDCKTEYYNTAKVRTSSIHMKMVPTNTPFSWGSYNEEIPSANDNGTFSQDGLVEQISITRDKTDYFWYLTDITISPDEKFLTGEDPLLTIGSAGHALHVFVNGQLAGTAYGSLEKPKLTFSQKIKLHAGVNKLALLSTAAGLPNVGVHYETWNTGVLGPVTLNGVNSGTWDMTKWKWSYKIGTKGEALSVHTLAGSSTVEWKEGSLVAKKQPLTWYKVRETEESMNHDHQQS

SEQ ID NO: 83077 - protein, 497 aa, Arabidopsis thaliana
  peptide (1)..(497): Ceres Seq. ID no. 12668571
MVFRTDNEPFKAAMQKFTEKIVRMMKEEKLFETQGGPIILSQIENEYGPIEWEIGAPGKAYTKWVAEMAQGLSTGVPWIMCKQDDAPNSIINTCNGFYCENFKPNSDNKPKMWTENWTGWFTEFGGAVPYRPAEDIALSVARFIQNGGSFINYYMYHGGTNFDRTAGEFIATSYDYDAPLDEYGLPREPKYSHLKRLHKVIKLCEPALVSADPTVTSLGDKQEAHVFKSKSSCAAFLSNYNTSSAARVLFGGSTYDLPPWSVSILPDCKTEYYNTAKVRTSSIHMKMVPTNTPFSWGSYNEEIPSANDNGTFSQDGLVEQISITRDKTDYFWYLTDITISPDEKFLTGEDPLLTIGSAGHALHVFVNGQLAGTAYGSLEKPKLTFSQKIKLHAGVNKLALLSTAAGLPNVGVHYETWNTGVLGPVTLNGVNSGTWDMTKWKWSYKIGTKGEALSVHTLAGSSTVEWKEGSLVAKKQPLTWYKVRETEESMNHDHQQS

SEQ ID NO: 83078 - DNA, 981 bp, Arabidopsis thaliana
  misc_feature (1)..(981): Ceres Seq. ID no. 12668592
  misc_feature (1)..(981): Ortholog of  Ceres SEQ ID NO 13581579 as cited in SEQ ID NO 58361
  misc_feature (1)..(981): Ortholog of  Ceres SEQ ID NO 13598714 as cited in SEQ ID NO 62656
  misc_feature (1)..(981): Ortholog of  Ceres SEQ ID NO 13596969 as cited in SEQ ID NO 63375
  misc_feature (1)..(981): Ortholog of  Ceres SEQ ID NO 13597519 as cited in SEQ ID NO 64759
  misc_feature (1)..(981): Ortholog of  Ceres SEQ ID NO 13597870 as cited in SEQ ID NO 64982
  misc_feature (1)..(981): Ortholog of  Ceres SEQ ID NO 13595926 as cited in SEQ ID NO 67778
  misc_feature (1)..(981): Ortholog of  Ceres SEQ ID NO 13596362 as cited in SEQ ID NO 67877
  misc_feature (1)..(981): Ortholog of  Ceres SEQ ID NO 12567001 as cited in SEQ ID NO 0
atgtcttcggttataaatgttctcttcgtcgtcctagtctttgtcccgtctatatactcggcaccaccaccaaatttaacaaaagattattaccaaaaaacatgtcccgatttcaataaaatcgtacgtgaaaccgttacaccaaagcaaggccagcagccaacgacagctgctggaacactccgtctctttttccatgattgtttcatggaaggatgtgatgcttccgtccttatcgctacaaattctttcaacaaagccgaacgtgacgatgacctcaacgagtcgcttccgggagatgcattcgacattgtgactcgcatcaaaaccgctcttgaattgtcttgtcccggggtggtgtcctgcgcagacatcctggctcaggccacacgtgaccttgtcacaatggttggtgggcctttctatgaagtcaaactgggccgtaaagatggttttgagtcaaaagcccataaagtcaaaggaaatttacctttagcgaaccaatccgtccccgacatgttatcgatattcaagaagaatggtttcactctaaaggagctggttgcgttaagtggcgggcacacaatcggattctcacactgcaaagaattcagcaaccggatattcccgaaggttgatccagaactcaacgcgaaattcgcaggagttcttaaagatctatgcaagaatttcgaaaccaataagacgatggcagcatttctcgatccggtgacaccgggaaaattcgataatatgtatttcaagaacttgaaacgaggtcttggactgttagcttccgaccatatattgtttaaagatcctagcacgagaccgtttgtagaattatatgcgaataatcagacggctttcttcgaggattttgcacgtgccatggagaaactaggcagggttggtgttaaaggcgaaaaagatggagaagtgagacgtagatgtgatcacttcaacaagcttaacgtataa

SEQ ID NO: 83079 - protein, 326 aa, Arabidopsis thaliana
  peptide (1)..(326): Ceres Seq. ID no. 12668593
MSSVINVLFVVLVFVPSIYSAPPPNLTKDYYQKTCPDFNKIVRETVTPKQGQQPTTAAGTLRLFFHDCFMEGCDASVLIATNSFNKAERDDDLNESLPGDAFDIVTRIKTALELSCPGVVSCADILAQATRDLVTMVGGPFYEVKLGRKDGFESKAHKVKGNLPLANQSVPDMLSIFKKNGFTLKELVALSGGHTIGFSHCKEFSNRIFPKVDPELNAKFAGVLKDLCKNFETNKTMAAFLDPVTPGKFDNMYFKNLKRGLGLLASDHILFKDPSTRPFVELYANNQTAFFEDFARAMEKLGRVGVKGEKDGEVRRRCDHFNKLNV

SEQ ID NO: 83080 - protein, 257 aa, Arabidopsis thaliana
  peptide (1)..(257): Ceres Seq. ID no. 12668594
MEGCDASVLIATNSFNKAERDDDLNESLPGDAFDIVTRIKTALELSCPGVVSCADILAQATRDLVTMVGGPFYEVKLGRKDGFESKAHKVKGNLPLANQSVPDMLSIFKKNGFTLKELVALSGGHTIGFSHCKEFSNRIFPKVDPELNAKFAGVLKDLCKNFETNKTMAAFLDPVTPGKFDNMYFKNLKRGLGLLASDHILFKDPSTRPFVELYANNQTAFFEDFARAMEKLGRVGVKGEKDGEVRRRCDHFNKLNV

SEQ ID NO: 83081 - protein, 191 aa, Arabidopsis thaliana
  peptide (1)..(191): Ceres Seq. ID no. 12668595
MVGGPFYEVKLGRKDGFESKAHKVKGNLPLANQSVPDMLSIFKKNGFTLKELVALSGGHTIGFSHCKEFSNRIFPKVDPELNAKFAGVLKDLCKNFETNKTMAAFLDPVTPGKFDNMYFKNLKRGLGLLASDHILFKDPSTRPFVELYANNQTAFFEDFARAMEKLGRVGVKGEKDGEVRRRCDHFNKLNV

SEQ ID NO: 83082 - DNA, 980 bp, Arabidopsis thaliana
  misc_feature (1)..(980): Ceres Seq. ID no. 12668596
  misc_feature (1)..(980): Ortholog of  Ceres SEQ ID NO 15177126 as cited in SEQ ID NO 59389
cttcttatggagcttttcccttcacaacctgacttgtacttgaagatcagccgaagaagagaagaagaacaagaaaaagaaagtcaagaactacaagaacaagaagtcgaaaggagattagggtttcagagtaaagcctcagatttagacaacaagtcttcaaataatctcatccacactctccagttcacttcaaacaatgaagccaccaagattaatagtaatcaagaacacaaggaatctctcgatcaagacttgagatctatttttatgatgagaccaataagaggaatccctctttaccagaatcaagtccttgaccactactactactcatctacctctcccaatcctttcttcttcagtgaagtcaacggtcaacatgctagtcgtcgcttaatcacaaaccctaattgtagttttaatctccacaaccgtcatcggcgtcaagctcaaccgcagccgccaagattcaccgccaaaagaggagtaagggctccaaggatgcggtggacgacgaccctccacgcccattttgtacacgctgttcaattattgggtggtcatgaaagagcaaccccaaaatcagtacttgagctgatggatgtgcaagatctcacattggctcatgttaaatcccatctacagatgtatcgaaccatcaagtctactgaaaaacctacaacgtcatcagggcagtcagattgtgagaatggatcacaagtaaacagtgagagagaagcaagaaatctcacgggtctatggaataactcctcaagtgaagctcggttccagttgaaggcaaaggcatcatcaggtgtagacatttcatccaatgagaatgaatggaagaatcgaagatgtccaagcaacgaacggttgtcgtcagattcgtcaagccttacagggacaagaccagagactgaaactcccaatcttgatttcactttagctacaccaaacctctctccctaattttc

SEQ ID NO: 83083 - protein, 324 aa, Arabidopsis thaliana
  peptide (1)..(324): Ceres Seq. ID no. 12668597
LLMELFPSQPDLYLKISRRREEEQEKESQELQEQEVERRLGFQSKASDLDNKSSNNLIHTLQFTSNNEATKINSNQEHKESLDQDLRSIFMMRPIRGIPLYQNQVLDHYYYSSTSPNPFFFSEVNGQHASRRLITNPNCSFNLHNRHRRQAQPQPPRFTAKRGVRAPRMRWTTTLHAHFVHAVQLLGGHERATPKSVLELMDVQDLTLAHVKSHLQMYRTIKSTEKPTTSSGQSDCENGSQVNSEREARNLTGLWNNSSSEARFQLKAKASSGVDISSNENEWKNRRCPSNERLSSDSSSLTGTRPETETPNLDFTLATPNLSP

SEQ ID NO: 83084 - protein, 322 aa, Arabidopsis thaliana
  peptide (1)..(322): Ceres Seq. ID no. 12668598
MELFPSQPDLYLKISRRREEEQEKESQELQEQEVERRLGFQSKASDLDNKSSNNLIHTLQFTSNNEATKINSNQEHKESLDQDLRSIFMMRPIRGIPLYQNQVLDHYYYSSTSPNPFFFSEVNGQHASRRLITNPNCSFNLHNRHRRQAQPQPPRFTAKRGVRAPRMRWTTTLHAHFVHAVQLLGGHERATPKSVLELMDVQDLTLAHVKSHLQMYRTIKSTEKPTTSSGQSDCENGSQVNSEREARNLTGLWNNSSSEARFQLKAKASSGVDISSNENEWKNRRCPSNERLSSDSSSLTGTRPETETPNLDFTLATPNLSP

SEQ ID NO: 83085 - protein, 234 aa, Arabidopsis thaliana
  peptide (1)..(234): Ceres Seq. ID no. 12668599
MMRPIRGIPLYQNQVLDHYYYSSTSPNPFFFSEVNGQHASRRLITNPNCSFNLHNRHRRQAQPQPPRFTAKRGVRAPRMRWTTTLHAHFVHAVQLLGGHERATPKSVLELMDVQDLTLAHVKSHLQMYRTIKSTEKPTTSSGQSDCENGSQVNSEREARNLTGLWNNSSSEARFQLKAKASSGVDISSNENEWKNRRCPSNERLSSDSSSLTGTRPETETPNLDFTLATPNLSP

SEQ ID NO: 83086 - DNA, 738 bp, Arabidopsis thaliana
  misc_feature (1)..(738): Ceres Seq. ID no. 12668612
  misc_feature (1)..(738): Ortholog of  Ceres SEQ ID NO 15174883 as cited in SEQ ID NO 53894
atggtcgatgcactcacttgcgtccgatggaaacgccaccagctattcacgaaatacgagtatggagctcaaggtaggccgagattcggaatcagcttagggcttcttgttgattgcttgaacacattttcatcacctggacattctaatactatagaaatcaagtatccaggacctgatatggagcttcttctcaaatctgttgataccttaaactcttgcatctactctgagataagaactagaattcccgaaactgttacttgggactacaactttgagcaggcgggaatcgcgccacttacttttacagtaaagtcagcggcgttgaaggaagcaatagatgatcttgaatggcctggttcaagtgtacagatcagtcttcaaaaggaacccccttgtgtaatctttagaggagaaggacatggagacttgcagatagacttcatgtattatgccaacacagatcttctccttgcctttcattgtgataccgaagtctcttacgggtacaaatacaagtttttgaaagcaacaacggcaaacataccgggaaacgtagtgagagaaaacaggggaagcaaactaacaataggaagaggaggaatgttgaaagttcagcacttggtttcagtttctaaagctttagctccacaagtggaatccgcagggtatcagccaccgagtcggattgcttatatagagttctttgtgaagcctgaagagcctgctgattaa

SEQ ID NO: 83087 - protein, 245 aa, Arabidopsis thaliana
  peptide (1)..(245): Ceres Seq. ID no. 12668613
MVDALTCVRWKRHQLFTKYEYGAQGRPRFGISLGLLVDCLNTFSSPGHSNTIEIKYPGPDMELLLKSVDTLNSCIYSEIRTRIPETVTWDYNFEQAGIAPLTFTVKSAALKEAIDDLEWPGSSVQISLQKEPPCVIFRGEGHGDLQIDFMYYANTDLLLAFHCDTEVSYGYKYKFLKATTANIPGNVVRENRGSKLTIGRGGMLKVQHLVSVSKALAPQVESAGYQPPSRIAYIEFFVKPEEPAD

SEQ ID NO: 83088 - protein, 185 aa, Arabidopsis thaliana
  peptide (1)..(185): Ceres Seq. ID no. 12668614
MELLLKSVDTLNSCIYSEIRTRIPETVTWDYNFEQAGIAPLTFTVKSAALKEAIDDLEWPGSSVQISLQKEPPCVIFRGEGHGDLQIDFMYYANTDLLLAFHCDTEVSYGYKYKFLKATTANIPGNVVRENRGSKLTIGRGGMLKVQHLVSVSKALAPQVESAGYQPPSRIAYIEFFVKPEEPAD

SEQ ID NO: 83089 - DNA, 1242 bp, Arabidopsis thaliana
  misc_feature (1)..(1242): Ceres Seq. ID no. 12668677
  misc_feature (1)..(1242): Ortholog of  Ceres SEQ ID NO 15225707 as cited in SEQ ID NO 54212
  misc_feature (1)..(1242): Ortholog of  Ceres SEQ ID NO 14308608 as cited in SEQ ID NO 58855
aaagtccaagcaccaatctagacctcttaggaaaaaaacctaaaaacctaatccccaaacctaaaaggcttatctcatctcttcttctttgtcttctttactctttttttacctctctcttcattgttcttcaccatgtctaatgaaaccagagatctctacaactaccaatacccttcatcgttttcgttgcacgaaatgatgaatctgcctacttcaaatccatcttcttatggaaacctcccatcacaaaacggttttaatccatctacttattccttcaccgattgtctccaaagttctccagcagcgtatgaatctctacttcagaaaacttttggtctttctccctcttcctcagaggttttcaattcttcgatcgatcaagaaccgaaccgtgatgttactaatgacgtaatcaatggtggtgcatgcaacgagactgaaactagggtttctccttctaattcttcctctagtgaggctgatcaccccggtgaagattccggtaagagccggaggaaacgagagttagtcggtgaagaagatcaaatttccaaaaaagttgggaaaacgaaaaagactgaggtgaagaaacaaagagagccacgagtctcgtttatgactaaaagtgaagttgatcatcttgaagatggttatagatggagaaaatacggccaaaaggctgtaaaaaatagcccttatccaaggagttactatagatgtacaacacaaaagtgcaacgtgaagaaacgagtggagagatcgttccaagatccaacggttgtgattacaacttacgagggtcaacacaaccacccgattccgactaatcttcgaggaagttctgccgcggctgctatgttctccgcagacctcatgactccaagaagctttgcacatgatatgtttaggacggcagcttatactaacggcggttctgtggcggcggctttggattatggatatggacaaagtggttatggtagtgtgaattcaaaccctagttctcaccaagtgtatcatcaagggggtgagtatgagctcttgagggagatttttccttcaattttctttaagcaagagccttgatcgatcattgttataactacatatattatatatattgagagagagaggtagagaaaaaaaaaacttatatgtaacttaagatcttattttgtctctcttatttgcatgtacatattttttcatgaaagaatgagacagttgggcttgctt

SEQ ID NO: 83090 - protein, 318 aa, Arabidopsis thaliana
  peptide (1)..(318): Ceres Seq. ID no. 12668678
MSNETRDLYNYQYPSSFSLHEMMNLPTSNPSSYGNLPSQNGFNPSTYSFTDCLQSSPAAYESLLQKTFGLSPSSSEVFNSSIDQEPNRDVTNDVINGGACNETETRVSPSNSSSSEADHPGEDSGKSRRKRELVGEEDQISKKVGKTKKTEVKKQREPRVSFMTKSEVDHLEDGYRWRKYGQKAVKNSPYPRSYYRCTTQKCNVKKRVERSFQDPTVVITTYEGQHNHPIPTNLRGSSAAAAMFSADLMTPRSFAHDMFRTAAYTNGGSVAAALDYGYGQSGYGSVNSNPSSHQVYHQGGEYELLREIFPSIFFKQEP

SEQ ID NO: 83091 - protein, 297 aa, Arabidopsis thaliana
  peptide (1)..(297): Ceres Seq. ID no. 12668679
MMNLPTSNPSSYGNLPSQNGFNPSTYSFTDCLQSSPAAYESLLQKTFGLSPSSSEVFNSSIDQEPNRDVTNDVINGGACNETETRVSPSNSSSSEADHPGEDSGKSRRKRELVGEEDQISKKVGKTKKTEVKKQREPRVSFMTKSEVDHLEDGYRWRKYGQKAVKNSPYPRSYYRCTTQKCNVKKRVERSFQDPTVVITTYEGQHNHPIPTNLRGSSAAAAMFSADLMTPRSFAHDMFRTAAYTNGGSVAAALDYGYGQSGYGSVNSNPSSHQVYHQGGEYELLREIFPSIFFKQEP

SEQ ID NO: 83092 - protein, 296 aa, Arabidopsis thaliana
  peptide (1)..(296): Ceres Seq. ID no. 12668680
MNLPTSNPSSYGNLPSQNGFNPSTYSFTDCLQSSPAAYESLLQKTFGLSPSSSEVFNSSIDQEPNRDVTNDVINGGACNETETRVSPSNSSSSEADHPGEDSGKSRRKRELVGEEDQISKKVGKTKKTEVKKQREPRVSFMTKSEVDHLEDGYRWRKYGQKAVKNSPYPRSYYRCTTQKCNVKKRVERSFQDPTVVITTYEGQHNHPIPTNLRGSSAAAAMFSADLMTPRSFAHDMFRTAAYTNGGSVAAALDYGYGQSGYGSVNSNPSSHQVYHQGGEYELLREIFPSIFFKQEP

SEQ ID NO: 83093 - DNA, 654 bp, Arabidopsis thaliana
  misc_feature (1)..(654): Ceres Seq. ID no. 12668713
  misc_feature (1)..(654): Ortholog of  Ceres SEQ ID NO 12558659 as cited in SEQ ID NO 20727
  misc_feature (1)..(654): Ortholog of  Ceres SEQ ID NO 15175034 as cited in SEQ ID NO 62432
  misc_feature (1)..(654): Ortholog of  Ceres SEQ ID NO 12619999 as cited in SEQ ID NO 66123
  misc_feature (1)..(654): Ortholog of  Ceres SEQ ID NO 13656436 as cited in SEQ ID NO 69154
atgggagcctacagagccgacgacgactacgattatctcttcaaactagtcttgattggagattccggcgtcggaaaatccaatcttttgtctcgcttcaccagaaacgaattcagcatcgagtcaaagtcaaccatcggtgtcgagttcgccacaagaagtgttcatgtcgacgaaaaaatcatcaaagctcagctttgggacaccgctggtcaagaaagatacagagcaatcacgagtgcatactacagaggagcagtgggggcacttctagtatacgacataactcgacacataacgttcgaaaacgttgaaagatggctcaaggagcttcgtgaccataccgatgccaacgttgtaatcatgcttgttggaaacaaagccgatcttcgtcaccttcgtgcagttcccacagaagaagctagatcattctctgaaagagaaaacatgtttttcatggagacttctgctttggatgctacaaatgtcgaacaagctttcactcatgtcttgactcaaatctatcgtgtaatgagccgtaaagctcttgatggtactggagatccgatgtctttacctaaaggacaaaccattgatatcggaaataaggatgatgttactgctgttaaatcttctggttgttgctcaggttga

SEQ ID NO: 83094 - protein, 217 aa, Arabidopsis thaliana
  peptide (1)..(217): Ceres Seq. ID no. 12668714
MGAYRADDDYDYLFKLVLIGDSGVGKSNLLSRFTRNEFSIESKSTIGVEFATRSVHVDEKIIKAQLWDTAGQERYRAITSAYYRGAVGALLVYDITRHITFENVERWLKELRDHTDANVVIMLVGNKADLRHLRAVPTEEARSFSERENMFFMETSALDATNVEQAFTHVLTQIYRVMSRKALDGTGDPMSLPKGQTIDIGNKDDVTAVKSSGCCSG

SEQ ID NO: 83095 - DNA, 519 bp, Arabidopsis thaliana
  misc_feature (1)..(519): Ceres Seq. ID no. 12668727
  misc_feature (1)..(519): Ortholog of  Ceres SEQ ID NO 12557888 as cited in SEQ ID NO 76
  misc_feature (1)..(519): Ortholog of  Ceres SEQ ID NO 15179616 as cited in SEQ ID NO 1061
  misc_feature (1)..(519): Ortholog of  Ceres SEQ ID NO 13664090 as cited in SEQ ID NO 61005
  misc_feature (1)..(519): Ortholog of  Ceres SEQ ID NO 15174400 as cited in SEQ ID NO 0
atggcgtccaaagccatcttcttcttctttgtctctgccgtgtgcctgtcctctctcgccggtgtggccatcgctgatgccgatgactttgaccgtttccaaattcagggatcggtttattgtgacacatgccgtgtccaattcgttacccgtctcagcaagttccttgaaggcgcgaaagtgaagctagaatgcaggagcagaacaaacggaaccgtaacattgacaaaagaagccgtaacggacaaaacagggagctacagaatggaagtgaccggtgaccatgaggaggaagtttgcgagcttgtgctcgtcgaatcaccagacagtggttgcagtgacgttagcaaagaggcttacctacgtaacgccgctaagatcagcctgaccgcgaatgacggaatcgtctctcacgagacacgtatcgttaaccctctcggtttcatggttcaaactccgtcagctgaatgtcccgctgctttcaaggagctcgggatcgttcctgatgtcaccttctaa

SEQ ID NO: 83096 - protein, 172 aa, Arabidopsis thaliana
  peptide (1)..(172): Ceres Seq. ID no. 12668728
MASKAIFFFFVSAVCLSSLAGVAIADADDFDRFQIQGSVYCDTCRVQFVTRLSKFLEGAKVKLECRSRTNGTVTLTKEAVTDKTGSYRMEVTGDHEEEVCELVLVESPDSGCSDVSKEAYLRNAAKISLTANDGIVSHETRIVNPLGFMVQTPSAECPAAFKELGIVPDVTF

SEQ ID NO: 83097 - DNA, 576 bp, Arabidopsis thaliana
  misc_feature (1)..(576): Ceres Seq. ID no. 12668729
  misc_feature (1)..(576): Ortholog of  Ceres SEQ ID NO 13595187 as cited in SEQ ID NO 56052
  misc_feature (1)..(576): Ortholog of  Ceres SEQ ID NO 13662053 as cited in SEQ ID NO 61547
  misc_feature (1)..(576): Ortholog of  Ceres SEQ ID NO 13624283 as cited in SEQ ID NO 0
atgtcttcggatcgtcacacaccgacgaaagatccaccggatcatccgtcttcttcctccaaccaccacaagcaaccacttcctcctcaaccgcagcaaccactcagccgctatgaatcgcagaaacgccgcgactggaacacgttcgtccaatacctaaaatcacaaaatccaccgttgatgatgtctcaattcgactacacgcacgtgctaagtttcctaaggtacttagatcagtttggtaagaccaaagtacatcatcaagcttgtgtcttcttcggacaaccggatccaccaggtccgtgcacgtgtcctctcaaacaagcttggggaagcctagatgctttgatcggacggctaagagctgcttacgaggaacacggtggcgggtcacctgatactaacccgtttgcaaacgggtcgatccgggttcacttgagggaagtgagagaatctcaagccaaggctcgtgggattccgtacaggaagaagaaaaggaggaagactaaaaacgaggtcgttgttgtcaagaaggatgttgcaaactcttcgactcctaatcagtcgttcacttga

SEQ ID NO: 83098 - protein, 191 aa, Arabidopsis thaliana
  peptide (1)..(191): Ceres Seq. ID no. 12668730
MSSDRHTPTKDPPDHPSSSSNHHKQPLPPQPQQPLSRYESQKRRDWNTFVQYLKSQNPPLMMSQFDYTHVLSFLRYLDQFGKTKVHHQACVFFGQPDPPGPCTCPLKQAWGSLDALIGRLRAAYEEHGGGSPDTNPFANGSIRVHLREVRESQAKARGIPYRKKKRRKTKNEVVVVKKDVANSSTPNQSFT

SEQ ID NO: 83099 - protein, 131 aa, Arabidopsis thaliana
  peptide (1)..(131): Ceres Seq. ID no. 12668731
MMSQFDYTHVLSFLRYLDQFGKTKVHHQACVFFGQPDPPGPCTCPLKQAWGSLDALIGRLRAAYEEHGGGSPDTNPFANGSIRVHLREVRESQAKARGIPYRKKKRRKTKNEVVVVKKDVANSSTPNQSFT

SEQ ID NO: 83100 - protein, 130 aa, Arabidopsis thaliana
  peptide (1)..(130): Ceres Seq. ID no. 12668732
MSQFDYTHVLSFLRYLDQFGKTKVHHQACVFFGQPDPPGPCTCPLKQAWGSLDALIGRLRAAYEEHGGGSPDTNPFANGSIRVHLREVRESQAKARGIPYRKKKRRKTKNEVVVVKKDVANSSTPNQSFT

SEQ ID NO: 83101 - DNA, 495 bp, Arabidopsis thaliana
  misc_feature (1)..(495): Ceres Seq. ID no. 12668733
  misc_feature (1)..(495): Ortholog of  Ceres SEQ ID NO 13596408 as cited in SEQ ID NO 62028
atggaaagttctaagcaaaaacgatgtcgctctagcgtagtcgagaccattgaagcaccattaccactagtgtggtccatcctacgtagtttcgacaaaccacaagcttatcaacgtttcgtcaaaagttgcaccatgcgctctggcggcggcggcggcaaaggaggagaaggaaaaggctccgtccgggacgtgacgttagtctccggcttcccggcggatttcagcacggagaggctcgaagagctagatgatgagtctcacgtgatggtggtaagtattattggcggtaaccataggcttgttaattacaaatcgaaaacgaaggtggtcgcgtcgccggaggatatggcaaagaagacggtggtggtggagagttacgtggtggatgtgccggaaggaactagcgaggaagatacaatattttttgttgataacattattcggtataaccttacttcacttgctaagctcacaaagaaaatgatgaagtaa

SEQ ID NO: 83102 - protein, 164 aa, Arabidopsis thaliana
  peptide (1)..(164): Ceres Seq. ID no. 12668734
MESSKQKRCRSSVVETIEAPLPLVWSILRSFDKPQAYQRFVKSCTMRSGGGGGKGGEGKGSVRDVTLVSGFPADFSTERLEELDDESHVMVVSIIGGNHRLVNYKSKTKVVASPEDMAKKTVVVESYVVDVPEGTSEEDTIFFVDNIIRYNLTSLAKLTKKMMK

SEQ ID NO: 83103 - protein, 119 aa, Arabidopsis thaliana
  peptide (1)..(119): Ceres Seq. ID no. 12668735
MRSGGGGGKGGEGKGSVRDVTLVSGFPADFSTERLEELDDESHVMVVSIIGGNHRLVNYKSKTKVVASPEDMAKKTVVVESYVVDVPEGTSEEDTIFFVDNIIRYNLTSLAKLTKKMMK

SEQ ID NO: 83104 - DNA, 846 bp, Arabidopsis thaliana
  misc_feature (1)..(846): Ceres Seq. ID no. 12668740
  misc_feature (1)..(846): Ortholog of  Ceres SEQ ID NO 12567026 as cited in SEQ ID NO 1198
atggagaatccaagctcaaacttagaaaaactgcaacaagattgttataacgaatggatgagtttacaagccaaacgcataacggagcttaaagaagccatatccaccggtgaaaaagacgataacaagcttctagatttgatacgaacggcgatcagagattttggagactacgcccgaaaacggtcagaacattcccggcgatttagttcaaactatttcgctccgacatggaacacttgtcttgaaaacgcacttctttggatgggaggttgtcgtccttcttcgtttatacgactcgtatacgccatgtgtgggtctcaaaccgaacaccggttaaccaacttcttcaataacaccaaccacgacatcgacagtaatttaagcatggcgttgggtgagacacgtggtggaatcggaggaggagagtcgatgagtgatcttacggctgaacagttattcaagatcaacgagcttcatctaaaaacggtggaggcagagaacaagctgactaaggtatccgcgagcttacaagaagacacggcggatacgcctatcgccgttgcagcgttttacaaagaagtaatcggacaagctgacgtggtggtcgagcgtgcgcttgataagcatgaggaggacatgggtggtttattggttgaagcagataagctgaggatgaccacgttgaccaaaattgttgacattttaacggcggttcaagctgcggattttcttcttgccgggaaaaaacttcatttggcgatgcatgagtggggaaaatcaagagaacatcgacggcttgaagctagtggtggtgattccggtggaaatgttaccagagagtaa

SEQ ID NO: 83105 - protein, 281 aa, Arabidopsis thaliana
  peptide (1)..(281): Ceres Seq. ID no. 12668741
MENPSSNLEKLQQDCYNEWMSLQAKRITELKEAISTGEKDDNKLLDLIRTAIRDFGDYARKRSEHSRRFSSNYFAPTWNTCLENALLWMGGCRPSSFIRLVYAMCGSQTEHRLTNFFNNTNHDIDSNLSMALGETRGGIGGGESMSDLTAEQLFKINELHLKTVEAENKLTKVSASLQEDTADTPIAVAAFYKEVIGQADVVVERALDKHEEDMGGLLVEADKLRMTTLTKIVDILTAVQAADFLLAGKKLHLAMHEWGKSREHRRLEASGGDSGGNVTRE

SEQ ID NO: 83106 - protein, 262 aa, Arabidopsis thaliana
  peptide (1)..(262): Ceres Seq. ID no. 12668742
MSLQAKRITELKEAISTGEKDDNKLLDLIRTAIRDFGDYARKRSEHSRRFSSNYFAPTWNTCLENALLWMGGCRPSSFIRLVYAMCGSQTEHRLTNFFNNTNHDIDSNLSMALGETRGGIGGGESMSDLTAEQLFKINELHLKTVEAENKLTKVSASLQEDTADTPIAVAAFYKEVIGQADVVVERALDKHEEDMGGLLVEADKLRMTTLTKIVDILTAVQAADFLLAGKKLHLAMHEWGKSREHRRLEASGGDSGGNVTRE

SEQ ID NO: 83107 - protein, 193 aa, Arabidopsis thaliana
  peptide (1)..(193): Ceres Seq. ID no. 12668743
MGGCRPSSFIRLVYAMCGSQTEHRLTNFFNNTNHDIDSNLSMALGETRGGIGGGESMSDLTAEQLFKINELHLKTVEAENKLTKVSASLQEDTADTPIAVAAFYKEVIGQADVVVERALDKHEEDMGGLLVEADKLRMTTLTKIVDILTAVQAADFLLAGKKLHLAMHEWGKSREHRRLEASGGDSGGNVTRE

SEQ ID NO: 83108 - DNA, 2044 bp, Arabidopsis thaliana
  misc_feature (1)..(2044): Ceres Seq. ID no. 12668748
  misc_feature (1)..(2044): Ortholog of  Ceres SEQ ID NO 13599900 as cited in SEQ ID NO 531
  misc_feature (1)..(2044): Ortholog of  Ceres SEQ ID NO 13659971 as cited in SEQ ID NO 67565
  misc_feature (1)..(2044): Ortholog of  Ceres SEQ ID NO 13500385 as cited in SEQ ID NO 67583
aaaaacagtagagagagaaaccttcttcttctttcttcttcttctacaaaatttcacaaaacgagagagaggagagattcaaacaaacgaatcaacaggtgagaaattcgaaatctttgcgagctcgtctcgcccagaatctcgatttctccacctttcctcttcaattcatcttccaaatccctaaaaaaaagactcaaactttttaattttggtccaaaaaagactcaaactttcttcatcaatggcggagaaaatcacgagagagacgtcgttacctaaagagagaagcagcccacaagctctaatcctgggacgatacgaaatgggtaagcttctcggccatggtaccttcgctaaagtttacctcgcacgtaacgtgaaaacaaacgaaagcgtagcaatcaaagtaatcgacaaggagaaagttctcaaaggaggtttaatcgcacacatcaaacgcgagatctcgattcttcgacgtgttcgtcacccaaacatcgttcagctattcgaagtcatggcgacgaaagctaagatctatttcgtgatggagtatgttcgtggaggtgagttattcaataaagtagctaaaggtcgtcttaaagaagaagtagctcgcaaatatttccagcaattgatctctgctgttactttctgtcacgcgagaggtgtttatcatagagatctgaaacctgagaatcttttgttagatgagaatggtaatcttaaagtctctgactttggacttagtgctgtctctgatcagattcgtcaagatgggctttttcatacgttttgtggtactcctgcttatgttgctcctgaggttttagctaggaaaggttatgatgctgctaaagttgatatttggtcttgtggtgttatcttgtttgtgttgatggctggttatttgccgtttcatgatcggaatgttatggctatgtataagaagatttacagaggggagtttaggtgtcctaggtggttttctactgagcttaccaggttgttgtcgaagcttttggagacgaatccggagaaacggttcactttccctgagattatggagaattcttggtttaagaaagggtttaagcatattaagttttatgtggaggatgataagttgtgtaatgttgttgatgatgatgaactggagtctgactcggtggagtcggatagagattccgcggcttctgagtcggagattgagtatttggagcctaggaggagagttggagggttgcctagacctgcgagtttgaatgctttcgatattatatcgttttcgcaaggttttgatttatcgggtttgtttgatgacgatggggagggttctaggtttgtttcgggagctccggtttcgaagattatatcgaagttggaagagattgctaaagttgtgagctttactgtgaggaagaaggattgtagggtaagtcttgaaggttcaagacaaggagtgaaaggtccattgacgattgcagcagagatattcgaattgacaccatcgttggttgttgtggaagtcaagaagaaaggaggagataaaacagagtatgaagatttctgtaacaatgaattgaaacccaagttgcaaaacttgacagctgatgatgtagtagctgagcctgtcgcggtttcagcggttgatgaaaccgctatcccgaattctccaaccatttctttcttgccgtctgacactgaatagaaggacttgatggaagaccacaaagccagagatcatgaggggtatgtatgtacactgtatgttttgggttttgtaatctggattgggaaagaaaaaaagctgcttacggttggtgaaatttagaatcgaattatatgtaatacttatgtttctgttggagaggatcgttagagaaattgagttatgttttttactaaccttttagcagtttttttttgtaatgggagaattgtaaacagtttcgcataatcagatctttgatatgtataaaaacaatgaaataaataaaagaaagttcctttaaaaaaagtgaactctcgagagatctat

SEQ ID NO: 83109 - protein, 489 aa, Arabidopsis thaliana
  peptide (1)..(489): Ceres Seq. ID no. 12668749
MAEKITRETSLPKERSSPQALILGRYEMGKLLGHGTFAKVYLARNVKTNESVAIKVIDKEKVLKGGLIAHIKREISILRRVRHPNIVQLFEVMATKAKIYFVMEYVRGGELFNKVAKGRLKEEVARKYFQQLISAVTFCHARGVYHRDLKPENLLLDENGNLKVSDFGLSAVSDQIRQDGLFHTFCGTPAYVAPEVLARKGYDAAKVDIWSCGVILFVLMAGYLPFHDRNVMAMYKKIYRGEFRCPRWFSTELTRLLSKLLETNPEKRFTFPEIMENSWFKKGFKHIKFYVEDDKLCNVVDDDELESDSVESDRDSAASESEIEYLEPRRRVGGLPRPASLNAFDIISFSQGFDLSGLFDDDGEGSRFVSGAPVSKIISKLEEIAKVVSFTVRKKDCRVSLEGSRQGVKGPLTIAAEIFELTPSLVVVEVKKKGGDKTEYEDFCNNELKPKLQNLTADDVVAEPVAVSAVDETAIPNSPTISFLPSDTE

SEQ ID NO: 83110 - protein, 462 aa, Arabidopsis thaliana
  peptide (1)..(462): Ceres Seq. ID no. 12668750
MGKLLGHGTFAKVYLARNVKTNESVAIKVIDKEKVLKGGLIAHIKREISILRRVRHPNIVQLFEVMATKAKIYFVMEYVRGGELFNKVAKGRLKEEVARKYFQQLISAVTFCHARGVYHRDLKPENLLLDENGNLKVSDFGLSAVSDQIRQDGLFHTFCGTPAYVAPEVLARKGYDAAKVDIWSCGVILFVLMAGYLPFHDRNVMAMYKKIYRGEFRCPRWFSTELTRLLSKLLETNPEKRFTFPEIMENSWFKKGFKHIKFYVEDDKLCNVVDDDELESDSVESDRDSAASESEIEYLEPRRRVGGLPRPASLNAFDIISFSQGFDLSGLFDDDGEGSRFVSGAPVSKIISKLEEIAKVVSFTVRKKDCRVSLEGSRQGVKGPLTIAAEIFELTPSLVVVEVKKKGGDKTEYEDFCNNELKPKLQNLTADDVVAEPVAVSAVDETAIPNSPTISFLPSDTE

SEQ ID NO: 83111 - protein, 397 aa, Arabidopsis thaliana
  peptide (1)..(397): Ceres Seq. ID no. 12668751
MATKAKIYFVMEYVRGGELFNKVAKGRLKEEVARKYFQQLISAVTFCHARGVYHRDLKPENLLLDENGNLKVSDFGLSAVSDQIRQDGLFHTFCGTPAYVAPEVLARKGYDAAKVDIWSCGVILFVLMAGYLPFHDRNVMAMYKKIYRGEFRCPRWFSTELTRLLSKLLETNPEKRFTFPEIMENSWFKKGFKHIKFYVEDDKLCNVVDDDELESDSVESDRDSAASESEIEYLEPRRRVGGLPRPASLNAFDIISFSQGFDLSGLFDDDGEGSRFVSGAPVSKIISKLEEIAKVVSFTVRKKDCRVSLEGSRQGVKGPLTIAAEIFELTPSLVVVEVKKKGGDKTEYEDFCNNELKPKLQNLTADDVVAEPVAVSAVDETAIPNSPTISFLPSDTE

SEQ ID NO: 83112 - DNA, 2616 bp, Arabidopsis thaliana
  misc_feature (1)..(2616): Ceres Seq. ID no. 12668760
  misc_feature (1)..(2616): Ortholog of  Ceres SEQ ID NO 12586556 as cited in SEQ ID NO 64667
  misc_feature (1)..(2616): Ortholog of  Ceres SEQ ID NO 13660894 as cited in SEQ ID NO 67475
atggcgatgttggtgacgaatttatcttcttcaagcttctgttttttttcctctcctcatttacaaaaccagaaggagatcagaagcggcgttagagttcgaaaatatgtgattttcaatagagcctcgttgagaacagtatcagattgtgttgattcgattacaacttttgatcgaagcgtaacagatgcgaacactcaattacggagattctgcgaatcagggaatctagagaacgccgtgaaacttctttgcgtatctggaaaatgggatattgatccgagaactttatgctctgttcttcagctctgtgctgattcgaaatctctcaaagatggtaaagaagttgataactttattcgtggtaatgggtttgtgatagattcgaatttgggatcaaaactctctcttatgtatacaaattgtggagatttgaaagaagcaagtagagtgttcgatgaggttaagatcgagaaagcattgttctggaatattttgatgaatgagcttgcaaaatctggtgactttagtgggagtattggattgtttaagaagatgatgagttctggtgttgaaatggatagctatactttttcttgtgtttcaaagagtttttcgtctttacgaagtgttcatggaggagagcagcttcatggatttattcttaaatcaggttttggagaaaggaactctgtggggaattctttggttgcattttatttgaagaatcagagagttgatagtgcacgtaaggtgtttgatgaaatgactgagagagatgttatatcttggaattctattattaatgggtatgtatcaaacggattagctgagaaagggctatctgttttcgtgcagatgttggtttcagggatagagattgatttggctactatagttagtgtttttgctggttgtgctgattctcgtttgatatcgttaggtagagctgttcatagtattggagtgaaagcttgttttagtagagaagatcggttttgtaatacattgcttgatatgtattcgaagtgtggtgatcttgattctgctaaagctgtgtttagggagatgagtgatcgaagtgttgtgtcgtatacttccatgattgctggttatgctagggaaggtttggctggtgaagctgtaaagttgtttgaagaaatggaggaagaaggtattagtcctgatgtttataccgtcactgctgttttaaattgttgtgctcgttatcggttgttagatgaaggcaagcgtgtgcatgagtggataaaggaaaacgatttgggatttgatatctttgtatcaaatgctctgatggatatgtatgcaaaatgtggaagcatgcaagaggcggagctagtcttctctgagatgcgtgtgaaagatatcatctcgtggaacaccattattggtgggtactcaaagaactgttacgccaatgaagctctaagcctgtttaatttgctgttggaagaaaagaggtttagtcctgatgagagaacagtggcgtgtgttcttccggcttgtgcaagtctttctgctttcgataaaggcagagaaatccacggttacatcatgagaaacgggtatttctcagatcggcatgttgctaattcgcttgtagacatgtacgcgaaatgtggtgcgttgttactcgctcatatgctctttgatgatattgcttccaaggatcttgtttcttggacagtgatgatagctggatatgggatgcacgggtttggaaaagaggcgattgctcttttcaatcaaatgagacaagcgggtattgaggctgatgaaatatcctttgtatctttgttgtatgcttgtagccattcaggactagttgatgaaggatggagattctttaacatcatgagacatgaatgcaagatcgagccaacggtggaacattatgcttgtatagttgacatgcttgcaagaactggagatttaatcaaagcttataggttcatcgagaacatgccaattccgccagatgctacaatctggggagctttgctgtgtggatgcaggatacatcatgatgttaagttagctgagaaagttgcagagaaagtctttgagcttgaaccagagaacacaggatattatgtactcatggcaaatatctacgcagaagctgagaaatgggaacaagtgaaaaggctaagaaagaggatagggcagcgcggattgaggaagaatccgggatgtagctggatagagataaagggtagagttaacatctttgtagctggagatagttcaaacccggaaactgaaaacattgaagcttttttgagaaaggtaagagctagaatgatagaagaaggatattcaccactgacgaaatacgctttgatcgatgcggaagagatggaaaaggaagaagctttatgtggtcatagtgagaaattagcaatggctttgggaatcataagctctggacatggaaagatcataagagttacaaagaatctaagagtttgtggagattgtcatgaaatggccaagttcatgtctaagttaaccagaagagagattgtcctaagagattcaaaccggtttcaccaatttaaagatggacattgttcttgcagaggtttctggtga

SEQ ID NO: 83113 - protein, 871 aa, Arabidopsis thaliana
  peptide (1)..(871): Ceres Seq. ID no. 12668761
MAMLVTNLSSSSFCFFSSPHLQNQKEIRSGVRVRKYVIFNRASLRTVSDCVDSITTFDRSVTDANTQLRRFCESGNLENAVKLLCVSGKWDIDPRTLCSVLQLCADSKSLKDGKEVDNFIRGNGFVIDSNLGSKLSLMYTNCGDLKEASRVFDEVKIEKALFWNILMNELAKSGDFSGSIGLFKKMMSSGVEMDSYTFSCVSKSFSSLRSVHGGEQLHGFILKSGFGERNSVGNSLVAFYLKNQRVDSARKVFDEMTERDVISWNSIINGYVSNGLAEKGLSVFVQMLVSGIEIDLATIVSVFAGCADSRLISLGRAVHSIGVKACFSREDRFCNTLLDMYSKCGDLDSAKAVFREMSDRSVVSYTSMIAGYAREGLAGEAVKLFEEMEEEGISPDVYTVTAVLNCCARYRLLDEGKRVHEWIKENDLGFDIFVSNALMDMYAKCGSMQEAELVFSEMRVKDIISWNTIIGGYSKNCYANEALSLFNLLLEEKRFSPDERTVACVLPACASLSAFDKGREIHGYIMRNGYFSDRHVANSLVDMYAKCGALLLAHMLFDDIASKDLVSWTVMIAGYGMHGFGKEAIALFNQMRQAGIEADEISFVSLLYACSHSGLVDEGWRFFNIMRHECKIEPTVEHYACIVDMLARTGDLIKAYRFIENMPIPPDATIWGALLCGCRIHHDVKLAEKVAEKVFELEPENTGYYVLMANIYAEAEKWEQVKRLRKRIGQRGLRKNPGCSWIEIKGRVNIFVAGDSSNPETENIEAFLRKVRARMIEEGYSPLTKYALIDAEEMEKEEALCGHSEKLAMALGIISSGHGKIIRVTKNLRVCGDCHEMAKFMSKLTRREIVLRDSNRFHQFKDGHCSCRGFW

SEQ ID NO: 83114 - protein, 869 aa, Arabidopsis thaliana
  peptide (1)..(869): Ceres Seq. ID no. 12668762
MLVTNLSSSSFCFFSSPHLQNQKEIRSGVRVRKYVIFNRASLRTVSDCVDSITTFDRSVTDANTQLRRFCESGNLENAVKLLCVSGKWDIDPRTLCSVLQLCADSKSLKDGKEVDNFIRGNGFVIDSNLGSKLSLMYTNCGDLKEASRVFDEVKIEKALFWNILMNELAKSGDFSGSIGLFKKMMSSGVEMDSYTFSCVSKSFSSLRSVHGGEQLHGFILKSGFGERNSVGNSLVAFYLKNQRVDSARKVFDEMTERDVISWNSIINGYVSNGLAEKGLSVFVQMLVSGIEIDLATIVSVFAGCADSRLISLGRAVHSIGVKACFSREDRFCNTLLDMYSKCGDLDSAKAVFREMSDRSVVSYTSMIAGYAREGLAGEAVKLFEEMEEEGISPDVYTVTAVLNCCARYRLLDEGKRVHEWIKENDLGFDIFVSNALMDMYAKCGSMQEAELVFSEMRVKDIISWNTIIGGYSKNCYANEALSLFNLLLEEKRFSPDERTVACVLPACASLSAFDKGREIHGYIMRNGYFSDRHVANSLVDMYAKCGALLLAHMLFDDIASKDLVSWTVMIAGYGMHGFGKEAIALFNQMRQAGIEADEISFVSLLYACSHSGLVDEGWRFFNIMRHECKIEPTVEHYACIVDMLARTGDLIKAYRFIENMPIPPDATIWGALLCGCRIHHDVKLAEKVAEKVFELEPENTGYYVLMANIYAEAEKWEQVKRLRKRIGQRGLRKNPGCSWIEIKGRVNIFVAGDSSNPETENIEAFLRKVRARMIEEGYSPLTKYALIDAEEMEKEEALCGHSEKLAMALGIISSGHGKIIRVTKNLRVCGDCHEMAKFMSKLTRREIVLRDSNRFHQFKDGHCSCRGFW

SEQ ID NO: 83115 - protein, 734 aa, Arabidopsis thaliana
  peptide (1)..(734): Ceres Seq. ID no. 12668763
MYTNCGDLKEASRVFDEVKIEKALFWNILMNELAKSGDFSGSIGLFKKMMSSGVEMDSYTFSCVSKSFSSLRSVHGGEQLHGFILKSGFGERNSVGNSLVAFYLKNQRVDSARKVFDEMTERDVISWNSIINGYVSNGLAEKGLSVFVQMLVSGIEIDLATIVSVFAGCADSRLISLGRAVHSIGVKACFSREDRFCNTLLDMYSKCGDLDSAKAVFREMSDRSVVSYTSMIAGYAREGLAGEAVKLFEEMEEEGISPDVYTVTAVLNCCARYRLLDEGKRVHEWIKENDLGFDIFVSNALMDMYAKCGSMQEAELVFSEMRVKDIISWNTIIGGYSKNCYANEALSLFNLLLEEKRFSPDERTVACVLPACASLSAFDKGREIHGYIMRNGYFSDRHVANSLVDMYAKCGALLLAHMLFDDIASKDLVSWTVMIAGYGMHGFGKEAIALFNQMRQAGIEADEISFVSLLYACSHSGLVDEGWRFFNIMRHECKIEPTVEHYACIVDMLARTGDLIKAYRFIENMPIPPDATIWGALLCGCRIHHDVKLAEKVAEKVFELEPENTGYYVLMANIYAEAEKWEQVKRLRKRIGQRGLRKNPGCSWIEIKGRVNIFVAGDSSNPETENIEAFLRKVRARMIEEGYSPLTKYALIDAEEMEKEEALCGHSEKLAMALGIISSGHGKIIRVTKNLRVCGDCHEMAKFMSKLTRREIVLRDSNRFHQFKDGHCSCRGFW

SEQ ID NO: 83116 - DNA, 1904 bp, Arabidopsis thaliana
  misc_feature (1)..(1904): Ceres Seq. ID no. 12668779
  misc_feature (1)..(1904): Ortholog of  Ceres SEQ ID NO 13596921 as cited in SEQ ID NO 62368
gctgcttgaaattctcttgtctgattaaaatatatatacccaagtccagaagctgtttaggttcgagaagcagagagggttcgagaagctaataagggtttcttctttttgattttaatgctaaaagggttctagattcgttgaattttacaagggttttaggggttcttagaagcttttgcttgattgtcttttatttagaaacagtggtgagtttttagtctttcactttgttcaagttcgaagctttttttggagggaattttgggcttctgattttgatcgaaacttactgatagtaagttctttgagtcctccttaactgtagtttctgtgtactgaagttattgaattgaaagtttttatcttttttggttattgaaactttcatagtttgatcaaaagagtctcttgctctgtttttggctctgtttttgtgagtgtgattgtaagctttgttgtgagtagattgaatcaaggagtgtgagagttgttaaaagtgttttcagagatggatgagaataatcatggagtttcatcaagctcacttccacctttcctcaccaaaacatatgagatggttgatgattcttcatccgattctatcgtctcttggagtcagagcaataagagtttcatcgtttggaatccgccggagttttctagagatcttcttccgagattcttcaagcacaataacttctctagctttatccgccagcttaacacatatggttttagaaaagctgatcctgagcaatgggaatttgcgaatgatgattttgtgagaggtcaacctcatcttatgaagaacattcatagacgcaaaccagttcatagccactctttaccgaatcttcaagctcagttaaacccgttgacggattcagaacgagtgagaatgaataatcagattgagagattgacaaaagagaaagaaggattgcttgaagagttacataaacaagacgaggaacgagaagtgtttgagatgcaagtgaaagaacttaaagaacgattacaacacatggagaagcgtcagaaaacaatggtttcgtttgtttctcaagtattggaaaagccagggcttgctttgaacctatcgccgtgtgttcccgaaacaaacgagaggaaaagaaggttccctaggatcgagttctttcccgatgaaccgatgttggaagagaacaaaacttgtgttgttgtgagagaggaaggttctacaagcccttcttcacacacaagagagcatcaagtggaacagttagagtcatcgatagcgatttgggagaatcttgtatcggattcttgtgagagtatgttacaatcaagaagtatgatgacacttgatgtggatgaatcatctacttttccagagagccctcctctttcttgcatacagttaagtgtcgattcacgtctcaaatctcctccttctccaaggatcatcgatatgaactgtgagcccgatggttcgaaagaacagaacactgttgctgctcctcctcctcctccagtagcaggagcgaatgatggcttctggcagcagtttttctcagagaatcctggctcaaccgagcaacgggaagttcaattagagaggaaagacgataaagataaagccggagtacgtactgagaaatgttggtggaattcgagaaatgttaatgcaattacagaacagcttggacatctgacttcttcagagagaagttgatatgtcaaagattaaatttctagtctgttttagttacttgtaaaatagggtttctcagttttattgttttcgattacagtacttaggtatggttcagctgtttatttatcacttgtatgatctttcacagttcattgtagcagacttcaatggtaatgataagctagagcttatggatagtattcat

SEQ ID NO: 83117 - protein, 401 aa, Arabidopsis thaliana
  peptide (1)..(401): Ceres Seq. ID no. 12668780
MDENNHGVSSSSLPPFLTKTYEMVDDSSSDSIVSWSQSNKSFIVWNPPEFSRDLLPRFFKHNNFSSFIRQLNTYGFRKADPEQWEFANDDFVRGQPHLMKNIHRRKPVHSHSLPNLQAQLNPLTDSERVRMNNQIERLTKEKEGLLEELHKQDEEREVFEMQVKELKERLQHMEKRQKTMVSFVSQVLEKPGLALNLSPCVPETNERKRRFPRIEFFPDEPMLEENKTCVVVREEGSTSPSSHTREHQVEQLESSIAIWENLVSDSCESMLQSRSMMTLDVDESSTFPESPPLSCIQLSVDSRLKSPPSPRIIDMNCEPDGSKEQNTVAAPPPPPVAGANDGFWQQFFSENPGSTEQREVQLERKDDKDKAGVRTEKCWWNSRNVNAITEQLGHLTSSERS

SEQ ID NO: 83118 - protein, 379 aa, Arabidopsis thaliana
  peptide (1)..(379): Ceres Seq. ID no. 12668781
MVDDSSSDSIVSWSQSNKSFIVWNPPEFSRDLLPRFFKHNNFSSFIRQLNTYGFRKADPEQWEFANDDFVRGQPHLMKNIHRRKPVHSHSLPNLQAQLNPLTDSERVRMNNQIERLTKEKEGLLEELHKQDEEREVFEMQVKELKERLQHMEKRQKTMVSFVSQVLEKPGLALNLSPCVPETNERKRRFPRIEFFPDEPMLEENKTCVVVREEGSTSPSSHTREHQVEQLESSIAIWENLVSDSCESMLQSRSMMTLDVDESSTFPESPPLSCIQLSVDSRLKSPPSPRIIDMNCEPDGSKEQNTVAAPPPPPVAGANDGFWQQFFSENPGSTEQREVQLERKDDKDKAGVRTEKCWWNSRNVNAITEQLGHLTSSERS

SEQ ID NO: 83119 - protein, 303 aa, Arabidopsis thaliana
  peptide (1)..(303): Ceres Seq. ID no. 12668782
MKNIHRRKPVHSHSLPNLQAQLNPLTDSERVRMNNQIERLTKEKEGLLEELHKQDEEREVFEMQVKELKERLQHMEKRQKTMVSFVSQVLEKPGLALNLSPCVPETNERKRRFPRIEFFPDEPMLEENKTCVVVREEGSTSPSSHTREHQVEQLESSIAIWENLVSDSCESMLQSRSMMTLDVDESSTFPESPPLSCIQLSVDSRLKSPPSPRIIDMNCEPDGSKEQNTVAAPPPPPVAGANDGFWQQFFSENPGSTEQREVQLERKDDKDKAGVRTEKCWWNSRNVNAITEQLGHLTSSERS

SEQ ID NO: 83120 - DNA, 864 bp, Arabidopsis thaliana
  misc_feature (1)..(864): Ceres Seq. ID no. 12668795
  misc_feature (1)..(864): Ortholog of  Ceres SEQ ID NO 13638750 as cited in SEQ ID NO 52185
  misc_feature (1)..(864): Ortholog of  Ceres SEQ ID NO 15180075 as cited in SEQ ID NO 0
atggcgctctgtaacttgaatccaactcaagggatattcccattgcaaggcttatcaaaatctcaagaatttatatgcttttctttgcttcaatctccacgttgcggaagttactcctcgttgaagacgaaaaggtttggcttttgcatcagatcaaagttctcagagaaggaagctgggaaattggacagaggttatgttgccactgtgaacagcaaggaaataaagaaagtggggaagaaagagcatcacttgtggaagaagaatgactctgctgggtctggacagaaagcacttaatcttgttcgaatgctctctggactcccaaatgaaaaagaggctgtttatggagctttgaataaatgggtagcttgggaggttgaatttcccattattgctgcagctaaggcgttgcaaatcttaagaaagagaagtcagtggcatcgtgtgattcaattggctaagtggatgttaagcaaagggcaaggtgctacaatgggaacatacgatatcctcttattggcatttgatatggacgaaagggctgatgaggcagagtccttatggaacatgattctgcacacacatacacgatccatcccaagacgcttgttcgctaggatgatagcgttgtatgctcaccatgaccttcacgataaggttatcgaggtctttgcagacatggaagagctgaaggtgagcccagacgaagactctgcgaggagagtggcacgagccttcagggaactcaaccaagaagaaaatcgaaaactgatccttagaaggtacctctctgaatacaaatacatctacttcaatggtgagcgggttagagtcaaaagatatttctctgaagatagttga

SEQ ID NO: 83121 - protein, 287 aa, Arabidopsis thaliana
  peptide (1)..(287): Ceres Seq. ID no. 12668796
MALCNLNPTQGIFPLQGLSKSQEFICFSLLQSPRCGSYSSLKTKRFGFCIRSKFSEKEAGKLDRGYVATVNSKEIKKVGKKEHHLWKKNDSAGSGQKALNLVRMLSGLPNEKEAVYGALNKWVAWEVEFPIIAAAKALQILRKRSQWHRVIQLAKWMLSKGQGATMGTYDILLLAFDMDERADEAESLWNMILHTHTRSIPRRLFARMIALYAHHDLHDKVIEVFADMEELKVSPDEDSARRVARAFRELNQEENRKLILRRYLSEYKYIYFNGERVRVKRYFSEDS

SEQ ID NO: 83122 - protein, 184 aa, Arabidopsis thaliana
  peptide (1)..(184): Ceres Seq. ID no. 12668797
MLSGLPNEKEAVYGALNKWVAWEVEFPIIAAAKALQILRKRSQWHRVIQLAKWMLSKGQGATMGTYDILLLAFDMDERADEAESLWNMILHTHTRSIPRRLFARMIALYAHHDLHDKVIEVFADMEELKVSPDEDSARRVARAFRELNQEENRKLILRRYLSEYKYIYFNGERVRVKRYFSEDS

SEQ ID NO: 83123 - DNA, 1105 bp, Arabidopsis thaliana
  misc_feature (1)..(1105): Ceres Seq. ID no. 12668798
  misc_feature (1)..(1105): Ortholog of  Ceres SEQ ID NO 13594298 as cited in SEQ ID NO 57803
  misc_feature (1)..(1105): Ortholog of  Ceres SEQ ID NO 13503476 as cited in SEQ ID NO 61978
  misc_feature (1)..(1105): Ortholog of  Ceres SEQ ID NO 12578438 as cited in SEQ ID NO 62201
  misc_feature (1)..(1105): Ortholog of  Ceres SEQ ID NO 12617675 as cited in SEQ ID NO 64656
atgagagattcaatctatcttttatggattgataatcgattagtggtaataattatgatggtgatgatggtatcatgtagatgcgttttgggattggagaacataaatccgatattcttcgatgaaggtctttctcatttgtttggtgaaggtaatctcatccgatctcctgatgatcgtagcgttcgattactcctcgacaaatacactgggtccggatttatctcttcaagcatgtatcaacatgggtttttcagttcgttgataaagttgccaggagcgtacacggctggtatcgtcgtcgctttctatacatcaaatggtgatgtgtttgtgaaggaccatgacgaactagacatagagtttttagggaacctagaaggaaagccttggcgatttcaaacgaatatgtatggaaacggtagcacaaaccgcggccgcgaagaacgctaccgtctttggtttgatccttccaaggagtttcaccgttatagcatcctttggacccctaccaaaataatattttgggtagatgatgtaccaataagagaaatcctaagaaaagaggaaatgaatggagactatccacaaaagccaatgtctctctatgcaaccatttgggacgcctcaagttgggctacttccggtggaaaattcggcgtcgactacacattttcaccttttgtttccgaattcaaagatatagccctcgacggttgtaatgtctctgactcattccccggagaaaacaacaacaacaacatcggtaattacaataacataaattgttctgtctccgaccaatttctcatgagcaatgactactcaaccattagtcctaaacaagcaactgctatgcgacggttccgagaacgttatatgtattattcgtattgttatgacaccattcgatactcggtgcctccaccggagtgtgttattgtgacggctgagaagaaccggtttagagatactggacggttaaagtttggtggtagtcatcctaaagtgcataaagcacgtaagaaacggcgacggaatcggtctacgccggttgtatcggctgacctatagcattaagttagttgaatttattaccgagtat

SEQ ID NO: 83124 - protein, 357 aa, Arabidopsis thaliana
  peptide (1)..(357): Ceres Seq. ID no. 12668799
MRDSIYLLWIDNRLVVIIMMVMMVSCRCVLGLENINPIFFDEGLSHLFGEGNLIRSPDDRSVRLLLDKYTGSGFISSSMYQHGFFSSLIKLPGAYTAGIVVAFYTSNGDVFVKDHDELDIEFLGNLEGKPWRFQTNMYGNGSTNRGREERYRLWFDPSKEFHRYSILWTPTKIIFWVDDVPIREILRKEEMNGDYPQKPMSLYATIWDASSWATSGGKFGVDYTFSPFVSEFKDIALDGCNVSDSFPGENNNNNIGNYNNINCSVSDQFLMSNDYSTISPKQATAMRRFRERYMYYSYCYDTIRYSVPPPECVIVTAEKNRFRDTGRLKFGGSHPKVHKARKKRRRNRSTPVVSADL

SEQ ID NO: 83125 - protein, 339 aa, Arabidopsis thaliana
  peptide (1)..(339): Ceres Seq. ID no. 12668800
MMVMMVSCRCVLGLENINPIFFDEGLSHLFGEGNLIRSPDDRSVRLLLDKYTGSGFISSSMYQHGFFSSLIKLPGAYTAGIVVAFYTSNGDVFVKDHDELDIEFLGNLEGKPWRFQTNMYGNGSTNRGREERYRLWFDPSKEFHRYSILWTPTKIIFWVDDVPIREILRKEEMNGDYPQKPMSLYATIWDASSWATSGGKFGVDYTFSPFVSEFKDIALDGCNVSDSFPGENNNNNIGNYNNINCSVSDQFLMSNDYSTISPKQATAMRRFRERYMYYSYCYDTIRYSVPPPECVIVTAEKNRFRDTGRLKFGGSHPKVHKARKKRRRNRSTPVVSADL

SEQ ID NO: 83126 - protein, 338 aa, Arabidopsis thaliana
  peptide (1)..(338): Ceres Seq. ID no. 12668801
MVMMVSCRCVLGLENINPIFFDEGLSHLFGEGNLIRSPDDRSVRLLLDKYTGSGFISSSMYQHGFFSSLIKLPGAYTAGIVVAFYTSNGDVFVKDHDELDIEFLGNLEGKPWRFQTNMYGNGSTNRGREERYRLWFDPSKEFHRYSILWTPTKIIFWVDDVPIREILRKEEMNGDYPQKPMSLYATIWDASSWATSGGKFGVDYTFSPFVSEFKDIALDGCNVSDSFPGENNNNNIGNYNNINCSVSDQFLMSNDYSTISPKQATAMRRFRERYMYYSYCYDTIRYSVPPPECVIVTAEKNRFRDTGRLKFGGSHPKVHKARKKRRRNRSTPVVSADL

SEQ ID NO: 83127 - DNA, 1993 bp, Arabidopsis thaliana
  misc_feature (1)..(1993): Ceres Seq. ID no. 12668824
  misc_feature (1)..(1993): Ortholog of  Ceres SEQ ID NO 14303627 as cited in SEQ ID NO 62070
  misc_feature (1)..(1993): Ortholog of  Ceres SEQ ID NO 13597546 as cited in SEQ ID NO 65017
  misc_feature (1)..(1993): Ortholog of  Ceres SEQ ID NO 14308015 as cited in SEQ ID NO 65798
  misc_feature (1)..(1993): Ortholog of  Ceres SEQ ID NO 15176077 as cited in SEQ ID NO 66728
  misc_feature (1)..(1993): Ortholog of  Ceres SEQ ID NO 13654353 as cited in SEQ ID NO 68318
atcacaaacatttcttccattacattaaaactccaaaaaattcatttttgttttcttttagagttcacaagttcttcgttgttcagctactcccactgtcataacacgaagtgggtttttttctgatcaaagaacaaaaacaaaaatggatatctccgccttgtttctcactctcttcgccggaagtctcttcctttactttctccggtgtctaatctctcagcgccgctttggatcttccaaactcccactccctccgggaacaatgggttggccttacgtcggagaaactttccagctttactctcaagaccctaatgtctttttccaatcaaaacagaaaaggtatggatcggtgtttaagactcatgtattgggatgtccatgtgtgatgatctcgagtccagaggctgctaagttcgtgctggtgacgaaatctcatctctttaaaccaacttttccggcgagtaaagagaggatgttggggaaacaagccatcttcttccaccagggtgattatcacgctaaactcaggaagcttgttcttcgtgcttttatgcctgaatctatcagaaacatggttcctgatattgaatccatcgctcaagactctctccgaagttgggagggaacaatgatcaacacttaccaagaaatgaaaacatacaccttcaacgttgcgttgctatcgatcttcggaaaagacgaggttttatacagagaagatctaaaacgatgctactacattctcgagaaaggttacaattcgatgccagtgaatctccctggaacacttttccacaaatcaatgaaagctcggaaggaactctcacagatcctcgctagaatcttatcagagagaagacagaacggttcctcacacaacgatcttctcggatcattcatgggagacaaagaagagctaaccgacgaacagatcgccgacaacataatcggagtaatcttcgccgctagagacacgacggcgagtgtgatgtcgtggatcctcaagtacctagccgagaatcccaacgttctagaagccgttactgaagaacaaatggcaataaggaaagacaaagaagaaggagagtctctaacttggggagatacaaagaagatgccattaacttcaagagttattcaagaaacattaagagtcgcttcaatcttatctttcacattcagagaagctgtcgaagatgtcgaatacgaaggatatttgatacctaaaggatggaaagtgttacccctattcagaaacattcatcatagtgctgatattttttctaatccggggaaatttgatccatcaagattcgaggtggctccaaaacccaatacgttcatgccatttggcaatggaacccactcgtgtcctggaaatgaattagccaagcttgagatgtctattatgattcatcatctcaccaccaagtacagttggtcaattgttggagcgagcgacgggattcagtatgggccattcgcgcttccccaaaacggactgcccattgtgctggcccggaagccggagatcgaagtgtagaatgacagaattgcctttagcttttctatatttggaaagaggagactagagaagaagaataaataattctttctttctttatcaagaaaaaaagatagagatggaggaaaacaggttcaagattttggtagaaaaatattccccaaatgggatcaaggagaaaacaccaagtgtacaaaaacttcaattttatttttcttgactttctttagttttttttttttgagtttttaattttaatttaagatgggaaaagctagtaattgaatttaaaaaaacaggggaaaatgttagtacaagtctctcatgtattttttttttgtttttcctgaaaatatcttatggttatgttataactatttcctcctggattgagacttcccttgttttttgaataaattttttttgttatatttttatatatatatttaaaatatctgtttt

SEQ ID NO: 83128 - protein, 467 aa, Arabidopsis thaliana
  peptide (1)..(467): Ceres Seq. ID no. 12668825
MDISALFLTLFAGSLFLYFLRCLISQRRFGSSKLPLPPGTMGWPYVGETFQLYSQDPNVFFQSKQKRYGSVFKTHVLGCPCVMISSPEAAKFVLVTKSHLFKPTFPASKERMLGKQAIFFHQGDYHAKLRKLVLRAFMPESIRNMVPDIESIAQDSLRSWEGTMINTYQEMKTYTFNVALLSIFGKDEVLYREDLKRCYYILEKGYNSMPVNLPGTLFHKSMKARKELSQILARILSERRQNGSSHNDLLGSFMGDKEELTDEQIADNIIGVIFAARDTTASVMSWILKYLAENPNVLEAVTEEQMAIRKDKEEGESLTWGDTKKMPLTSRVIQETLRVASILSFTFREAVEDVEYEGYLIPKGWKVLPLFRNIHHSADIFSNPGKFDPSRFEVAPKPNTFMPFGNGTHSCPGNELAKLEMSIMIHHLTTKYSWSIVGASDGIQYGPFALPQNGLPIVLARKPEIEV

SEQ ID NO: 83129 - protein, 427 aa, Arabidopsis thaliana
  peptide (1)..(427): Ceres Seq. ID no. 12668826
MGWPYVGETFQLYSQDPNVFFQSKQKRYGSVFKTHVLGCPCVMISSPEAAKFVLVTKSHLFKPTFPASKERMLGKQAIFFHQGDYHAKLRKLVLRAFMPESIRNMVPDIESIAQDSLRSWEGTMINTYQEMKTYTFNVALLSIFGKDEVLYREDLKRCYYILEKGYNSMPVNLPGTLFHKSMKARKELSQILARILSERRQNGSSHNDLLGSFMGDKEELTDEQIADNIIGVIFAARDTTASVMSWILKYLAENPNVLEAVTEEQMAIRKDKEEGESLTWGDTKKMPLTSRVIQETLRVASILSFTFREAVEDVEYEGYLIPKGWKVLPLFRNIHHSADIFSNPGKFDPSRFEVAPKPNTFMPFGNGTHSCPGNELAKLEMSIMIHHLTTKYSWSIVGASDGIQYGPFALPQNGLPIVLARKPEIEV

SEQ ID NO: 83130 - protein, 385 aa, Arabidopsis thaliana
  peptide (1)..(385): Ceres Seq. ID no. 12668827
MISSPEAAKFVLVTKSHLFKPTFPASKERMLGKQAIFFHQGDYHAKLRKLVLRAFMPESIRNMVPDIESIAQDSLRSWEGTMINTYQEMKTYTFNVALLSIFGKDEVLYREDLKRCYYILEKGYNSMPVNLPGTLFHKSMKARKELSQILARILSERRQNGSSHNDLLGSFMGDKEELTDEQIADNIIGVIFAARDTTASVMSWILKYLAENPNVLEAVTEEQMAIRKDKEEGESLTWGDTKKMPLTSRVIQETLRVASILSFTFREAVEDVEYEGYLIPKGWKVLPLFRNIHHSADIFSNPGKFDPSRFEVAPKPNTFMPFGNGTHSCPGNELAKLEMSIMIHHLTTKYSWSIVGASDGIQYGPFALPQNGLPIVLARKPEIEV

SEQ ID NO: 83131 - DNA, 2037 bp, Arabidopsis thaliana
  misc_feature (1)..(2037): Ceres Seq. ID no. 12668842
  misc_feature (1)..(2037): Ortholog of  Ceres SEQ ID NO 14313151 as cited in SEQ ID NO 54664
atggagaatcacagctgccttcagaaagatacgacgtcggcggccaaattagacgtcgaaactggaaacctccggcagagagatgaaacgaagccgttttatgcaaactcactgacgccacgtgagatggaatctcttgttgcgatctgcgataccttcatatcctccatcgacgactctggagtaggacacgtggatgattgcgtcgctggatatttctccgcctccgcttctcagaccggaactcccgaccgcgttgatgaaaaaggaaggaacttggcgtggaaagcaataggttacaatggacccagccctgatcatagtgatcatgaagtagaactaaacgaggagaagaagaagaagaaacctgaggagatctttggaccactttacaatggcatcgttgatctaaaaagccctagagaagccgtggaaaagaagctagccggtcgtgggttcgcagtttcaaatcaaaagaggaatacaaacggatcatctatctctgacccggtgatgaaaatccagtgtgatgctgtggtggttgggtctggatccggtggaggagtggcggcaggagtgttagccaaggctggttacaaagtgttggtgattgagtcagggaattactatgcaagaagcaaactttctttacttgaagggcaagctatggatgacatgtatttatccggtgggttattagcgacgtccgatacgaacgtagtgattcttgcgggatccacagtcggaggtggttctacaatcaattggtccgcctcgatcaagacaccagaacatgtgatgaaggaatgggcagaaaagtcaaaactcgaaatgttcggaagtgatttgtatcgagaggcaatggatgttgtctgtaagaggatgggtgttcaatgcggatttgtagaagaagggtttaataatgaggtattgagaaaaggttgtgaaaagttagggttaccagtgaagaatattccgaggaatgctccatccgatcattactgtgggttttgttgcttgggttgcaagaaaggtcaaaagcaggggacttcagagacttggcttgtagatttggtggaatctgataatggtttaatccttccaggttgtcaagcgacggaagtcatgtacgactgtgaacaggggaagaagaagaaggcaactggagttgcgtttgcgtttggggaagagatttatgtggtggagtctagagtgacaatagtggcttgcggtgcgcttagaacgccgcatctgttgaaacgtagcggtttgaagaatagtaacattgggagaaacctttgtctacatccggttgttatggcttggggatggtttccagaggaagataagtggccggaaaagaagaaaaagagctacgaggggggaataatgactgcgatgtctagcgttgtaattgaagaaacgcatagttcttatggtgaaatggttatccagacacctgctctacatccaggaatgttctcagggatcattccctggacatcaagcaaggatttcaaaacccgaatgctcaaattttcaagaaccgcacacatttttgcgcttctgagagataaaggaaccggaacaatagattccaagacctacattgactacaacttaaacgatgaagacgaagagagtctaaagaacggtcttgaaagagtcttgaagattctggccgcagccggagccgaggagattgggacgcatcattcagaaggtaggagtctgaatgttagaacagcgagttcgttagagattgagcggtttgtgagagaagagagttcaaagccgttgaaggatttgtcaggtcagatatgttcagctcaccaaatgggaagttgtaggatgggaattaggccggaggaatccgcggtgaggccaacaggagagacttgggaggtcgaaaggttatttgtggcggacacaagtgtttttccgaccgctttaggggttaatccgatggtcaccgttcagtctattgcttattgtattggacttaatgttgttgatgttcttaagaagaagaagtga

SEQ ID NO: 83132 - protein, 678 aa, Arabidopsis thaliana
  peptide (1)..(678): Ceres Seq. ID no. 12668843
MENHSCLQKDTTSAAKLDVETGNLRQRDETKPFYANSLTPREMESLVAICDTFISSIDDSGVGHVDDCVAGYFSASASQTGTPDRVDEKGRNLAWKAIGYNGPSPDHSDHEVELNEEKKKKKPEEIFGPLYNGIVDLKSPREAVEKKLAGRGFAVSNQKRNTNGSSISDPVMKIQCDAVVVGSGSGGGVAAGVLAKAGYKVLVIESGNYYARSKLSLLEGQAMDDMYLSGGLLATSDTNVVILAGSTVGGGSTINWSASIKTPEHVMKEWAEKSKLEMFGSDLYREAMDVVCKRMGVQCGFVEEGFNNEVLRKGCEKLGLPVKNIPRNAPSDHYCGFCCLGCKKGQKQGTSETWLVDLVESDNGLILPGCQATEVMYDCEQGKKKKATGVAFAFGEEIYVVESRVTIVACGALRTPHLLKRSGLKNSNIGRNLCLHPVVMAWGWFPEEDKWPEKKKKSYEGGIMTAMSSVVIEETHSSYGEMVIQTPALHPGMFSGIIPWTSSKDFKTRMLKFSRTAHIFALLRDKGTGTIDSKTYIDYNLNDEDEESLKNGLERVLKILAAAGAEEIGTHHSEGRSLNVRTASSLEIERFVREESSKPLKDLSGQICSAHQMGSCRMGIRPEESAVRPTGETWEVERLFVADTSVFPTALGVNPMVTVQSIAYCIGLNVVDVLKKKK

SEQ ID NO: 83133 - protein, 636 aa, Arabidopsis thaliana
  peptide (1)..(636): Ceres Seq. ID no. 12668844
MESLVAICDTFISSIDDSGVGHVDDCVAGYFSASASQTGTPDRVDEKGRNLAWKAIGYNGPSPDHSDHEVELNEEKKKKKPEEIFGPLYNGIVDLKSPREAVEKKLAGRGFAVSNQKRNTNGSSISDPVMKIQCDAVVVGSGSGGGVAAGVLAKAGYKVLVIESGNYYARSKLSLLEGQAMDDMYLSGGLLATSDTNVVILAGSTVGGGSTINWSASIKTPEHVMKEWAEKSKLEMFGSDLYREAMDVVCKRMGVQCGFVEEGFNNEVLRKGCEKLGLPVKNIPRNAPSDHYCGFCCLGCKKGQKQGTSETWLVDLVESDNGLILPGCQATEVMYDCEQGKKKKATGVAFAFGEEIYVVESRVTIVACGALRTPHLLKRSGLKNSNIGRNLCLHPVVMAWGWFPEEDKWPEKKKKSYEGGIMTAMSSVVIEETHSSYGEMVIQTPALHPGMFSGIIPWTSSKDFKTRMLKFSRTAHIFALLRDKGTGTIDSKTYIDYNLNDEDEESLKNGLERVLKILAAAGAEEIGTHHSEGRSLNVRTASSLEIERFVREESSKPLKDLSGQICSAHQMGSCRMGIRPEESAVRPTGETWEVERLFVADTSVFPTALGVNPMVTVQSIAYCIGLNVVDVLKKKK

SEQ ID NO: 83134 - protein, 507 aa, Arabidopsis thaliana
  peptide (1)..(507): Ceres Seq. ID no. 12668845
MKIQCDAVVVGSGSGGGVAAGVLAKAGYKVLVIESGNYYARSKLSLLEGQAMDDMYLSGGLLATSDTNVVILAGSTVGGGSTINWSASIKTPEHVMKEWAEKSKLEMFGSDLYREAMDVVCKRMGVQCGFVEEGFNNEVLRKGCEKLGLPVKNIPRNAPSDHYCGFCCLGCKKGQKQGTSETWLVDLVESDNGLILPGCQATEVMYDCEQGKKKKATGVAFAFGEEIYVVESRVTIVACGALRTPHLLKRSGLKNSNIGRNLCLHPVVMAWGWFPEEDKWPEKKKKSYEGGIMTAMSSVVIEETHSSYGEMVIQTPALHPGMFSGIIPWTSSKDFKTRMLKFSRTAHIFALLRDKGTGTIDSKTYIDYNLNDEDEESLKNGLERVLKILAAAGAEEIGTHHSEGRSLNVRTASSLEIERFVREESSKPLKDLSGQICSAHQMGSCRMGIRPEESAVRPTGETWEVERLFVADTSVFPTALGVNPMVTVQSIAYCIGLNVVDVLKKKK

SEQ ID NO: 83135 - DNA, 924 bp, Arabidopsis thaliana
  misc_feature (1)..(924): Ceres Seq. ID no. 12668846
  misc_feature (1)..(924): Ortholog of  Ceres SEQ ID NO 15178112 as cited in SEQ ID NO 1156
gattcgtccctaagcagccatgacgacgccgtgccggaccattaacgctaatgctatcgccgcaccgtcgccttcgggattgatctttaacgggtttcgtgatttcgtcccgattgaaaagaggcttgttatatcaagctttcgtggcttgaaactaccgtcgaggacgacgaagactattacgagctctgactggagttggagttataggtctccgggaagattggcgtctgcgtctacgtctacgtctgcgtctacgtctacgtctgcggctgtaacatcgaattctacgaatagatttgaagctttagaagaggggattgagaaggtcatttatagttgtcgatttatgacgtttcttggaacattaggatctttgctcggatcggttctctgtttcatcaagggatgtatgtatgttgtagactcgtttttgcagtattcggtgaatcgtgggaaagtgatattccttttggttgaggccatagatatatatctcctaggaactgtgatgttagtctttggattgggactttacgagttgttcatcagcaatctcgatacttcagagtcgcgcacacacgatattgtttccaataggtcgagcctctttggcatgttcaccttaaaggagcgacctcaatggttagaggtgaaatcggtaagcgagctgaaaacaaagttgggacatgtaatagtgatgctactattgattggtttgtttgacaagagcaagagagtagtcataacttctgtcacggatttgctatgtatctctgtttctatctttttttcttctgcttgtctcttcttgctctctaggctcaatggttcacactgaggagttaatggtgttgtcccaaaacaaaagaaactttgtatgtgtataatgttttagcaacgctccatcttctctttttgttc

SEQ ID NO: 83136 - protein, 273 aa, Arabidopsis thaliana
  peptide (1)..(273): Ceres Seq. ID no. 12668847
MTTPCRTINANAIAAPSPSGLIFNGFRDFVPIEKRLVISSFRGLKLPSRTTKTITSSDWSWSYRSPGRLASASTSTSASTSTSAAVTSNSTNRFEALEEGIEKVIYSCRFMTFLGTLGSLLGSVLCFIKGCMYVVDSFLQYSVNRGKVIFLLVEAIDIYLLGTVMLVFGLGLYELFISNLDTSESRTHDIVSNRSSLFGMFTLKERPQWLEVKSVSELKTKLGHVIVMLLLIGLFDKSKRVVITSVTDLLCISVSIFFSSACLFLLSRLNGSH

SEQ ID NO: 83137 - protein, 163 aa, Arabidopsis thaliana
  peptide (1)..(163): Ceres Seq. ID no. 12668848
MTFLGTLGSLLGSVLCFIKGCMYVVDSFLQYSVNRGKVIFLLVEAIDIYLLGTVMLVFGLGLYELFISNLDTSESRTHDIVSNRSSLFGMFTLKERPQWLEVKSVSELKTKLGHVIVMLLLIGLFDKSKRVVITSVTDLLCISVSIFFSSACLFLLSRLNGSH

SEQ ID NO: 83138 - protein, 142 aa, Arabidopsis thaliana
  peptide (1)..(142): Ceres Seq. ID no. 12668849
MYVVDSFLQYSVNRGKVIFLLVEAIDIYLLGTVMLVFGLGLYELFISNLDTSESRTHDIVSNRSSLFGMFTLKERPQWLEVKSVSELKTKLGHVIVMLLLIGLFDKSKRVVITSVTDLLCISVSIFFSSACLFLLSRLNGSH

SEQ ID NO: 83139 - DNA, 1053 bp, Arabidopsis thaliana
  misc_feature (1)..(1053): Ceres Seq. ID no. 12668873
  misc_feature (1)..(1053): Ortholog of  Ceres SEQ ID NO 13579918 as cited in SEQ ID NO 64644
  misc_feature (1)..(1053): Ortholog of  Ceres SEQ ID NO 13654122 as cited in SEQ ID NO 68192
atggctactaccaagctcgtctacattctcctcatcctattcaccttcaccgtatctccggcgatctcaacggccccggaacattgtgatagcggctttgataacccgtgcatcaacaaagctaaggctttaccactcaaaatcgtagccattgttgccatacttacaacaagcttgataggcgtgacctctcctcttttcagccgttacatttcgttcctccgtcccgatggcaatggtttcatgatcgtcaaatgtttttcttctggaatcatccttggaaccggtttcatgcacgtcttgcctgactctttcgagatgttgtcatcgaaatgtcttagtgataatccgtggcataagttcccttttgcgggttttgtcgctatgatgtccggtctagtcactctagccattgactccattaccaccagcctttataccggtaagaactcagtcggaccagtgcctgatgaagagtatggcattgatcaagagaaagcgattcacatggtaggccacaatcatagtcacggtcatggtgtagtgctagcaactaaagatgatggacagcttttgcgctaccaagtcattgccatggtattggaggttggcattttatttcattctgtggtcattggactatctctaggagcaactaatgattcatgtaccattaaaggactcatcatagctctttgcttccatcacttgttcgaaggcataggtcttggtggctgcatcctccaggcagattttacaaatgtgaagaagttcttgatggcattctttttcactggaacaacaccttgtggtatctttcttggaatcgcattgtcgagtatctatagagataacagtccaaccgcgttgattacgattggactgttaaatgcttgctcggccggaatgctcatctacatggccctcgtcgaccttctagctaccgagttcatggggtcaatgctccaaggtagcatcaaacttcagatcaagtgcttcacggcggctttgcttggctgcgccgtaatgtcggtcgtcgccgtgtgggcttaa

SEQ ID NO: 83140 - protein, 350 aa, Arabidopsis thaliana
  peptide (1)..(350): Ceres Seq. ID no. 12668874
MATTKLVYILLILFTFTVSPAISTAPEHCDSGFDNPCINKAKALPLKIVAIVAILTTSLIGVTSPLFSRYISFLRPDGNGFMIVKCFSSGIILGTGFMHVLPDSFEMLSSKCLSDNPWHKFPFAGFVAMMSGLVTLAIDSITTSLYTGKNSVGPVPDEEYGIDQEKAIHMVGHNHSHGHGVVLATKDDGQLLRYQVIAMVLEVGILFHSVVIGLSLGATNDSCTIKGLIIALCFHHLFEGIGLGGCILQADFTNVKKFLMAFFFTGTTPCGIFLGIALSSIYRDNSPTALITIGLLNACSAGMLIYMALVDLLATEFMGSMLQGSIKLQIKCFTAALLGCAVMSVVAVWA

SEQ ID NO: 83141 - protein, 269 aa, Arabidopsis thaliana
  peptide (1)..(269): Ceres Seq. ID no. 12668875
MIVKCFSSGIILGTGFMHVLPDSFEMLSSKCLSDNPWHKFPFAGFVAMMSGLVTLAIDSITTSLYTGKNSVGPVPDEEYGIDQEKAIHMVGHNHSHGHGVVLATKDDGQLLRYQVIAMVLEVGILFHSVVIGLSLGATNDSCTIKGLIIALCFHHLFEGIGLGGCILQADFTNVKKFLMAFFFTGTTPCGIFLGIALSSIYRDNSPTALITIGLLNACSAGMLIYMALVDLLATEFMGSMLQGSIKLQIKCFTAALLGCAVMSVVAVWA

SEQ ID NO: 83142 - protein, 253 aa, Arabidopsis thaliana
  peptide (1)..(253): Ceres Seq. ID no. 12668876
MHVLPDSFEMLSSKCLSDNPWHKFPFAGFVAMMSGLVTLAIDSITTSLYTGKNSVGPVPDEEYGIDQEKAIHMVGHNHSHGHGVVLATKDDGQLLRYQVIAMVLEVGILFHSVVIGLSLGATNDSCTIKGLIIALCFHHLFEGIGLGGCILQADFTNVKKFLMAFFFTGTTPCGIFLGIALSSIYRDNSPTALITIGLLNACSAGMLIYMALVDLLATEFMGSMLQGSIKLQIKCFTAALLGCAVMSVVAVWA

SEQ ID NO: 83143 - DNA, 1329 bp, Arabidopsis thaliana
  misc_feature (1)..(1329): Ceres Seq. ID no. 12668877
  misc_feature (1)..(1329): Ortholog of  Ceres SEQ ID NO 13579918 as cited in SEQ ID NO 64644
  misc_feature (1)..(1329): Ortholog of  Ceres SEQ ID NO 13654122 as cited in SEQ ID NO 68192
caaattcagcacttctcatgaaaacaatcttcctcgtactcatttttgtctcttttgcaatctctccagcaacttcaactgcgccggaagaatgtggaagcgagtcagcgaacccgtgcgtcaacaaagctaaagctttgcctctcaaagtcatagcaatcttcgtaatcctcattgcaagcatgattggtgttggagctcctctctttagccgtaacgtttcgttcctccaaccagacggaaacatcttcactatcattaagtgtttcgcctccgggatcatccttggaaccggttttatgcacgttttacctgattctttcgaaatgttgtcatctatatgtcttgaagagaacccgtggcataaatttcctttctccggatttctcgctatgttatcgggtctaatcactctagccattgactccatggccacgagcctatacaccagcaagaacgcagttggtatcatgccccatggtcatggtcatggtcacggccccgcaaatgatgttaccttaccaataaaagaagatgattcgtcaaatgcacagctcttgcgataccgagtcattgccatggtcttggaacttgggatcatagttcactcggtggtcattggattatctctaggagcaactagtgacacttgcaccattaaaggacttatagcagctctttgcttccatcaaatgttcgaaggcatgggtcttggcggttgtatcctccaggctgagtatacaaatatgaagaaatttgttatggcgttctttttcgcggtaacaacaccattcggaatagcgttagggatcgctctatcaactgtttaccaagataatagcccaaaagctttgatcacggttggacttctaaatgcatgctccgctggattgctcatttacatggcactcgtggatcttctagctgcggagttcatgggacctaagcttcaaggtagcatcaaaatgcagttcaagtgtttaatcgcggctcttctcgggtgcggtggaatgtcgattatcgccaaatgggcttaactaatactccagatattgcggaattgaaatcatgtggatttcattatcgaactaaaaccgttttaggtttacgtctcgattctctatcggttttttatcttctcttacaaaagatttgcgtggatctatcacattttaaggaacatgtcttttggtagatatgtaaatgtgataggccccacgattcatagttttcttttgtatcttcctttattttgtcaaggcagtatagttcatatcgtgtaatgtttttgcatctcatataaataaataaaacttttgctgctttttc

SEQ ID NO: 83144 - protein, 344 aa, Arabidopsis thaliana
  peptide (1)..(344): Ceres Seq. ID no. 12668878
NSALLMKTIFLVLIFVSFAISPATSTAPEECGSESANPCVNKAKALPLKVIAIFVILIASMIGVGAPLFSRNVSFLQPDGNIFTIIKCFASGIILGTGFMHVLPDSFEMLSSICLEENPWHKFPFSGFLAMLSGLITLAIDSMATSLYTSKNAVGIMPHGHGHGHGPANDVTLPIKEDDSSNAQLLRYRVIAMVLELGIIVHSVVIGLSLGATSDTCTIKGLIAALCFHQMFEGMGLGGCILQAEYTNMKKFVMAFFFAVTTPFGIALGIALSTVYQDNSPKALITVGLLNACSAGLLIYMALVDLLAAEFMGPKLQGSIKMQFKCLIAALLGCGGMSIIAKWA

SEQ ID NO: 83145 - protein, 339 aa, Arabidopsis thaliana
  peptide (1)..(339): Ceres Seq. ID no. 12668879
MKTIFLVLIFVSFAISPATSTAPEECGSESANPCVNKAKALPLKVIAIFVILIASMIGVGAPLFSRNVSFLQPDGNIFTIIKCFASGIILGTGFMHVLPDSFEMLSSICLEENPWHKFPFSGFLAMLSGLITLAIDSMATSLYTSKNAVGIMPHGHGHGHGPANDVTLPIKEDDSSNAQLLRYRVIAMVLELGIIVHSVVIGLSLGATSDTCTIKGLIAALCFHQMFEGMGLGGCILQAEYTNMKKFVMAFFFAVTTPFGIALGIALSTVYQDNSPKALITVGLLNACSAGLLIYMALVDLLAAEFMGPKLQGSIKMQFKCLIAALLGCGGMSIIAKWA

SEQ ID NO: 83146 - protein, 284 aa, Arabidopsis thaliana
  peptide (1)..(284): Ceres Seq. ID no. 12668880
MIGVGAPLFSRNVSFLQPDGNIFTIIKCFASGIILGTGFMHVLPDSFEMLSSICLEENPWHKFPFSGFLAMLSGLITLAIDSMATSLYTSKNAVGIMPHGHGHGHGPANDVTLPIKEDDSSNAQLLRYRVIAMVLELGIIVHSVVIGLSLGATSDTCTIKGLIAALCFHQMFEGMGLGGCILQAEYTNMKKFVMAFFFAVTTPFGIALGIALSTVYQDNSPKALITVGLLNACSAGLLIYMALVDLLAAEFMGPKLQGSIKMQFKCLIAALLGCGGMSIIAKWA

SEQ ID NO: 83147 - DNA, 2751 bp, Arabidopsis thaliana
  misc_feature (1)..(2751): Ceres Seq. ID no. 12668881
  misc_feature (1)..(2751): Ortholog of  Ceres SEQ ID NO 12618563 as cited in SEQ ID NO 65025
atggcgactctgaagccgtcatttactgtttctccgccgaatagtaatccgattagatttggaagttttccgccgcaatgctttctccgtgttccgaaaccgcggcgacttatattgcctaggtttcggaagacgactggtggtggcggcggcttgattcgatgtgagcttccagattttcatctatcagcaacagcaactactgtatcaggtgtatcgacggtgaatttagtggatcaagttcagattcctaaaggtgaaatgtggagtgttcacaagtttggtgggacttgtgtgggaaactctcagaggatcagaaatgtagcagaggttataatcaatgataattccgaaagaaaacttgtggttgtctcggcgatgtcgaaggttacggacatgatgtatgacttaatccgcaaggcacaatcacgagatgattcttatttatccgcgttggaagctgtcttggaaaagcatcgtttaacagctcgtgaccttctcgatggagatgatctcgctagtttcttgtcacatttgcataatgatattagtaatcttaaagcaatgcttcgtgctatatacatagctggccatgcatcagagtcgttttcagattttgttgcaggacatggggagctttggtctgctcagatgctatcatatgttgtcagaaagactgggcttgagtgcaagtggatggatactagagacgtgctcattgttaatcccaccagctctaatcaggttgatcctgattttggtgaatctgagaagagactcgataaatggttctccttaaatccgtcgaaaattattattgcgactgggtttattgctagcactccgcaaaatattccaacaactttgaaaagagatgggagtgatttctcagcagctattatgggtgctttattgagagctcgtcaagtaaccatttggacagatgttgatggtgtatacagtgcggatcctcgtaaagttaatgaggcagtgatactccagacactttcttatcaagaggcctgggaaatgtcttattttggagcaaatgtgttacatcctcgcaccatcattcctgtgatgcgatataatattccgattgtgattagaaatattttcaatctctctgcaccgggaacaataatctgtcaacctcctgaagatgattatgaccttaaactgacaactcctgtcaaagggtttgcaactattgacaatttggccctcataaatgttgaaggtactggaatggctggtgtacccggtactgcaagtgacatttttggctgtgtaaaagatgttggagctaatgtgattatgatatcacaggctagcagtgagcattctgtgtgctttgctgtgcctgagaaggaagtaaacgcagtctctgaggcattgcggtcgagatttagtgaagctttacaagcgggacgtctttctcagattgaggtgataccaaactgtagcatcttagctgcagtcggccagaaaatggctagtacacctggagttagttgtacacttttcagtgctttggcgaaggctaatattaatgtccgagctatatctcaaggttgttctgagtacaatgttactgtcgttattaaacgtgaagatagcgttaaggcgttaagagctgtacactcgaggtttttcttgtcaagaacaacattagcaatgggaatcgtaggaccgggcttgattggtgcaacattacttgaccagctgcgggatcaggctgctgttctcaaacaagaatttaacattgatctgcgtgttttgggaatcactggttcaaagaagatgttattgagtgacattggtattgatttgtcgagatggagagaacttctaaacgagaagggaacagaggcggatttggataaattcactcaacaagtgcatggaaatcattttatccccaactctgtagtggttgattgtacagcagactctgctattgcaagccgttactatgattggttacgaaagggaattcatgtcattaccccaaataaaaaggctaactcaggtcccctcgatcagtacttgaaactgagagatcttcaaaggaaatcctacactcattacttctacgaagccactgttggagctggtcttccaattatcagcactttacgtggtctccttgagacaggagataagatactacgcatagagggcatttgcagtggaactttgagttatctattcaacaattttgttggagatcgaagtttcagcgaggttgtcactgaagcaaagaacgcaggtttcactgagcctgatccaagagatgatttatctggaactgatgttgcaaggaaggtgattatcctcgctcgagaatctggactgaaattggacctcgctgatctccccattagaagtctcgtaccagaacctctaaaaggatgcacttctgttgaagaattcatggagaaactcccacagtacgatggagacctagcaaaagaaaggctagatgctgaaaactctggggaagttctgagatatgttggagtggtggacgctgttaaccaaaagggaacagttgaacttcgaagatacaagaaagaacatccatttgcgcagctcgcaggttcagacaacataatagccttcacaacgacaaggtacaaggatcatccacttatagtccgaggacctggagctggtgctcaagtcacggccggtggtatattcagcgacatactaaggcttgcatcttatctcggtgcaccgtcttaa

SEQ ID NO: 83148 - protein, 916 aa, Arabidopsis thaliana
  peptide (1)..(916): Ceres Seq. ID no. 12668882
MATLKPSFTVSPPNSNPIRFGSFPPQCFLRVPKPRRLILPRFRKTTGGGGGLIRCELPDFHLSATATTVSGVSTVNLVDQVQIPKGEMWSVHKFGGTCVGNSQRIRNVAEVIINDNSERKLVVVSAMSKVTDMMYDLIRKAQSRDDSYLSALEAVLEKHRLTARDLLDGDDLASFLSHLHNDISNLKAMLRAIYIAGHASESFSDFVAGHGELWSAQMLSYVVRKTGLECKWMDTRDVLIVNPTSSNQVDPDFGESEKRLDKWFSLNPSKIIIATGFIASTPQNIPTTLKRDGSDFSAAIMGALLRARQVTIWTDVDGVYSADPRKVNEAVILQTLSYQEAWEMSYFGANVLHPRTIIPVMRYNIPIVIRNIFNLSAPGTIICQPPEDDYDLKLTTPVKGFATIDNLALINVEGTGMAGVPGTASDIFGCVKDVGANVIMISQASSEHSVCFAVPEKEVNAVSEALRSRFSEALQAGRLSQIEVIPNCSILAAVGQKMASTPGVSCTLFSALAKANINVRAISQGCSEYNVTVVIKREDSVKALRAVHSRFFLSRTTLAMGIVGPGLIGATLLDQLRDQAAVLKQEFNIDLRVLGITGSKKMLLSDIGIDLSRWRELLNEKGTEADLDKFTQQVHGNHFIPNSVVVDCTADSAIASRYYDWLRKGIHVITPNKKANSGPLDQYLKLRDLQRKSYTHYFYEATVGAGLPIISTLRGLLETGDKILRIEGICSGTLSYLFNNFVGDRSFSEVVTEAKNAGFTEPDPRDDLSGTDVARKVIILARESGLKLDLADLPIRSLVPEPLKGCTSVEEFMEKLPQYDGDLAKERLDAENSGEVLRYVGVVDAVNQKGTVELRRYKKEHPFAQLAGSDNIIAFTTTRYKDHPLIVRGPGAGAQVTAGGIFSDILRLASYLGAPS

SEQ ID NO: 83149 - protein, 829 aa, Arabidopsis thaliana
  peptide (1)..(829): Ceres Seq. ID no. 12668883
MWSVHKFGGTCVGNSQRIRNVAEVIINDNSERKLVVVSAMSKVTDMMYDLIRKAQSRDDSYLSALEAVLEKHRLTARDLLDGDDLASFLSHLHNDISNLKAMLRAIYIAGHASESFSDFVAGHGELWSAQMLSYVVRKTGLECKWMDTRDVLIVNPTSSNQVDPDFGESEKRLDKWFSLNPSKIIIATGFIASTPQNIPTTLKRDGSDFSAAIMGALLRARQVTIWTDVDGVYSADPRKVNEAVILQTLSYQEAWEMSYFGANVLHPRTIIPVMRYNIPIVIRNIFNLSAPGTIICQPPEDDYDLKLTTPVKGFATIDNLALINVEGTGMAGVPGTASDIFGCVKDVGANVIMISQASSEHSVCFAVPEKEVNAVSEALRSRFSEALQAGRLSQIEVIPNCSILAAVGQKMASTPGVSCTLFSALAKANINVRAISQGCSEYNVTVVIKREDSVKALRAVHSRFFLSRTTLAMGIVGPGLIGATLLDQLRDQAAVLKQEFNIDLRVLGITGSKKMLLSDIGIDLSRWRELLNEKGTEADLDKFTQQVHGNHFIPNSVVVDCTADSAIASRYYDWLRKGIHVITPNKKANSGPLDQYLKLRDLQRKSYTHYFYEATVGAGLPIISTLRGLLETGDKILRIEGICSGTLSYLFNNFVGDRSFSEVVTEAKNAGFTEPDPRDDLSGTDVARKVIILARESGLKLDLADLPIRSLVPEPLKGCTSVEEFMEKLPQYDGDLAKERLDAENSGEVLRYVGVVDAVNQKGTVELRRYKKEHPFAQLAGSDNIIAFTTTRYKDHPLIVRGPGAGAQVTAGGIFSDILRLASYLGAPS

SEQ ID NO: 83150 - protein, 790 aa, Arabidopsis thaliana
  peptide (1)..(790): Ceres Seq. ID no. 12668884
MSKVTDMMYDLIRKAQSRDDSYLSALEAVLEKHRLTARDLLDGDDLASFLSHLHNDISNLKAMLRAIYIAGHASESFSDFVAGHGELWSAQMLSYVVRKTGLECKWMDTRDVLIVNPTSSNQVDPDFGESEKRLDKWFSLNPSKIIIATGFIASTPQNIPTTLKRDGSDFSAAIMGALLRARQVTIWTDVDGVYSADPRKVNEAVILQTLSYQEAWEMSYFGANVLHPRTIIPVMRYNIPIVIRNIFNLSAPGTIICQPPEDDYDLKLTTPVKGFATIDNLALINVEGTGMAGVPGTASDIFGCVKDVGANVIMISQASSEHSVCFAVPEKEVNAVSEALRSRFSEALQAGRLSQIEVIPNCSILAAVGQKMASTPGVSCTLFSALAKANINVRAISQGCSEYNVTVVIKREDSVKALRAVHSRFFLSRTTLAMGIVGPGLIGATLLDQLRDQAAVLKQEFNIDLRVLGITGSKKMLLSDIGIDLSRWRELLNEKGTEADLDKFTQQVHGNHFIPNSVVVDCTADSAIASRYYDWLRKGIHVITPNKKANSGPLDQYLKLRDLQRKSYTHYFYEATVGAGLPIISTLRGLLETGDKILRIEGICSGTLSYLFNNFVGDRSFSEVVTEAKNAGFTEPDPRDDLSGTDVARKVIILARESGLKLDLADLPIRSLVPEPLKGCTSVEEFMEKLPQYDGDLAKERLDAENSGEVLRYVGVVDAVNQKGTVELRRYKKEHPFAQLAGSDNIIAFTTTRYKDHPLIVRGPGAGAQVTAGGIFSDILRLASYLGAPS

SEQ ID NO: 83151 - DNA, 1272 bp, Arabidopsis thaliana
  misc_feature (1)..(1272): Ceres Seq. ID no. 12668910
  misc_feature (1)..(1272): Ortholog of  Ceres SEQ ID NO 14311103 as cited in SEQ ID NO 52897
atgagcgaggacaaagattacatgtcggagccatttatcgttaagaagattgatgatgaagaatcattgcttgatgattataatccacagggcaatacttctttctccaagacttgtttccatggcattaacgccttatcaggtgtgggtatattatcggtcccttatgccttagcatccggaggatggctaagtttgatcatacttttcaccgtagcgatcacaactttctactgtgccattctcattaagagatgtatggaaatggatccacttcttagatcatacccggacattggctacaaagcctttggaaacacaggacgtgttatcgtctccatcttcatgaacctcgagctttacctagttgcaactagtttcttgatcctagaaggtgacaaccttaacaaactcttctcaaacgttggactcaacttcatggggcttgaattccaaggcaagcaaatgttcatcatcatggtggctctcattattcttccttcggtttggttagacaatatgaggattctttcttatgtttccgcgagtggtgtctttgcttccggggttattcttgcttctatcttttcggttggagcttttgaaggcgtagggttcaagaacaatgactcagaggtctttcgacttaatggagtcgctacttcggtgagcttatacgcgttttgttattgcgctcatccagttttcccaactctatacacttccatgaagaacaaacgccaattctcaaacgttatgattatatgtttcacaatatgcaccttcatatatgcatcagtggcggtattgggttacttaatgtatggatcagatgttgaatcacagatcactttgaatcttcctactgataagcttagttcaaaagtggcgatatggactacattggtcaacccaatagctaagtttgctctcatggttacacctattattgacgcaatgagaagccggttttctcgagttttgcctaataaaagagcttctggatttttgctaagtacaatactagttactagcaatgtgattgtggcattgcttcttccgttttttggtgatcttatgagtcttgtgggagcattcttgagcgcatccgcatcggttatattgccatgtttatgttacttaaagatctctgggaaatatcaaagactcggattcgaaacattggtgctcatcggaatcactctaaccggtatcgtggttgtgataaccggaacttaccaagcggtcaaggacatttttggtcgattttga

SEQ ID NO: 83152 - protein, 423 aa, Arabidopsis thaliana
  peptide (1)..(423): Ceres Seq. ID no. 12668911
MSEDKDYMSEPFIVKKIDDEESLLDDYNPQGNTSFSKTCFHGINALSGVGILSVPYALASGGWLSLIILFTVAITTFYCAILIKRCMEMDPLLRSYPDIGYKAFGNTGRVIVSIFMNLELYLVATSFLILEGDNLNKLFSNVGLNFMGLEFQGKQMFIIMVALIILPSVWLDNMRILSYVSASGVFASGVILASIFSVGAFEGVGFKNNDSEVFRLNGVATSVSLYAFCYCAHPVFPTLYTSMKNKRQFSNVMIICFTICTFIYASVAVLGYLMYGSDVESQITLNLPTDKLSSKVAIWTTLVNPIAKFALMVTPIIDAMRSRFSRVLPNKRASGFLLSTILVTSNVIVALLLPFFGDLMSLVGAFLSASASVILPCLCYLKISGKYQRLGFETLVLIGITLTGIVVVITGTYQAVKDIFGRF

SEQ ID NO: 83153 - protein, 416 aa, Arabidopsis thaliana
  peptide (1)..(416): Ceres Seq. ID no. 12668912
MSEPFIVKKIDDEESLLDDYNPQGNTSFSKTCFHGINALSGVGILSVPYALASGGWLSLIILFTVAITTFYCAILIKRCMEMDPLLRSYPDIGYKAFGNTGRVIVSIFMNLELYLVATSFLILEGDNLNKLFSNVGLNFMGLEFQGKQMFIIMVALIILPSVWLDNMRILSYVSASGVFASGVILASIFSVGAFEGVGFKNNDSEVFRLNGVATSVSLYAFCYCAHPVFPTLYTSMKNKRQFSNVMIICFTICTFIYASVAVLGYLMYGSDVESQITLNLPTDKLSSKVAIWTTLVNPIAKFALMVTPIIDAMRSRFSRVLPNKRASGFLLSTILVTSNVIVALLLPFFGDLMSLVGAFLSASASVILPCLCYLKISGKYQRLGFETLVLIGITLTGIVVVITGTYQAVKDIFGRF

SEQ ID NO: 83154 - protein, 337 aa, Arabidopsis thaliana
  peptide (1)..(337): Ceres Seq. ID no. 12668913
MEMDPLLRSYPDIGYKAFGNTGRVIVSIFMNLELYLVATSFLILEGDNLNKLFSNVGLNFMGLEFQGKQMFIIMVALIILPSVWLDNMRILSYVSASGVFASGVILASIFSVGAFEGVGFKNNDSEVFRLNGVATSVSLYAFCYCAHPVFPTLYTSMKNKRQFSNVMIICFTICTFIYASVAVLGYLMYGSDVESQITLNLPTDKLSSKVAIWTTLVNPIAKFALMVTPIIDAMRSRFSRVLPNKRASGFLLSTILVTSNVIVALLLPFFGDLMSLVGAFLSASASVILPCLCYLKISGKYQRLGFETLVLIGITLTGIVVVITGTYQAVKDIFGRF

SEQ ID NO: 83155 - DNA, 3092 bp, Arabidopsis thaliana
  misc_feature (1)..(3092): Ceres Seq. ID no. 12668948
  misc_feature (1)..(3092): Ortholog of  Ceres SEQ ID NO 14307530 as cited in SEQ ID NO 58394
atggcgacggctacgacgactgctacggcggcgtttagtggtgtagtcagtgtaggaacggagactcgaaggatttattcgttttctcatcttcaaccttctgcggcttttccggcgaagcctagttccttcaaatctctcaaattaaagcagagcgcgaggctcacacggcggcttgatcatcggccgttcgttgtccgatgtgaagcttcttcttctaatggaaggcttacacagcaagaattcacagaaatggcgtggcaatcgatagtttcgtcaccagatgttgcaaaagagaataagcaacagattgtggagacagagcatctaatgaaagctcttttggagcagaagaatggtttagctcgtaggattttctctaagatcggtgtggataacacaaaggttctagaagcaacagagaagttcattcaacgccaaccaaaggtgtatggagatgctgctggttcgatgttggggcgtgatttggaagctctgttccagagagcaagacagtttaagaaagatttaaaggactcttatgtgtcagtggagcatttggttcttgcttttgctgatgataagcggtttgggaaacagttgtttaaggattttcagatatcagagaggagcttgaaatctgcaattgaatccattagagggaaacaatcagtcattgaccaagatccggaaggcaagtatgaggcgttggagaagtatggaaaagacttgacagcaatggcaagagagggaaaactagatcctgtgataggtagagatgacgagatccgaagatgcattcagattctctcaaggagaacaaagaacaaccctgtgttgatcggtgaaccaggtgttggtaaaactgcaatttcagaaggacttgctcagaggattgtgcaaggagatgtacctcaagcattgatgaacagaaagttgatatctcttgatatgggtgctctcattgctggagcaaagtatcggggagaattcgaagacagactaaaagctgtgcttaaggaagtcacagactcagaaggccaaatcattttgttcatcgatgagatccatacagttgttggtgcaggtgcgactaatggggccatggatgctggtaatctgctgaaaccgatgctgggccgaggcgagttacgttgtatcggtgcaaccacgcttgatgaatataggaaatacatagagaaagatccagccttggagcgtaggtttcaacaggtttatgttgatcaacctacggttgaagacacgatttctattctccgtggtttgcgggaaaggtatgaactacatcatggagttcgcatctcagatagtgctctagtggaagctgctatcctctcagaccgttacatcagtggccggtttctacccgataaagcaattgacttggtcgatgaagcggcagccaaattgaaaatggaaatcacttcgaaacctacagctcttgacgagcttgaccgttcggtaataaagcttgaaatggagaggctttcacttaccaatgatacagacaaagcttctagagagagattgaatcgaattgaaactgagttagtgctattaaaggagaaacaagctgagttaactgaacagtgggagcacgagaggtctgttatgtcccgtcttcagtcgattaaagaggagattgatcgagtaaacctcgagatccagcaggcggaacgtgaatacgatctcaaccgtgcagctgagctcaaatacggaagcttaaactcattgcagcgacagcttaatgaagcagagaaagagctgaacgagtacttaagctctgggaaatctatgttcagagaagaggttttgggtagcgatatcgccgagattgtgagtaaatggactggaatcccggtatcaaaacttcaacagtctgaacgagataagcttctacatttggaagaagaattgcataaaagagtagtcggtcaaaacccagcagtgactgcggtagctgaagcaatccaacgatcaagagctggtctttcggatccaggccgtcctatagctagtttcatgtttatgggaccaactggtgttggtaaaacagagctagccaaagcacttgcttcttatatgttcaacactgaagaagctttagtgagaattgacatgagtgaatacatggagaagcatgcggtgtctaggctcattggagctccacctggatatgttggttacgaagaaggaggacagttaacagaaacggttagaagaaggccttattcggtcattctatttgatgagattgagaaagctcatggagatgtcttcaatgtgtttctccaaatcttggacgatgggcgagtcacagattctcaaggacgtacagtgagtttcaccaataccgtcattattatgacctcaaatgttggttcgcagtttattctgaacaacacagatgatgatgctaatgagctctcttatgaaacgattaaagagagagtgatgaatgctgcaaggtcaatctttcgtcctgaattcatgaatagggttgatgagtatatagttttcaaacctcttgaccgcgagcagatcaaccgcattgtccggttacagctggcacgtgtgcagaagcgaattgcagacaggaaaatgaagataaacatcacggatgcagcagtcgatcttcttggaagcctagggtatgatccaaactatggagctagacctgttaagcgtgtgatacagcaaaacattgagaatgagcttgctaagggtatcttgagaggagatttcaaggaggaagatggcattttgatcgataccgaggtcacagcgttctccaatggccagttacctcagcaaaagctcacattcaagaagattgagtcagaaacagcagatgctgaacaagaagaagcagctttctcaaaatagagtagttgaaaatgcaaccttttggagcccaagaagattcagacttttcagtacagaacttctagtgagttacttgtcacaaaagactgataatatttatctcaatgtgagagtttatataaatcataagcttatgagtcattgtactgatgtctcaaaggtccagaggttatgaaaattgttga

SEQ ID NO: 83156 - protein, 968 aa, Arabidopsis thaliana
  peptide (1)..(968): Ceres Seq. ID no. 12668949
MATATTTATAAFSGVVSVGTETRRIYSFSHLQPSAAFPAKPSSFKSLKLKQSARLTRRLDHRPFVVRCEASSSNGRLTQQEFTEMAWQSIVSSPDVAKENKQQIVETEHLMKALLEQKNGLARRIFSKIGVDNTKVLEATEKFIQRQPKVYGDAAGSMLGRDLEALFQRARQFKKDLKDSYVSVEHLVLAFADDKRFGKQLFKDFQISERSLKSAIESIRGKQSVIDQDPEGKYEALEKYGKDLTAMAREGKLDPVIGRDDEIRRCIQILSRRTKNNPVLIGEPGVGKTAISEGLAQRIVQGDVPQALMNRKLISLDMGALIAGAKYRGEFEDRLKAVLKEVTDSEGQIILFIDEIHTVVGAGATNGAMDAGNLLKPMLGRGELRCIGATTLDEYRKYIEKDPALERRFQQVYVDQPTVEDTISILRGLRERYELHHGVRISDSALVEAAILSDRYISGRFLPDKAIDLVDEAAAKLKMEITSKPTALDELDRSVIKLEMERLSLTNDTDKASRERLNRIETELVLLKEKQAELTEQWEHERSVMSRLQSIKEEIDRVNLEIQQAEREYDLNRAAELKYGSLNSLQRQLNEAEKELNEYLSSGKSMFREEVLGSDIAEIVSKWTGIPVSKLQQSERDKLLHLEEELHKRVVGQNPAVTAVAEAIQRSRAGLSDPGRPIASFMFMGPTGVGKTELAKALASYMFNTEEALVRIDMSEYMEKHAVSRLIGAPPGYVGYEEGGQLTETVRRRPYSVILFDEIEKAHGDVFNVFLQILDDGRVTDSQGRTVSFTNTVIIMTSNVGSQFILNNTDDDANELSYETIKERVMNAARSIFRPEFMNRVDEYIVFKPLDREQINRIVRLQLARVQKRIADRKMKINITDAAVDLLGSLGYDPNYGARPVKRVIQQNIENELAKGILRGDFKEEDGILIDTEVTAFSNGQLPQQKLTFKKIESETADAEQEEAAFSK

SEQ ID NO: 83157 - protein, 884 aa, Arabidopsis thaliana
  peptide (1)..(884): Ceres Seq. ID no. 12668950
MAWQSIVSSPDVAKENKQQIVETEHLMKALLEQKNGLARRIFSKIGVDNTKVLEATEKFIQRQPKVYGDAAGSMLGRDLEALFQRARQFKKDLKDSYVSVEHLVLAFADDKRFGKQLFKDFQISERSLKSAIESIRGKQSVIDQDPEGKYEALEKYGKDLTAMAREGKLDPVIGRDDEIRRCIQILSRRTKNNPVLIGEPGVGKTAISEGLAQRIVQGDVPQALMNRKLISLDMGALIAGAKYRGEFEDRLKAVLKEVTDSEGQIILFIDEIHTVVGAGATNGAMDAGNLLKPMLGRGELRCIGATTLDEYRKYIEKDPALERRFQQVYVDQPTVEDTISILRGLRERYELHHGVRISDSALVEAAILSDRYISGRFLPDKAIDLVDEAAAKLKMEITSKPTALDELDRSVIKLEMERLSLTNDTDKASRERLNRIETELVLLKEKQAELTEQWEHERSVMSRLQSIKEEIDRVNLEIQQAEREYDLNRAAELKYGSLNSLQRQLNEAEKELNEYLSSGKSMFREEVLGSDIAEIVSKWTGIPVSKLQQSERDKLLHLEEELHKRVVGQNPAVTAVAEAIQRSRAGLSDPGRPIASFMFMGPTGVGKTELAKALASYMFNTEEALVRIDMSEYMEKHAVSRLIGAPPGYVGYEEGGQLTETVRRRPYSVILFDEIEKAHGDVFNVFLQILDDGRVTDSQGRTVSFTNTVIIMTSNVGSQFILNNTDDDANELSYETIKERVMNAARSIFRPEFMNRVDEYIVFKPLDREQINRIVRLQLARVQKRIADRKMKINITDAAVDLLGSLGYDPNYGARPVKRVIQQNIENELAKGILRGDFKEEDGILIDTEVTAFSNGQLPQQKLTFKKIESETADAEQEEAAFSK

SEQ ID NO: 83158 - protein, 858 aa, Arabidopsis thaliana
  peptide (1)..(858): Ceres Seq. ID no. 12668951
MKALLEQKNGLARRIFSKIGVDNTKVLEATEKFIQRQPKVYGDAAGSMLGRDLEALFQRARQFKKDLKDSYVSVEHLVLAFADDKRFGKQLFKDFQISERSLKSAIESIRGKQSVIDQDPEGKYEALEKYGKDLTAMAREGKLDPVIGRDDEIRRCIQILSRRTKNNPVLIGEPGVGKTAISEGLAQRIVQGDVPQALMNRKLISLDMGALIAGAKYRGEFEDRLKAVLKEVTDSEGQIILFIDEIHTVVGAGATNGAMDAGNLLKPMLGRGELRCIGATTLDEYRKYIEKDPALERRFQQVYVDQPTVEDTISILRGLRERYELHHGVRISDSALVEAAILSDRYISGRFLPDKAIDLVDEAAAKLKMEITSKPTALDELDRSVIKLEMERLSLTNDTDKASRERLNRIETELVLLKEKQAELTEQWEHERSVMSRLQSIKEEIDRVNLEIQQAEREYDLNRAAELKYGSLNSLQRQLNEAEKELNEYLSSGKSMFREEVLGSDIAEIVSKWTGIPVSKLQQSERDKLLHLEEELHKRVVGQNPAVTAVAEAIQRSRAGLSDPGRPIASFMFMGPTGVGKTELAKALASYMFNTEEALVRIDMSEYMEKHAVSRLIGAPPGYVGYEEGGQLTETVRRRPYSVILFDEIEKAHGDVFNVFLQILDDGRVTDSQGRTVSFTNTVIIMTSNVGSQFILNNTDDDANELSYETIKERVMNAARSIFRPEFMNRVDEYIVFKPLDREQINRIVRLQLARVQKRIADRKMKINITDAAVDLLGSLGYDPNYGARPVKRVIQQNIENELAKGILRGDFKEEDGILIDTEVTAFSNGQLPQQKLTFKKIESETADAEQEEAAFSK

SEQ ID NO: 83159 - DNA, 1518 bp, Arabidopsis thaliana
  misc_feature (1)..(1518): Ceres Seq. ID no. 12668971
  misc_feature (1)..(1518): Ortholog of  Ceres SEQ ID NO 14311609 as cited in SEQ ID NO 58341
atggagaagtttctttaccacaggaaactatgggagatgaatgttaagcttttaggagagagcaaagttgagaaactcaagaactcttttgtttcgaggcctcgtatgagcttatggatgattcgtgctgttactgtattgttgctttggagctgttttgttcatttgatggctttgggagagatgtggggaccaagattgtttaaaggttggccttcttgtttcaatcaccatcaactgtccactgccgcagagatgacgtctcttcctaccaaaattgctcttccacctaaaagggtatatgtgaacaatggttatcttatggtttcctgcaatggaggactcaatcaaatgcgagcagctatatgtgatatggtaaccgttgcaagatacatgaatgttacacttattgtgccggagcttgacaagacctctttttggaacgatccaagtgagtttaaagacatattcgatgtggatcacttcataagttcgttaagagatgaagttcggatactcaaagagttacctccaaggcttaagaaaagggttgagcttggagtgtaccacgaaatgcctcctattagttggtcaaacatgtcttactaccaaaatcagattcttccactggtgaaaaaacataaggttttacatctgaacagaacggatacccgacttgctaataatggactgcctgtggaggttcagaagctgaggtgccgagtaaatttcaatgggcttaagtttactcctcagattgaggaattaggtagacgagtagtcaagattctgagagagaaaggtccctttcttgtcctgcatctcagatatgagatggatatgttagcattttctggttgttcacatggttgcaaccccgaggaagaagaagaactaacaagaatgagatatgcttatccatggtggaaagagaaagtcataaactctgagctgaagaggaaagatggcctttgccctttaactcctgaggaaaccgctctcactctgaccgcgttgggtattgaccgaaatgttcaaatttacatagctgctggagaaatctatggtggtcaaaggcggatgaaggctttaacagacgcttttccaaatgtggtccggaaagaaaccctactcgaatcctctgatctggatttttgccggaaccattcatctcaaatggctgcacttgattacctagtggcacttgagagcgacatatttgttccaaccaatgatgggaacatggcaagagttgttgaaggtcatcgcagattcttggggttcaagaagacaatccagctgaataggaggttcctagttaagctgatagatgagtatactgaaggattgttgagttgggatgtattttcatccacggtgaaggcatttcactctactcgaatgggaagccctaagagacggttagtgattcccaatagacccaaggaagaagactacttctacgccaacccacaagaatgtctgcagctgttagatgaaccattgagagtcatttga

SEQ ID NO: 83160 - protein, 505 aa, Arabidopsis thaliana
  peptide (1)..(505): Ceres Seq. ID no. 12668972
MEKFLYHRKLWEMNVKLLGESKVEKLKNSFVSRPRMSLWMIRAVTVLLLWSCFVHLMALGEMWGPRLFKGWPSCFNHHQLSTAAEMTSLPTKIALPPKRVYVNNGYLMVSCNGGLNQMRAAICDMVTVARYMNVTLIVPELDKTSFWNDPSEFKDIFDVDHFISSLRDEVRILKELPPRLKKRVELGVYHEMPPISWSNMSYYQNQILPLVKKHKVLHLNRTDTRLANNGLPVEVQKLRCRVNFNGLKFTPQIEELGRRVVKILREKGPFLVLHLRYEMDMLAFSGCSHGCNPEEEEELTRMRYAYPWWKEKVINSELKRKDGLCPLTPEETALTLTALGIDRNVQIYIAAGEIYGGQRRMKALTDAFPNVVRKETLLESSDLDFCRNHSSQMAALDYLVALESDIFVPTNDGNMARVVEGHRRFLGFKKTIQLNRRFLVKLIDEYTEGLLSWDVFSSTVKAFHSTRMGSPKRRLVIPNRPKEEDYFYANPQECLQLLDEPLRVI

SEQ ID NO: 83161 - protein, 493 aa, Arabidopsis thaliana
  peptide (1)..(493): Ceres Seq. ID no. 12668973
MNVKLLGESKVEKLKNSFVSRPRMSLWMIRAVTVLLLWSCFVHLMALGEMWGPRLFKGWPSCFNHHQLSTAAEMTSLPTKIALPPKRVYVNNGYLMVSCNGGLNQMRAAICDMVTVARYMNVTLIVPELDKTSFWNDPSEFKDIFDVDHFISSLRDEVRILKELPPRLKKRVELGVYHEMPPISWSNMSYYQNQILPLVKKHKVLHLNRTDTRLANNGLPVEVQKLRCRVNFNGLKFTPQIEELGRRVVKILREKGPFLVLHLRYEMDMLAFSGCSHGCNPEEEEELTRMRYAYPWWKEKVINSELKRKDGLCPLTPEETALTLTALGIDRNVQIYIAAGEIYGGQRRMKALTDAFPNVVRKETLLESSDLDFCRNHSSQMAALDYLVALESDIFVPTNDGNMARVVEGHRRFLGFKKTIQLNRRFLVKLIDEYTEGLLSWDVFSSTVKAFHSTRMGSPKRRLVIPNRPKEEDYFYANPQECLQLLDEPLRVI

SEQ ID NO: 83162 - protein, 470 aa, Arabidopsis thaliana
  peptide (1)..(470): Ceres Seq. ID no. 12668974
MSLWMIRAVTVLLLWSCFVHLMALGEMWGPRLFKGWPSCFNHHQLSTAAEMTSLPTKIALPPKRVYVNNGYLMVSCNGGLNQMRAAICDMVTVARYMNVTLIVPELDKTSFWNDPSEFKDIFDVDHFISSLRDEVRILKELPPRLKKRVELGVYHEMPPISWSNMSYYQNQILPLVKKHKVLHLNRTDTRLANNGLPVEVQKLRCRVNFNGLKFTPQIEELGRRVVKILREKGPFLVLHLRYEMDMLAFSGCSHGCNPEEEEELTRMRYAYPWWKEKVINSELKRKDGLCPLTPEETALTLTALGIDRNVQIYIAAGEIYGGQRRMKALTDAFPNVVRKETLLESSDLDFCRNHSSQMAALDYLVALESDIFVPTNDGNMARVVEGHRRFLGFKKTIQLNRRFLVKLIDEYTEGLLSWDVFSSTVKAFHSTRMGSPKRRLVIPNRPKEEDYFYANPQECLQLLDEPLRVI

SEQ ID NO: 83163 - DNA, 1521 bp, Arabidopsis thaliana
  misc_feature (1)..(1521): Ceres Seq. ID no. 12668996
  misc_feature (1)..(1521): Ortholog of  Ceres SEQ ID NO 15180288 as cited in SEQ ID NO 0
gtagaaggaaatggaaagcgcacaaaagcgaagataacaaaaagagtttgaaattcaaaagagaagagcaacacgaagaatcttggaattcgagatccactatttcacggcggaaaagatgcattcgcctcttcagactcagcagccggagcagcgatgctggccgatgacctcgacggtatcggagatcgaggaagttctacccgatgaggactccgatagaacgactcttcttaacggtgaaccgttacgtcgtcgagtttccgggaagtcgccggttgacgaaggacctcgtcggattttccggcagcaatcgttcggtcgcgatatcggccacgcggcagctgaaacgtatctaattactggacttagcttcaagcttcttcgatacctcggggtaggctatcgatggatgacaaaattacttgcccttacatgttatgctatgcttcttatgcctggctttcttcaagttgcatatagttattttttctcaaagcaagtccggaggagtatagtgtatggagatcaaccaaggaacaggctggatctgtacttgccaagcaacaacgatggcttgaagccggttgtggtttttgtgacgggtggagcttggattattgggtacaaagcttggggctcgctcttgggaatgcagctagcagaaagagatatcattgtagcatgccttgactacaggaactttcctcagggaacaattagtgatatggtgactgatgcttctcaaggaatctcatttgtctgcaataacatctctgcatttggaggtgaccccaacaggatctacctgatggggcaatcagctggtgcccatatagccgcttgtgctctattggaacaagctactaaagaattaaaaggagagagcatctcctggacagtgtcccagataaaagcttattttggattatctggagggtacaatctatacaagttggttgatcacttccataatcggggtctgtatcgctcgattttcctaagcataatggaaggagaagagtcctttgagaaattctctccggaagtaagactgaaagacccagttgttggaaaagctgcttctcttttacctcctattatacttttccacggatcctcagattattccataccatgcgatgaaagcaaaacttttacagacgctctgcaagctgttggagcaaaagccgagcttgttttatacagcggaaagacacatactgacttatttcttcaggatcccttacgaggaggtaaagacgaactctttgatgacatagtctctgtgatacatgcggaggacaatgatgggctgaccaaagactcgttggctcctcccagaaagcgtcttgtaccagagttgttactgaaactggctcgtgagattagccctttctgactgccaagaaaggaaaacaagctttgtttgttgatcctcagtttttacctttgttagttgctgtgtttttaattgcatcagtagaacatcatgtaaataaaaacaaactttgttgctcc

SEQ ID NO: 83164 - protein, 427 aa, Arabidopsis thaliana
  peptide (1)..(427): Ceres Seq. ID no. 12668997
MHSPLQTQQPEQRCWPMTSTVSEIEEVLPDEDSDRTTLLNGEPLRRRVSGKSPVDEGPRRIFRQQSFGRDIGHAAAETYLITGLSFKLLRYLGVGYRWMTKLLALTCYAMLLMPGFLQVAYSYFFSKQVRRSIVYGDQPRNRLDLYLPSNNDGLKPVVVFVTGGAWIIGYKAWGSLLGMQLAERDIIVACLDYRNFPQGTISDMVTDASQGISFVCNNISAFGGDPNRIYLMGQSAGAHIAACALLEQATKELKGESISWTVSQIKAYFGLSGGYNLYKLVDHFHNRGLYRSIFLSIMEGEESFEKFSPEVRLKDPVVGKAASLLPPIILFHGSSDYSIPCDESKTFTDALQAVGAKAELVLYSGKTHTDLFLQDPLRGGKDELFDDIVSVIHAEDNDGLTKDSLAPPRKRLVPELLLKLAREISPF

SEQ ID NO: 83165 - protein, 411 aa, Arabidopsis thaliana
  peptide (1)..(411): Ceres Seq. ID no. 12668998
MTSTVSEIEEVLPDEDSDRTTLLNGEPLRRRVSGKSPVDEGPRRIFRQQSFGRDIGHAAAETYLITGLSFKLLRYLGVGYRWMTKLLALTCYAMLLMPGFLQVAYSYFFSKQVRRSIVYGDQPRNRLDLYLPSNNDGLKPVVVFVTGGAWIIGYKAWGSLLGMQLAERDIIVACLDYRNFPQGTISDMVTDASQGISFVCNNISAFGGDPNRIYLMGQSAGAHIAACALLEQATKELKGESISWTVSQIKAYFGLSGGYNLYKLVDHFHNRGLYRSIFLSIMEGEESFEKFSPEVRLKDPVVGKAASLLPPIILFHGSSDYSIPCDESKTFTDALQAVGAKAELVLYSGKTHTDLFLQDPLRGGKDELFDDIVSVIHAEDNDGLTKDSLAPPRKRLVPELLLKLAREISPF

SEQ ID NO: 83166 - protein, 329 aa, Arabidopsis thaliana
  peptide (1)..(329): Ceres Seq. ID no. 12668999
MTKLLALTCYAMLLMPGFLQVAYSYFFSKQVRRSIVYGDQPRNRLDLYLPSNNDGLKPVVVFVTGGAWIIGYKAWGSLLGMQLAERDIIVACLDYRNFPQGTISDMVTDASQGISFVCNNISAFGGDPNRIYLMGQSAGAHIAACALLEQATKELKGESISWTVSQIKAYFGLSGGYNLYKLVDHFHNRGLYRSIFLSIMEGEESFEKFSPEVRLKDPVVGKAASLLPPIILFHGSSDYSIPCDESKTFTDALQAVGAKAELVLYSGKTHTDLFLQDPLRGGKDELFDDIVSVIHAEDNDGLTKDSLAPPRKRLVPELLLKLAREISPF

SEQ ID NO: 83167 - DNA, 1581 bp, Arabidopsis thaliana
  misc_feature (1)..(1581): Ceres Seq. ID no. 12669012
  misc_feature (1)..(1581): Ortholog of  Ceres SEQ ID NO 13655724 as cited in SEQ ID NO 68973
  misc_feature (1)..(1581): Ortholog of  Ceres SEQ ID NO 12625899 as cited in SEQ ID NO 69079
atggagcttcctttgtttgcaatccttcaaagaacaccaagagttgcaattacattagcatttgttctatttgtcctcacaatagttcctgctttatatactctccttgccgatccaatcttacctccatcaatctcatctttcgagactgatcatacacgtctcagtcatttgaattcttcatcaaatcagattccttcacccgtgaatggttccattcccacgccaccctaccatacgccttcaaaacatcggaagtcttctttccatcggattcctaaacccaagaaaggtcccatttcctctccaaccgatcatatacctttaagacaacggagttcttcattcgatcagattccttcacccatgaatagtcccgttcccgctccaccacatcggaattcttcagctgatcagagtccttcacctgtgaacggtcccattcccgctccactcaatcacacgtccttaagacatctgaattcttcatctgatgatcattcatccccagtcaccacatcaccatcaaggacgcggatcagagatgatgagcaaatgtgtgacctttttaccggggagtgggtaccaaacgaagaagctccatactacaccaacacgacatgctgggcaatacatgagcaccagaactgcatgaaatatgggagacctgataccggattcatgagatggaggtggaagccggagagttgcgaccttcccatctttgatcctcaagagttcttggaaatggttagagggaaagccatggggtttgttggtgactccattagcagaaaccaagtccaatctctcttgtgccttctctctagggtggaataccctgaagacatttctccttcaccagatacggatttcaaagtatggaactacacatcctataacttcactcttcatgtcatgtggtcaccatttctagtgaaggctactaaacctgatccgaagtccaacttcttcagcctatacctcgacgaatatgacacgaagtggacgagtcagctcgaccaactcgactacctggttatatcatccggccactggttttcccggccggttattttctatgaaaaccaacaaatctctgggtgccaatactgtgcgttaccaaacacgactgaattgcctttgacctatggatacaggaaggctttaagaatatctctaaaagctataatcgagaatttcaagggtctggcatttttaaggagtttttctcctcaacatttcgaaggtggggcttggaacgaaggaggggactgtgtacggacacaaccttacagaagaaacgagactatacccgaggcagatctcaaggttcacgacattcaaagggaggaatttagagctgcagaagaagatgggatgaagaagagtggtttgagactgaagttaatggacacgacacaggcaatgctattgcgaccagatgggcatcctgggagatatggacatctacagaatccaaatgtgactttaagaaatgactgtattcattggtgcctgcctggacctatcgatactctgaatgatatattgctacaaatgatgaagacagataactag

SEQ ID NO: 83168 - protein, 526 aa, Arabidopsis thaliana
  peptide (1)..(526): Ceres Seq. ID no. 12669013
MELPLFAILQRTPRVAITLAFVLFVLTIVPALYTLLADPILPPSISSFETDHTRLSHLNSSSNQIPSPVNGSIPTPPYHTPSKHRKSSFHRIPKPKKGPISSPTDHIPLRQRSSSFDQIPSPMNSPVPAPPHRNSSADQSPSPVNGPIPAPLNHTSLRHLNSSSDDHSSPVTTSPSRTRIRDDEQMCDLFTGEWVPNEEAPYYTNTTCWAIHEHQNCMKYGRPDTGFMRWRWKPESCDLPIFDPQEFLEMVRGKAMGFVGDSISRNQVQSLLCLLSRVEYPEDISPSPDTDFKVWNYTSYNFTLHVMWSPFLVKATKPDPKSNFFSLYLDEYDTKWTSQLDQLDYLVISSGHWFSRPVIFYENQQISGCQYCALPNTTELPLTYGYRKALRISLKAIIENFKGLAFLRSFSPQHFEGGAWNEGGDCVRTQPYRRNETIPEADLKVHDIQREEFRAAEEDGMKKSGLRLKLMDTTQAMLLRPDGHPGRYGHLQNPNVTLRNDCIHWCLPGPIDTLNDILLQMMKTDN

SEQ ID NO: 83169 - protein, 404 aa, Arabidopsis thaliana
  peptide (1)..(404): Ceres Seq. ID no. 12669014
MNSPVPAPPHRNSSADQSPSPVNGPIPAPLNHTSLRHLNSSSDDHSSPVTTSPSRTRIRDDEQMCDLFTGEWVPNEEAPYYTNTTCWAIHEHQNCMKYGRPDTGFMRWRWKPESCDLPIFDPQEFLEMVRGKAMGFVGDSISRNQVQSLLCLLSRVEYPEDISPSPDTDFKVWNYTSYNFTLHVMWSPFLVKATKPDPKSNFFSLYLDEYDTKWTSQLDQLDYLVISSGHWFSRPVIFYENQQISGCQYCALPNTTELPLTYGYRKALRISLKAIIENFKGLAFLRSFSPQHFEGGAWNEGGDCVRTQPYRRNETIPEADLKVHDIQREEFRAAEEDGMKKSGLRLKLMDTTQAMLLRPDGHPGRYGHLQNPNVTLRNDCIHWCLPGPIDTLNDILLQMMKTDN

SEQ ID NO: 83170 - protein, 341 aa, Arabidopsis thaliana
  peptide (1)..(341): Ceres Seq. ID no. 12669015
MCDLFTGEWVPNEEAPYYTNTTCWAIHEHQNCMKYGRPDTGFMRWRWKPESCDLPIFDPQEFLEMVRGKAMGFVGDSISRNQVQSLLCLLSRVEYPEDISPSPDTDFKVWNYTSYNFTLHVMWSPFLVKATKPDPKSNFFSLYLDEYDTKWTSQLDQLDYLVISSGHWFSRPVIFYENQQISGCQYCALPNTTELPLTYGYRKALRISLKAIIENFKGLAFLRSFSPQHFEGGAWNEGGDCVRTQPYRRNETIPEADLKVHDIQREEFRAAEEDGMKKSGLRLKLMDTTQAMLLRPDGHPGRYGHLQNPNVTLRNDCIHWCLPGPIDTLNDILLQMMKTDN

SEQ ID NO: 83171 - DNA, 990 bp, Arabidopsis thaliana
  misc_feature (1)..(990): Ceres Seq. ID no. 12669022
  misc_feature (1)..(990): Ortholog of  Ceres SEQ ID NO 13596244 as cited in SEQ ID NO 69307
atggatatcaaacaagagttgcaactacaagtacttcaacacaacatgagtgatcaagaactcttcaccaaggcctcgtcattatcatcaccaacatcatccttatcgtcatcatcatggttagggaggagacataataatgatgggaagatggctgtgaaggtggctttcatgttcatgacaggtggaagactcccattggctggcttgtgggaaaagttctttgaaggacatgaagggttttattccatatatgttcatactaatccatcttttcaagattctttccccgaaacttccgtcttctattcaagaagaatcccaagtcagccggtgtattggggaacatcatcaatggtagacgcagagaaaagactattagccaacgcacttctcgacgaatccaaccaaagattcgtcctcttgtccgattcttgcatcccactctacaatttcacaaccatctacgattacttaaccggcaccaatctcagcttcattggctcattcgacgacccaagaaaatccggtagaggccgttacaaccacacaatgtatccacacatcaacatcacacattggagaaaaggatcacagtggtttgaaacaactcgagaacttgctcttcatataatcgaagacacggtttactacaaaatattcgatcaacattgtaaaccgccttgttacatggacgagcattatatcccaactctcgttcacatgttgcatggagagatgagcgctaaccggaccttgacgtgggttgattggtccaaagctggtccacatcctggccggtttatttggcctgatataaccgatgagtttcttaaccgaatccggtttaaggaggagtgtgtctattttggccgtggtggagagaatgttacaacttccaagtgttttttatttgcgaggaaatttacagccgaaactttagaaccattgttaagaatttcgccaatagttcttggttttggtccatag

SEQ ID NO: 83172 - protein, 329 aa, Arabidopsis thaliana
  peptide (1)..(329): Ceres Seq. ID no. 12669023
MDIKQELQLQVLQHNMSDQELFTKASSLSSPTSSLSSSSWLGRRHNNDGKMAVKVAFMFMTGGRLPLAGLWEKFFEGHEGFYSIYVHTNPSFQDSFPETSVFYSRRIPSQPVYWGTSSMVDAEKRLLANALLDESNQRFVLLSDSCIPLYNFTTIYDYLTGTNLSFIGSFDDPRKSGRGRYNHTMYPHINITHWRKGSQWFETTRELALHIIEDTVYYKIFDQHCKPPCYMDEHYIPTLVHMLHGEMSANRTLTWVDWSKAGPHPGRFIWPDITDEFLNRIRFKEECVYFGRGGENVTTSKCFLFARKFTAETLEPLLRISPIVLGFGP

SEQ ID NO: 83173 - protein, 314 aa, Arabidopsis thaliana
  peptide (1)..(314): Ceres Seq. ID no. 12669024
MSDQELFTKASSLSSPTSSLSSSSWLGRRHNNDGKMAVKVAFMFMTGGRLPLAGLWEKFFEGHEGFYSIYVHTNPSFQDSFPETSVFYSRRIPSQPVYWGTSSMVDAEKRLLANALLDESNQRFVLLSDSCIPLYNFTTIYDYLTGTNLSFIGSFDDPRKSGRGRYNHTMYPHINITHWRKGSQWFETTRELALHIIEDTVYYKIFDQHCKPPCYMDEHYIPTLVHMLHGEMSANRTLTWVDWSKAGPHPGRFIWPDITDEFLNRIRFKEECVYFGRGGENVTTSKCFLFARKFTAETLEPLLRISPIVLGFGP

SEQ ID NO: 83174 - protein, 279 aa, Arabidopsis thaliana
  peptide (1)..(279): Ceres Seq. ID no. 12669025
MAVKVAFMFMTGGRLPLAGLWEKFFEGHEGFYSIYVHTNPSFQDSFPETSVFYSRRIPSQPVYWGTSSMVDAEKRLLANALLDESNQRFVLLSDSCIPLYNFTTIYDYLTGTNLSFIGSFDDPRKSGRGRYNHTMYPHINITHWRKGSQWFETTRELALHIIEDTVYYKIFDQHCKPPCYMDEHYIPTLVHMLHGEMSANRTLTWVDWSKAGPHPGRFIWPDITDEFLNRIRFKEECVYFGRGGENVTTSKCFLFARKFTAETLEPLLRISPIVLGFGP

SEQ ID NO: 83175 - DNA, 1652 bp, Arabidopsis thaliana
  misc_feature (1)..(1652): Ceres Seq. ID no. 12669034
  misc_feature (1)..(1652): Ortholog of  Ceres SEQ ID NO 14302255 as cited in SEQ ID NO 65021
acgttccagagagttttctgaaattgatcgttttggttcttcacctttccttttctttgctttctgcttcctcccttaaatacatttcactctgttatcatcgatttttttttcttatatctcaatcttattttgtttgtcttttctccatttttgtttcgttaagaagaaacaatggttatggctatggatcggatcgctttgttctcttcctcatcatctgtttatcatcacggttcttctcattctcatggctccaaatcttccagagttttcactattcgttccgactctacagcggttggaaggaaactgtatattcctcctcgagaggttcatcttcaagtgaagtattcaatgccaccacaaaagctggagattttcaagtccttagaaggatgggctaatgacaacttgttggcttacttaaaacctgttgagaaatcatggcaaccaactgattttctccctgaacctgagtcagaaggattctatgaccaagttaaggagttaagagaaaggtgtaaggagctctctgatgactaccttatagtgcttgttggtgatatgatcacagaggaagcacttccgacttatcagaccatgattaatacattggacggggttagagatgagacgggagcaagtccaactccttgggcagtatggactagggcatggactgcggaagagaatagacatggtgatcttcttaacaagtacctttatctgtctggacgagtagacatgagacagattgaaaaaactattcaatacctcattggttctggaatggatccaaaaactgaaaacaatccttacttgggattcatatatacttcttttcaagaaagagctacattcatctcccatggaaacactgctagactggcaaaggatcttggagacttgacacttgggaagatttgtggcaccattgctgctgatgagaggcgccatgaacacgcctacaccaagattgtagagaagctctttgaaattgatcctgataccacagtcgtgggctttgctgacatgatgaggaaaaagatctcgatgcctgctcatttgatgtatgatggtcgtgatgataatctatttgatcacttctcgtccgtggcccagaggcttggtgtctacactgccaaggactatgctgatatactgcaacatcttgtggaaaggtggaatgtggagaagttgtcagacctttctagtgaaggaaacagggcccaggactacctctgtggattacctgctagaatccgcaaacttgaagagagggctcaagggagaaccaaagaagcagcaaaaaacataccattcagctggatttttggtcgagaagtcagggcttaaaagaagtaatgttaagcaattaattcttccatattataatcccaagcaagctataaaagatcttcaccaacaccttgatgaagaagccagaagtatgttatgttggaaacgtgtgtagataaagtatgtgttagactttgctttgtttggatcacttaaatgacttactccaaagaatttgctttgttttgacgattttatttatttatttctgcacctctatttgttgctagtattgaatccacttctgtaatgttttctcttcttctgaatccaataagatatttaaaaag

SEQ ID NO: 83176 - protein, 394 aa, Arabidopsis thaliana
  peptide (1)..(394): Ceres Seq. ID no. 12669035
MVMAMDRIALFSSSSSVYHHGSSHSHGSKSSRVFTIRSDSTAVGRKLYIPPREVHLQVKYSMPPQKLEIFKSLEGWANDNLLAYLKPVEKSWQPTDFLPEPESEGFYDQVKELRERCKELSDDYLIVLVGDMITEEALPTYQTMINTLDGVRDETGASPTPWAVWTRAWTAEENRHGDLLNKYLYLSGRVDMRQIEKTIQYLIGSGMDPKTENNPYLGFIYTSFQERATFISHGNTARLAKDLGDLTLGKICGTIAADERRHEHAYTKIVEKLFEIDPDTTVVGFADMMRKKISMPAHLMYDGRDDNLFDHFSSVAQRLGVYTAKDYADILQHLVERWNVEKLSDLSSEGNRAQDYLCGLPARIRKLEERAQGRTKEAAKNIPFSWIFGREVRA

SEQ ID NO: 83177 - protein, 392 aa, Arabidopsis thaliana
  peptide (1)..(392): Ceres Seq. ID no. 12669036
MAMDRIALFSSSSSVYHHGSSHSHGSKSSRVFTIRSDSTAVGRKLYIPPREVHLQVKYSMPPQKLEIFKSLEGWANDNLLAYLKPVEKSWQPTDFLPEPESEGFYDQVKELRERCKELSDDYLIVLVGDMITEEALPTYQTMINTLDGVRDETGASPTPWAVWTRAWTAEENRHGDLLNKYLYLSGRVDMRQIEKTIQYLIGSGMDPKTENNPYLGFIYTSFQERATFISHGNTARLAKDLGDLTLGKICGTIAADERRHEHAYTKIVEKLFEIDPDTTVVGFADMMRKKISMPAHLMYDGRDDNLFDHFSSVAQRLGVYTAKDYADILQHLVERWNVEKLSDLSSEGNRAQDYLCGLPARIRKLEERAQGRTKEAAKNIPFSWIFGREVRA

SEQ ID NO: 83178 - protein, 390 aa, Arabidopsis thaliana
  peptide (1)..(390): Ceres Seq. ID no. 12669037
MDRIALFSSSSSVYHHGSSHSHGSKSSRVFTIRSDSTAVGRKLYIPPREVHLQVKYSMPPQKLEIFKSLEGWANDNLLAYLKPVEKSWQPTDFLPEPESEGFYDQVKELRERCKELSDDYLIVLVGDMITEEALPTYQTMINTLDGVRDETGASPTPWAVWTRAWTAEENRHGDLLNKYLYLSGRVDMRQIEKTIQYLIGSGMDPKTENNPYLGFIYTSFQERATFISHGNTARLAKDLGDLTLGKICGTIAADERRHEHAYTKIVEKLFEIDPDTTVVGFADMMRKKISMPAHLMYDGRDDNLFDHFSSVAQRLGVYTAKDYADILQHLVERWNVEKLSDLSSEGNRAQDYLCGLPARIRKLEERAQGRTKEAAKNIPFSWIFGREVRA

SEQ ID NO: 83179 - DNA, 2046 bp, Arabidopsis thaliana
  misc_feature (1)..(2046): Ceres Seq. ID no. 12669064
  misc_feature (1)..(2046): Ortholog of  Ceres SEQ ID NO 15177126 as cited in SEQ ID NO 59389
gtttcttcaagaagatcatcactcaacttctctctcttcttctaagcttctctttaacttcatctctctcactttctcctttctttctgagatatagagagagaaagagaacaaaaaaaatatcaaatctttcagacacccttttgacttctttgcctaaagaatctctctgctttctcttctccttagagaaaatcattttaaattcctaagcaaaaccctcaggagaaaaaaaaaacaaaagaatagtcatcatcatcatcaccatcatcatccttatcatcatcaacaacttcagtggcagcaatagcaagagaaaggtttctttaattatgtctatggaaggtgtttttctagagaaaaccaaaacaaacacaacaactactctccctgatctatctctccacatcagtctcccagatattcatcaataccatcacaatgaatcttctaaagaatcttcaagaagatcctcccaactcgaaaacaacaaccgatcgtccaactttgaactctctttatctcatcataaccatccaacagcaagaatcttccattgtcctgatcgaagaacccttaatcttcctcatcagcagcattacaacaaccctatcatcaatggtgttcatcaaagggtcgatgaatccgagattagtaatctccaccgtccaattagaggcatcccggtctatcacaaccgttcattccctttccaccaacaaaactcttcattaccttctcttggaggaggagacatggatcaaatctcaatcttaaactcatcttccggctacaacaacgcttaccgatcattacaatcttccccgaggcttaaaggtgttcctttgcatcatcatcatcatcataatcagtatggagtcgttggatcttcagattcgtcttctcctcatcaccataaccatcatcatcatgggatgatcagatcaagattcttgcctaagatgccgacaaagcgaagcatgagagctccaaggatgcgttggactagtagcctccacgcgcggtttgttcacgctgttgagcttctaggcggccatgaaagagcaactccaaagtcggttcttgagctcatggatgtaaaagacttaactttagcacatgtgaagagccatttgcagatgtatcgaactgttaagaccactaacaagcctgctgcttcatcagatgggtcaggagaagaagaaatgggcataaatggaaacgaagttcatcatcaatcatcgacggatcaaagggcacaatctgatgatacttctcttcatcaagaaactgacatttcttccacacaacctcgttggagtaactcttcacgagagacatggccattaagtaataactgctcaagcgacatagatacaatgatcagaacttcatcaacatcaatgatctctcattatcaaagatccagcattcaaaatcaggagcaaaggtcgaatgatcaagcaaagaggtgtggaaatcttagttgtgaaaatccaagtttggagtttacattaggcagaccagattggcacgagaaatgactttcttgatcaatttggatttttatatatattggattttttatttttttgtttcatctttctctctctatatatactcagaaacatgtatgcagtatatatctttgtgacgatgaaattctcagcgtaaaagaaggagaacacgtagagagccaagctgctcaagagtgttgatttttgcacagagagagagaatatcactaccaaaatgaagaaatttggaggttcctcttctcaagttccattgatgatttgattataaagtggatgatcaatgtatgagtttttgtttttgggttttcgggtttttagttttttgaggttgatctggtggtgtgatcataagttatataattggaagatcatcaaaatgtggtgaaagtttggatatttttttgaaagcctcttggttggctagagggtttcaagtttttttttttttttttgcagccgaaatgtagagagagggagagatctgagttgagatttcatatggatactg

SEQ ID NO: 83180 - protein, 403 aa, Arabidopsis thaliana
  peptide (1)..(403): Ceres Seq. ID no. 12669065
MSMEGVFLEKTKTNTTTTLPDLSLHISLPDIHQYHHNESSKESSRRSSQLENNNRSSNFELSLSHHNHPTARIFHCPDRRTLNLPHQQHYNNPIINGVHQRVDESEISNLHRPIRGIPVYHNRSFPFHQQNSSLPSLGGGDMDQISILNSSSGYNNAYRSLQSSPRLKGVPLHHHHHHNQYGVVGSSDSSSPHHHNHHHHGMIRSRFLPKMPTKRSMRAPRMRWTSSLHARFVHAVELLGGHERATPKSVLELMDVKDLTLAHVKSHLQMYRTVKTTNKPAASSDGSGEEEMGINGNEVHHQSSTDQRAQSDDTSLHQETDISSTQPRWSNSSRETWPLSNNCSSDIDTMIRTSSTSMISHYQRSSIQNQEQRSNDQAKRCGNLSCENPSLEFTLGRPDWHEK

SEQ ID NO: 83181 - protein, 401 aa, Arabidopsis thaliana
  peptide (1)..(401): Ceres Seq. ID no. 12669066
MEGVFLEKTKTNTTTTLPDLSLHISLPDIHQYHHNESSKESSRRSSQLENNNRSSNFELSLSHHNHPTARIFHCPDRRTLNLPHQQHYNNPIINGVHQRVDESEISNLHRPIRGIPVYHNRSFPFHQQNSSLPSLGGGDMDQISILNSSSGYNNAYRSLQSSPRLKGVPLHHHHHHNQYGVVGSSDSSSPHHHNHHHHGMIRSRFLPKMPTKRSMRAPRMRWTSSLHARFVHAVELLGGHERATPKSVLELMDVKDLTLAHVKSHLQMYRTVKTTNKPAASSDGSGEEEMGINGNEVHHQSSTDQRAQSDDTSLHQETDISSTQPRWSNSSRETWPLSNNCSSDIDTMIRTSSTSMISHYQRSSIQNQEQRSNDQAKRCGNLSCENPSLEFTLGRPDWHEK

SEQ ID NO: 83182 - protein, 262 aa, Arabidopsis thaliana
  peptide (1)..(262): Ceres Seq. ID no. 12669067
MDQISILNSSSGYNNAYRSLQSSPRLKGVPLHHHHHHNQYGVVGSSDSSSPHHHNHHHHGMIRSRFLPKMPTKRSMRAPRMRWTSSLHARFVHAVELLGGHERATPKSVLELMDVKDLTLAHVKSHLQMYRTVKTTNKPAASSDGSGEEEMGINGNEVHHQSSTDQRAQSDDTSLHQETDISSTQPRWSNSSRETWPLSNNCSSDIDTMIRTSSTSMISHYQRSSIQNQEQRSNDQAKRCGNLSCENPSLEFTLGRPDWHEK

SEQ ID NO: 83183 - DNA, 1038 bp, Arabidopsis thaliana
  misc_feature (1)..(1038): Ceres Seq. ID no. 12669110
  misc_feature (1)..(1038): Ortholog of  Ceres SEQ ID NO 13596891 as cited in SEQ ID NO 62868
  misc_feature (1)..(1038): Ortholog of  Ceres SEQ ID NO 12617235 as cited in SEQ ID NO 63990
  misc_feature (1)..(1038): Ortholog of  Ceres SEQ ID NO 13655371 as cited in SEQ ID NO 68945
atgacggcgacgaacaagcaagtcatattgaaagactacgtgagtggtttccctacggaatccgatttcgatttcactaccaccaccgtcgaacttagggttccggaaggtactaactctgttctagtgaagaatctctacttgtcatgcgatccttacatgagaattcgcatggggaaacctgatccttccactgctgctcttgctcaagcttacactcccggccagccaatccaagggtatggagtgtctagaataatagaatctggacatccagattacaagaaaggagatttactctggggtatagttgcatgggaggagtacagtgttatcactccaatgactcacgcgcatttcaagatccaacatactgatgttccattatcttattacactggacttttaggtatgcctggtatgactgcctatgctgggttttatgaagtttgttctccaaaggaaggagagacagtttatgtgtcagctgcatctggtgctgttggtcagcttgtgggacaacttgctaagatgatgggctgttatgttgttggaagcgctggaagtaaagagaaggttgatcttctgaagaccaagtttgggtttgatgatgcatttaactacaaggaagaatctgaccttactgctgccctaaaaaggtgtttccctaatggcattgacatatactttgagaatgtaggaggcaaaatgctagatgcagtgcttgtgaacatgaacatgcacgggcgtatcgctgtctgtggaatgatctcacagtacaatcttgagaaccaggaaggtgtacacaacctatccaacataatctacaaaagaatccgcattcaaggctttgtagtgtctgatttctacgacaaatactcaaagttcttggagtttgtgcttccccacattagagaagggaagataacgtacgtggaagatgtagctgatgggcttgagaaagctcccgaagctcttgtgggactcttccatggtaagaatgttgggaaacaagttgttgttgttgctcgtgagtga

SEQ ID NO: 83184 - protein, 345 aa, Arabidopsis thaliana; identical to SEQ ID NO: 76666
  peptide (1)..(345): Ceres Seq. ID no. 12669111

SEQ ID NO: 83185 - protein, 292 aa, Arabidopsis thaliana; identical to SEQ ID NO: 76667
  peptide (1)..(292): Ceres Seq. ID no. 12669112

SEQ ID NO: 83186 - protein, 288 aa, Arabidopsis thaliana; identical to SEQ ID NO: 76668
  peptide (1)..(288): Ceres Seq. ID no. 12669113

SEQ ID NO: 83187 - DNA, 1034 bp, Arabidopsis thaliana
  misc_feature (1)..(1034): Ceres Seq. ID no. 12669126
  misc_feature (1)..(1034): Ortholog of  Ceres SEQ ID NO 13582297 as cited in SEQ ID NO 56486
  misc_feature (1)..(1034): Ortholog of  Ceres SEQ ID NO 13586936 as cited in SEQ ID NO 0
atgaaatctctgtagttttttttttgttcctttcttaaatttcgaaagaaagacatttattaaaccaaaataactctttagatcattgcaaggaaaaatgttgaaaagtgcaagtccaatggcattctacgatatcggagagcagcaatactctactttcgggtacattttaagcaaacctgggaacgcaggagcttacgagattgacccttcgatcccaaacatcgacgatgcgatctacggctcagatgagttccgtatgtacgcttacaaaatcaaacggtgtcctcgtactcgtagccacgactggacggagtgtccctacgctcaccgtggcgagaaagccacacgccgtgatcctcgccgttacacttactgtgcagtcgcatgcccggctttccgaaatggcgcatgccaccgtggcgactcatgcgaattcgcacatggcgtattcgagtactggctccacccggcgcgttaccgaacacgcgcatgtaacgccgggaacttgtgtcagaggaaagtgtgtttctttgcccacgcgccggagcagctaaggcagtctgaaggaaagcacaggtgcaggtacgcatataggccggtgagggctagaggtggtggaaacggcgatggagtgacgatgagaatggacgacgagggttacgacacgtcacggtctccggtgagaagcgggaaagatgatttagatagtaacgaggagaaggtgttgttgaagtgttggagtcggatgagcattgtggatgatcattatgagccgtccgatttggatttggatttgtcacactttgattggatctcagagttggtcgattaaatttgggaaatcaaagcagagaacaaaagaaacccgataaataaagtggattttgttaaaatccacaagatcaagattcaagatgagagatcttgtcatgtatatggtaaatttaattgtaatgatttattgcaatgtcgcaaaagaagttacttctctttgcatgtaaacagattcttgatcttctataagtctttgt

SEQ ID NO: 83188 - protein, 245 aa, Arabidopsis thaliana
  peptide (1)..(245): Ceres Seq. ID no. 12669127
MLKSASPMAFYDIGEQQYSTFGYILSKPGNAGAYEIDPSIPNIDDAIYGSDEFRMYAYKIKRCPRTRSHDWTECPYAHRGEKATRRDPRRYTYCAVACPAFRNGACHRGDSCEFAHGVFEYWLHPARYRTRACNAGNLCQRKVCFFAHAPEQLRQSEGKHRCRYAYRPVRARGGGNGDGVTMRMDDEGYDTSRSPVRSGKDDLDSNEEKVLLKCWSRMSIVDDHYEPSDLDLDLSHFDWISELVD

SEQ ID NO: 83189 - protein, 238 aa, Arabidopsis thaliana
  peptide (1)..(238): Ceres Seq. ID no. 12669128
MAFYDIGEQQYSTFGYILSKPGNAGAYEIDPSIPNIDDAIYGSDEFRMYAYKIKRCPRTRSHDWTECPYAHRGEKATRRDPRRYTYCAVACPAFRNGACHRGDSCEFAHGVFEYWLHPARYRTRACNAGNLCQRKVCFFAHAPEQLRQSEGKHRCRYAYRPVRARGGGNGDGVTMRMDDEGYDTSRSPVRSGKDDLDSNEEKVLLKCWSRMSIVDDHYEPSDLDLDLSHFDWISELVD

SEQ ID NO: 83190 - protein, 191 aa, Arabidopsis thaliana
  peptide (1)..(191): Ceres Seq. ID no. 12669129
MYAYKIKRCPRTRSHDWTECPYAHRGEKATRRDPRRYTYCAVACPAFRNGACHRGDSCEFAHGVFEYWLHPARYRTRACNAGNLCQRKVCFFAHAPEQLRQSEGKHRCRYAYRPVRARGGGNGDGVTMRMDDEGYDTSRSPVRSGKDDLDSNEEKVLLKCWSRMSIVDDHYEPSDLDLDLSHFDWISELVD

SEQ ID NO: 83191 - DNA, 1595 bp, Arabidopsis thaliana
  misc_feature (1)..(1595): Ceres Seq. ID no. 12669174
  misc_feature (1)..(1595): Ortholog of  Ceres SEQ ID NO 12611159 as cited in SEQ ID NO 59821
gccaggcttatatatatgcataaacatatataattatgcatggaggagtagtagcttgcaatgtcttgaaactttgatatatcttctcctagtctttcttttaaatgtttaatatgaaaacacaaaatcctacaacggtcgtctaccacagtttctcagtcagtttcatattcagatgcatcagagttctcatcaagagatctatcagtctattgccttaaactcgacgacattctgttttttttttcttttcttattttttctttttcttatttcttacctataggttgtatgtaaatctatatcaaaaaaagaagaaaaacaagatgtcaagaaagccatgttgtgtgggagaaggactgaagaaaggagcatggactgccgaagaagacaagaaactcatctcttacattcatgaacacggtgaaggaggctggcgtgacattccccaaaaagctggactaaaacgatgtggaaagagttgtagattgcgatgggctaactatttgaaacctgacatcaagagaggagagtttagctatgaggaggaacagattatcatcatgctacacgcttctcgcggcaacaagtggtcagtcatagcgagacatttgcccaaaagaacagataacgagattaagaactactggaacacgcatctcaaaaagctcctgatcgataagggaatcgatcccgtgacccacaagccacttgcctatgactcaaacccggatgagcaatcgcaatcgggttccatctctccaaagtctcttcctccttcaagctccaaaaatgtaccggagataaccagcagtgacgagacaccgaaatatgatgcttccttgagctccaagaaacgttgttttaagagatcgagttctacatcaaaactgttaaacaaagttgcagctagggcttcttccatgggaactatactaggcgcctccatcgaaggaaccttgatcagctctacaccgttgtcttcatgtctaaatgatgacttttctgaaacaagtcaatttcagatggaagaatttgatccattctatcagtcatctgaacacataattgatcatatgaaagaagatatcagcatcaacaattccgaatacgatttctcgcagtttctcgagcagtttagtaacaacgaaggggaagaagctgacaatactggaggaggatataaccaagatcttcttatgtctgatgtctcatcaacaagcgttgatgaagacgagatgatgcaaaacataactggttggtcaaattatctccttgaccattccgatttcaattatgacacgagccaagattacgacgacaagaacttcatatgatccgttgattgcttaccggactagagttgaccggttaatgtcatatggttctcttagatatttgtcaagttatagtaaaggtccactatagggtcactatatattaatattcagtaatggattctcttagttagagaaccttgtgatgccgtggatcaattagtatttgatttgcgggagacacgagttttttttccttctattgttgtttgtggatttacgtactataaataataaataaaacacccatttgattgc

SEQ ID NO: 83192 - protein, 336 aa, Arabidopsis thaliana
  peptide (1)..(336): Ceres Seq. ID no. 12669175
MSRKPCCVGEGLKKGAWTAEEDKKLISYIHEHGEGGWRDIPQKAGLKRCGKSCRLRWANYLKPDIKRGEFSYEEEQIIIMLHASRGNKWSVIARHLPKRTDNEIKNYWNTHLKKLLIDKGIDPVTHKPLAYDSNPDEQSQSGSISPKSLPPSSSKNVPEITSSDETPKYDASLSSKKRCFKRSSSTSKLLNKVAARASSMGTILGASIEGTLISSTPLSSCLNDDFSETSQFQMEEFDPFYQSSEHIIDHMKEDISINNSEYDFSQFLEQFSNNEGEEADNTGGGYNQDLLMSDVSSTSVDEDEMMQNITGWSNYLLDHSDFNYDTSQDYDDKNFI

SEQ ID NO: 83193 - protein, 257 aa, Arabidopsis thaliana
  peptide (1)..(257): Ceres Seq. ID no. 12669176
MLHASRGNKWSVIARHLPKRTDNEIKNYWNTHLKKLLIDKGIDPVTHKPLAYDSNPDEQSQSGSISPKSLPPSSSKNVPEITSSDETPKYDASLSSKKRCFKRSSSTSKLLNKVAARASSMGTILGASIEGTLISSTPLSSCLNDDFSETSQFQMEEFDPFYQSSEHIIDHMKEDISINNSEYDFSQFLEQFSNNEGEEADNTGGGYNQDLLMSDVSSTSVDEDEMMQNITGWSNYLLDHSDFNYDTSQDYDDKNFI

SEQ ID NO: 83194 - DNA, 1017 bp, Arabidopsis thaliana
  misc_feature (1)..(1017): Ceres Seq. ID no. 12669177
  misc_feature (1)..(1017): Ortholog of  Ceres SEQ ID NO 12611159 as cited in SEQ ID NO 59821
atgtcaaagagaccatattgtatcggagaaggactgaagaaaggagcatggactacagaagaggataaaaaactcatctcttatatccacgaccacggtgaaggaggctggcgtgacattccagaaaaagctgggctgaaacggtgtggaaagagttgtagattacggtggactaactatttgaaaccagatatcaagagaggagagtttagctatgaggaagagcagattatcatcatgcttcatgcatctcgtggcaataagtggtctgtcatagctagacatttgccaaaaagaacggataacgaggtcaaaaactattggaacacacatctcaagaaacgtttaatcgatgatggcattgatcccgtgacacacaagccactagcttcttctaaccctaatccagttgagcccatgaagttcgatttccaaaagaaatccaatcaggatgagcactcttcacagtctagttctacaactccagcatctcttcccctttcctcgaatttgaacagtgttaaatccaaaattagcagtggtgagacgcagatagaaagtggtcacgtgagctgcaagaaacgttttggacgatcgagctctacatcaaggttgttaaacaaagttgcagctagagcttcttccatcggcaacatcttatcaacatccatagaaggaaccttgagatctcctgcatcatcttcaggactcccagactcgttctctcaatcatatgagtacatgatcgataacaaagaagatctcggtacgagcattgatctcaacatccccgagtatgatttcccacagtttcttgagcaactcattaacgatgacgacgaaaatgagaacattgttgggcccgaacaagatctccttatgtccgatttcccatcaacattcgttgatgaagacgatatacttggagacataaccagttggtcaacttatcttcttgaccatcccaattttatgtatgaatcggatcaagattccgacgagaagaacttcttatga

SEQ ID NO: 83195 - protein, 338 aa, Arabidopsis thaliana
  peptide (1)..(338): Ceres Seq. ID no. 12669178
MSKRPYCIGEGLKKGAWTTEEDKKLISYIHDHGEGGWRDIPEKAGLKRCGKSCRLRWTNYLKPDIKRGEFSYEEEQIIIMLHASRGNKWSVIARHLPKRTDNEVKNYWNTHLKKRLIDDGIDPVTHKPLASSNPNPVEPMKFDFQKKSNQDEHSSQSSSTTPASLPLSSNLNSVKSKISSGETQIESGHVSCKKRFGRSSSTSRLLNKVAARASSIGNILSTSIEGTLRSPASSSGLPDSFSQSYEYMIDNKEDLGTSIDLNIPEYDFPQFLEQLINDDDENENIVGPEQDLLMSDFPSTFVDEDDILGDITSWSTYLLDHPNFMYESDQDSDEKNFL

SEQ ID NO: 83196 - protein, 259 aa, Arabidopsis thaliana
  peptide (1)..(259): Ceres Seq. ID no. 12669179
MLHASRGNKWSVIARHLPKRTDNEVKNYWNTHLKKRLIDDGIDPVTHKPLASSNPNPVEPMKFDFQKKSNQDEHSSQSSSTTPASLPLSSNLNSVKSKISSGETQIESGHVSCKKRFGRSSSTSRLLNKVAARASSIGNILSTSIEGTLRSPASSSGLPDSFSQSYEYMIDNKEDLGTSIDLNIPEYDFPQFLEQLINDDDENENIVGPEQDLLMSDFPSTFVDEDDILGDITSWSTYLLDHPNFMYESDQDSDEKNFL

SEQ ID NO: 83197 - protein, 199 aa, Arabidopsis thaliana
  peptide (1)..(199): Ceres Seq. ID no. 12669180
MKFDFQKKSNQDEHSSQSSSTTPASLPLSSNLNSVKSKISSGETQIESGHVSCKKRFGRSSSTSRLLNKVAARASSIGNILSTSIEGTLRSPASSSGLPDSFSQSYEYMIDNKEDLGTSIDLNIPEYDFPQFLEQLINDDDENENIVGPEQDLLMSDFPSTFVDEDDILGDITSWSTYLLDHPNFMYESDQDSDEKNFL

SEQ ID NO: 83198 - DNA, 1407 bp, Arabidopsis thaliana
  misc_feature (1)..(1407): Ceres Seq. ID no. 12669181
  misc_feature (1)..(1407): Ortholog of  Ceres SEQ ID NO 14314879 as cited in SEQ ID NO 54119
atggatccagaggataggtccgagattgccttcttcgacgttgagacgactgtaccaaaacgaggtcaacgtttcgcgattctagaattcgggtcaatcctcgtttgcccgaagaagctaacggagctccgaagctacacgactctcgtccaacctgcagatttgagtctcatatcttccttgtccgtgaggtgcaatggtatcaaacgtgacgacgtcgttttggcacctctgtttgccgacatcgctgatactgtctacgacattctccatgggaggatttgggcaggtcataacatattgaggtttgattgtgcaaggatcagagaagcatttgcagagattggtcgtcaaccacccgagccaaaaggcgccattgattcattgggtttgctaactcagaagtttggtagaagagctggtgatatgaagatggcaactttggctagatatttcggactcgggaatcagacgcataggagcctggatgatgttcgaatgaatcttgaggttctcaaatattgtgctactgtcttgttcttggagtcgagtctcccatatgcacatgtagataattcggtatctcctgaaactattagttcaaggagacgtattgatgcatctcgcgagggtaatactgtaacgacctctgttaggctaccatccattagcgagaacagtgcagctcagccagatccgttcaacatgagcgtcttgaggaatgaaatggcttctgacaaccatattcaatcagacattctcatggaagaagaacaaattgaaccctctgatgttgtcgcctctgagaataccagtgaccatgagggtttcttgacgcctgacgcgatgtctctttcaaacatcaaagcgatgctcttcccgttttatcctggaagccaaatgatgaaactaaagctactccacggcgattcccctctgcagctctactgttcttatctgaaaatacggtttggagtcaatgggaagtttctggataacaccgggagacggaggttaaactttgttgttgatctgaatccaagcctttacagtatactcgaagcatgtgacagtaatgcgcagaaactatctgttgattcaggttccacttctgagtggaacccggtcgtgaatccaatgaagggatttgttaactaccctaacgcaaggatacatattgcgacagagataaatggagatgaagctcggtatgcaacagagatacaccaaagagagtcctctggagctactcagaaactaatcttcagcaacccgaacaatgaggagctcgaatcgttgctgaccacgggaagtgttgttgatgcattcttgtctcttgaaccgtatgattatcagcagaaagctggaatccgccttgttgccaaaaagctagtcattcagtcgtaa

SEQ ID NO: 83199 - protein, 468 aa, Arabidopsis thaliana
  peptide (1)..(468): Ceres Seq. ID no. 12669182
MDPEDRSEIAFFDVETTVPKRGQRFAILEFGSILVCPKKLTELRSYTTLVQPADLSLISSLSVRCNGIKRDDVVLAPLFADIADTVYDILHGRIWAGHNILRFDCARIREAFAEIGRQPPEPKGAIDSLGLLTQKFGRRAGDMKMATLARYFGLGNQTHRSLDDVRMNLEVLKYCATVLFLESSLPYAHVDNSVSPETISSRRRIDASREGNTVTTSVRLPSISENSAAQPDPFNMSVLRNEMASDNHIQSDILMEEEQIEPSDVVASENTSDHEGFLTPDAMSLSNIKAMLFPFYPGSQMMKLKLLHGDSPLQLYCSYLKIRFGVNGKFLDNTGRRRLNFVVDLNPSLYSILEACDSNAQKLSVDSGSTSEWNPVVNPMKGFVNYPNARIHIATEINGDEARYATEIHQRESSGATQKLIFSNPNNEELESLLTTGSVVDAFLSLEPYDYQQKAGIRLVAKKLVIQS

SEQ ID NO: 83200 - protein, 326 aa, Arabidopsis thaliana
  peptide (1)..(326): Ceres Seq. ID no. 12669183
MKMATLARYFGLGNQTHRSLDDVRMNLEVLKYCATVLFLESSLPYAHVDNSVSPETISSRRRIDASREGNTVTTSVRLPSISENSAAQPDPFNMSVLRNEMASDNHIQSDILMEEEQIEPSDVVASENTSDHEGFLTPDAMSLSNIKAMLFPFYPGSQMMKLKLLHGDSPLQLYCSYLKIRFGVNGKFLDNTGRRRLNFVVDLNPSLYSILEACDSNAQKLSVDSGSTSEWNPVVNPMKGFVNYPNARIHIATEINGDEARYATEIHQRESSGATQKLIFSNPNNEELESLLTTGSVVDAFLSLEPYDYQQKAGIRLVAKKLVIQS

SEQ ID NO: 83201 - protein, 324 aa, Arabidopsis thaliana
  peptide (1)..(324): Ceres Seq. ID no. 12669184
MATLARYFGLGNQTHRSLDDVRMNLEVLKYCATVLFLESSLPYAHVDNSVSPETISSRRRIDASREGNTVTTSVRLPSISENSAAQPDPFNMSVLRNEMASDNHIQSDILMEEEQIEPSDVVASENTSDHEGFLTPDAMSLSNIKAMLFPFYPGSQMMKLKLLHGDSPLQLYCSYLKIRFGVNGKFLDNTGRRRLNFVVDLNPSLYSILEACDSNAQKLSVDSGSTSEWNPVVNPMKGFVNYPNARIHIATEINGDEARYATEIHQRESSGATQKLIFSNPNNEELESLLTTGSVVDAFLSLEPYDYQQKAGIRLVAKKLVIQS

SEQ ID NO: 83202 - DNA, 1416 bp, Arabidopsis thaliana
  misc_feature (1)..(1416): Ceres Seq. ID no. 12669185
  misc_feature (1)..(1416): Ortholog of  Ceres SEQ ID NO 13639120 as cited in SEQ ID NO 56708
gatcaaactgttttatccaagttacaacaaaaatgggaaaggaggacggtttcaggactcagaagcgcgtatcaacagcttcctccgccgccgccggcgttcttccgacgacgatggcgagtggtggagtaaggagaccaccaccacgtggtagacagatccaaaagacgttcaacaacgtgaaaatgacaatcctttgtggcttcgtcaccatcctcgtcctacgtggcactatcggcattaacttcggaacttccgacgccgacgtcgtaaaccagaacattatcgaagagactaaccgacttctagctgagatccgatccgattcggatcctaccgactcaaacgagccacctgattcggatcttgacctcaacatgacgtacactctcggacccaagatcactaactgggatcaaaaacggaaactttggttaacgcaaaacccagatttccccagtttcatcaatggtaaagctaaggttttgcttttaacaggttcgcctccaaaaccttgtgacaaccctattggtgatcattacctgctgaaatcggtgaagaacaagattgattattgtaggattcatgggattgagattgtgtataacatggctcatttagacaaggagcttgctgggtattgggcaaagcttccaatgatcaggagattgatgttgtctcatcctgaaattgaatggatttggtggatggacagtgatgctttgttcactgacatggtgtttgagattcctttgtctagatatgagaaccataacttggttattcatggatatcctgatttgttgtttgatcagaagtcttggattgctttgaatactggtagcttcttgtttaggaactgtcaatggtctttggatttgttggatgcttgggctccaatgggacctaaaggacctattcgggaagaagctgggaagattctcaccgcgaatcttaaaggaagaccggctttcgaagcggatgatcagtctgcattgatctatctgctgctttcgcagaaggagacgtggatggagaaagtgtttgtggagaatcagtactatcttcatgggttttgggaaggtttagtggataagtatgaggagatgatggagaagtaccatcccggtttgggagatgaaagatggccttttattactcactttgttggatgcaaaccgtgtgggagttatgctgattacgcggttgaacgttgcttgaagagtatggagcgagcattcaactttgcggataatcaagtgctcaaactgtatgggtttggtcacaggggattgttaagtcctaagatcaagaggatcagaaacgagacaacatttccattgaaattcgtagacaggtttgatattcggagaacaacaccgctcaagattgaagcacgaagctagcagctgatga

SEQ ID NO: 83203 - protein, 467 aa, Arabidopsis thaliana
  peptide (1)..(467): Ceres Seq. ID no. 12669186
SNCFIQVTTKMGKEDGFRTQKRVSTASSAAAGVLPTTMASGGVRRPPPRGRQIQKTFNNVKMTILCGFVTILVLRGTIGINFGTSDADVVNQNIIEETNRLLAEIRSDSDPTDSNEPPDSDLDLNMTYTLGPKITNWDQKRKLWLTQNPDFPSFINGKAKVLLLTGSPPKPCDNPIGDHYLLKSVKNKIDYCRIHGIEIVYNMAHLDKELAGYWAKLPMIRRLMLSHPEIEWIWWMDSDALFTDMVFEIPLSRYENHNLVIHGYPDLLFDQKSWIALNTGSFLFRNCQWSLDLLDAWAPMGPKGPIREEAGKILTANLKGRPAFEADDQSALIYLLLSQKETWMEKVFVENQYYLHGFWEGLVDKYEEMMEKYHPGLGDERWPFITHFVGCKPCGSYADYAVERCLKSMERAFNFADNQVLKLYGFGHRGLLSPKIKRIRNETTFPLKFVDRFDIRRTTPLKIEARS

SEQ ID NO: 83204 - protein, 457 aa, Arabidopsis thaliana
  peptide (1)..(457): Ceres Seq. ID no. 12669187
MGKEDGFRTQKRVSTASSAAAGVLPTTMASGGVRRPPPRGRQIQKTFNNVKMTILCGFVTILVLRGTIGINFGTSDADVVNQNIIEETNRLLAEIRSDSDPTDSNEPPDSDLDLNMTYTLGPKITNWDQKRKLWLTQNPDFPSFINGKAKVLLLTGSPPKPCDNPIGDHYLLKSVKNKIDYCRIHGIEIVYNMAHLDKELAGYWAKLPMIRRLMLSHPEIEWIWWMDSDALFTDMVFEIPLSRYENHNLVIHGYPDLLFDQKSWIALNTGSFLFRNCQWSLDLLDAWAPMGPKGPIREEAGKILTANLKGRPAFEADDQSALIYLLLSQKETWMEKVFVENQYYLHGFWEGLVDKYEEMMEKYHPGLGDERWPFITHFVGCKPCGSYADYAVERCLKSMERAFNFADNQVLKLYGFGHRGLLSPKIKRIRNETTFPLKFVDRFDIRRTTPLKIEARS

SEQ ID NO: 83205 - protein, 430 aa, Arabidopsis thaliana
  peptide (1)..(430): Ceres Seq. ID no. 12669188
MASGGVRRPPPRGRQIQKTFNNVKMTILCGFVTILVLRGTIGINFGTSDADVVNQNIIEETNRLLAEIRSDSDPTDSNEPPDSDLDLNMTYTLGPKITNWDQKRKLWLTQNPDFPSFINGKAKVLLLTGSPPKPCDNPIGDHYLLKSVKNKIDYCRIHGIEIVYNMAHLDKELAGYWAKLPMIRRLMLSHPEIEWIWWMDSDALFTDMVFEIPLSRYENHNLVIHGYPDLLFDQKSWIALNTGSFLFRNCQWSLDLLDAWAPMGPKGPIREEAGKILTANLKGRPAFEADDQSALIYLLLSQKETWMEKVFVENQYYLHGFWEGLVDKYEEMMEKYHPGLGDERWPFITHFVGCKPCGSYADYAVERCLKSMERAFNFADNQVLKLYGFGHRGLLSPKIKRIRNETTFPLKFVDRFDIRRTTPLKIEARS

SEQ ID NO: 83206 - DNA, 1371 bp, Arabidopsis thaliana
  misc_feature (1)..(1371): Ceres Seq. ID no. 12669207
  misc_feature (1)..(1371): Ortholog of  Ceres SEQ ID NO 14303790 as cited in SEQ ID NO 55525
atggattctacttcatcggaagtaaaaatcgtttctcaatgctttgttaaacccaaaaccatccctgaaaaatggaaagagccataccatttatcaccgttggatcttgtgatgctctctatgcattacctccaaaatggtcttctctttctcaaatctgatgatgcaaccaaaacaaaagatttcatggagacttggctacaaaagcttagagattctctagctgaaacccttgtccatttttatccgctcgcgggtcgtctctcgactttaaaaaccgataatccgagatcctactctgtgtttgtggattgtaatgacagtcccggagctggatttatccatgccaaatcggatctaagtgtaagagatattgttggatccaactatgttcctttggttgttcaatctttctttgaccaccataaagccgtgagccatgatggtcacaccatgagtctcttctcagtcaaggtaacagaattggtagatggagtgttcattggattttcattgaatcacgctgtgggagatggaggttccttgtggcattttttcaactctttgtcggagattttcaatgcacaagaaaccgataacttgcttctcaagaatcctccagtcctttcacgttggtttcctaaagggtacggtcctgtgtacaaccttcctttcactcactctgatgaattcattagccgattcgaatcaccggtcttgaaggagagaatattccatttctcgtctgaaacaataacatcattgaaatcaaaggctaatgaagaaagcagaacaacaacaatttcttcttttcaagcgttagccgcatttatgtggagatgcattacaagagcaagaaacttaccttatgatcatgaaattcgttgtagccttgccgctaacaatggaacaaaattggatccaccattgtctttgagctatcttggtaattgtctttctgctgtaaagtccaagaccgttacatccggtgagctactagaaaatgatttgggatgggctgctttgaaaatgcatgaagctgtgattggaaacactagtgaagtggtctcggagacaatcaaaaactggttgaaatcatcttatgttttccatttagaaaaacttttgggagcgatggtggttcacattggaagctctccgaggtttaagatgtatgaatgcgagtttgggatgggaaaagcggttgcggttagaagcggttatggcggtaagtttgatgggaagatatcagcatatgcaggaagagaaggaggaggaaccatagatttggaagtatgtcttcttccagagtttatggaagctttggaatcagatcaagaattcatgtccgttgtctcttcttcttcttga

SEQ ID NO: 83207 - protein, 456 aa, Arabidopsis thaliana
  peptide (1)..(456): Ceres Seq. ID no. 12669208
MDSTSSEVKIVSQCFVKPKTIPEKWKEPYHLSPLDLVMLSMHYLQNGLLFLKSDDATKTKDFMETWLQKLRDSLAETLVHFYPLAGRLSTLKTDNPRSYSVFVDCNDSPGAGFIHAKSDLSVRDIVGSNYVPLVVQSFFDHHKAVSHDGHTMSLFSVKVTELVDGVFIGFSLNHAVGDGGSLWHFFNSLSEIFNAQETDNLLLKNPPVLSRWFPKGYGPVYNLPFTHSDEFISRFESPVLKERIFHFSSETITSLKSKANEESRTTTISSFQALAAFMWRCITRARNLPYDHEIRCSLAANNGTKLDPPLSLSYLGNCLSAVKSKTVTSGELLENDLGWAALKMHEAVIGNTSEVVSETIKNWLKSSYVFHLEKLLGAMVVHIGSSPRFKMYECEFGMGKAVAVRSGYGGKFDGKISAYAGREGGGTIDLEVCLLPEFMEALESDQEFMSVVSSSS

SEQ ID NO: 83208 - protein, 419 aa, Arabidopsis thaliana
  peptide (1)..(419): Ceres Seq. ID no. 12669209
MLSMHYLQNGLLFLKSDDATKTKDFMETWLQKLRDSLAETLVHFYPLAGRLSTLKTDNPRSYSVFVDCNDSPGAGFIHAKSDLSVRDIVGSNYVPLVVQSFFDHHKAVSHDGHTMSLFSVKVTELVDGVFIGFSLNHAVGDGGSLWHFFNSLSEIFNAQETDNLLLKNPPVLSRWFPKGYGPVYNLPFTHSDEFISRFESPVLKERIFHFSSETITSLKSKANEESRTTTISSFQALAAFMWRCITRARNLPYDHEIRCSLAANNGTKLDPPLSLSYLGNCLSAVKSKTVTSGELLENDLGWAALKMHEAVIGNTSEVVSETIKNWLKSSYVFHLEKLLGAMVVHIGSSPRFKMYECEFGMGKAVAVRSGYGGKFDGKISAYAGREGGGTIDLEVCLLPEFMEALESDQEFMSVVSSSS

SEQ ID NO: 83209 - protein, 416 aa, Arabidopsis thaliana
  peptide (1)..(416): Ceres Seq. ID no. 12669210
MHYLQNGLLFLKSDDATKTKDFMETWLQKLRDSLAETLVHFYPLAGRLSTLKTDNPRSYSVFVDCNDSPGAGFIHAKSDLSVRDIVGSNYVPLVVQSFFDHHKAVSHDGHTMSLFSVKVTELVDGVFIGFSLNHAVGDGGSLWHFFNSLSEIFNAQETDNLLLKNPPVLSRWFPKGYGPVYNLPFTHSDEFISRFESPVLKERIFHFSSETITSLKSKANEESRTTTISSFQALAAFMWRCITRARNLPYDHEIRCSLAANNGTKLDPPLSLSYLGNCLSAVKSKTVTSGELLENDLGWAALKMHEAVIGNTSEVVSETIKNWLKSSYVFHLEKLLGAMVVHIGSSPRFKMYECEFGMGKAVAVRSGYGGKFDGKISAYAGREGGGTIDLEVCLLPEFMEALESDQEFMSVVSSSS

SEQ ID NO: 83210 - DNA, 1541 bp, Arabidopsis thaliana
  misc_feature (1)..(1541): Ceres Seq. ID no. 12669211
  misc_feature (1)..(1541): Ortholog of  Ceres SEQ ID NO 14303790 as cited in SEQ ID NO 55525
atggattcttcttcatctgaagtaaggataatctcaaaatgcttcgtcaaacccaaaaccatccctcaaaaatggaaagaaccttaccatttttcaccaacggatcatataatgctctcaatccattacatccaaaagggtcttctttttctcaaaccatcattttctgaatctgtcaaaccaaaagagttcatggagactttgctgcagaagcttaaagactcactagccatagcacttgtccatttctatcctcttgcaggtcgtctctctactttgaaaaccgacaattcaagatctcactctgtgtttgtggattgtaataatagtcctggtgctagatttatccatgctgaatcagatctaagtgtgtcagacattcttggatccacatatgttcctttggttgttcaatctctctttgatcatcacaaagcattgaatcgtgatggttacaccatgagtctcttatcaatcaaggtaacagaactggtagatggagtgttcataggattgtctatgaatcattcccttggagatggaagttccttctggcagttcttcaactctttgtctgagatcttcaattcacaagaagaaaccattgggaataacaacaacaacaacaacaacgcattgctctgtctcaagaatcctccaatcattcgtgaagcgaccggtcctatgtacagccttccctttagtgaacctaatgagtcccttagtcaatccgaacctccggttttgaaggagaggatgttccatttctcatcagaaacagtgagatcgctgaaatcaaaggcgaatcaagaatgcggaacaacaatgatctcttcttttcaggctctgaccgcattgatatggagaagcattacaagagcaagaaaactaccaaatgatcaagaaactacttgcaggtttgctgctggaaacagatcaagaatgaatccaccattgccgacgaatcaatttggagtttacatctctcttgtgaaaacgactactaaaatcggtaatctactggagaatgagtttggatggattgctttgaaactgcatcaagctgttaccgaacacactggcgaaaagatctcttacgaaatagatcaaatgttgaagtctcctttaccgttgcaagcatatcgactttccaatttgaacatagttcacatgggaagttctccaaggtttaacaagtacggaagcgagtttgggatggggaaagcggtggcggttagaagcggttatggcggtaagtatgacgggaaggtatcagcttatccaggaagacaaggaggagcaagtatagatttggaagtatgtctacttccagagtttatggaagctttggaatcagatcaagagttcatgtctcttgtctcttcttccacctgatcctattcatattttccagacacaaaactcaagttattctttatttcaaacacaaatctttggaaccaaatgtttgcttgttactctaactgtattctgcagttgttaaatgtttccncttcattaagaaaagaactaatatattg

SEQ ID NO: 83211 - protein, 464 aa, Arabidopsis thaliana
  peptide (1)..(464): Ceres Seq. ID no. 12669212
MDSSSSEVRIISKCFVKPKTIPQKWKEPYHFSPTDHIMLSIHYIQKGLLFLKPSFSESVKPKEFMETLLQKLKDSLAIALVHFYPLAGRLSTLKTDNSRSHSVFVDCNNSPGARFIHAESDLSVSDILGSTYVPLVVQSLFDHHKALNRDGYTMSLLSIKVTELVDGVFIGLSMNHSLGDGSSFWQFFNSLSEIFNSQEETIGNNNNNNNNALLCLKNPPIIREATGPMYSLPFSEPNESLSQSEPPVLKERMFHFSSETVRSLKSKANQECGTTMISSFQALTALIWRSITRARKLPNDQETTCRFAAGNRSRMNPPLPTNQFGVYISLVKTTTKIGNLLENEFGWIALKLHQAVTEHTGEKISYEIDQMLKSPLPLQAYRLSNLNIVHMGSSPRFNKYGSEFGMGKAVAVRSGYGGKYDGKVSAYPGRQGGASIDLEVCLLPEFMEALESDQEFMSLVSSST

SEQ ID NO: 83212 - protein, 427 aa, Arabidopsis thaliana
  peptide (1)..(427): Ceres Seq. ID no. 12669213
MLSIHYIQKGLLFLKPSFSESVKPKEFMETLLQKLKDSLAIALVHFYPLAGRLSTLKTDNSRSHSVFVDCNNSPGARFIHAESDLSVSDILGSTYVPLVVQSLFDHHKALNRDGYTMSLLSIKVTELVDGVFIGLSMNHSLGDGSSFWQFFNSLSEIFNSQEETIGNNNNNNNNALLCLKNPPIIREATGPMYSLPFSEPNESLSQSEPPVLKERMFHFSSETVRSLKSKANQECGTTMISSFQALTALIWRSITRARKLPNDQETTCRFAAGNRSRMNPPLPTNQFGVYISLVKTTTKIGNLLENEFGWIALKLHQAVTEHTGEKISYEIDQMLKSPLPLQAYRLSNLNIVHMGSSPRFNKYGSEFGMGKAVAVRSGYGGKYDGKVSAYPGRQGGASIDLEVCLLPEFMEALESDQEFMSLVSSST

SEQ ID NO: 83213 - protein, 400 aa, Arabidopsis thaliana
  peptide (1)..(400): Ceres Seq. ID no. 12669214
METLLQKLKDSLAIALVHFYPLAGRLSTLKTDNSRSHSVFVDCNNSPGARFIHAESDLSVSDILGSTYVPLVVQSLFDHHKALNRDGYTMSLLSIKVTELVDGVFIGLSMNHSLGDGSSFWQFFNSLSEIFNSQEETIGNNNNNNNNALLCLKNPPIIREATGPMYSLPFSEPNESLSQSEPPVLKERMFHFSSETVRSLKSKANQECGTTMISSFQALTALIWRSITRARKLPNDQETTCRFAAGNRSRMNPPLPTNQFGVYISLVKTTTKIGNLLENEFGWIALKLHQAVTEHTGEKISYEIDQMLKSPLPLQAYRLSNLNIVHMGSSPRFNKYGSEFGMGKAVAVRSGYGGKYDGKVSAYPGRQGGASIDLEVCLLPEFMEALESDQEFMSLVSSST

SEQ ID NO: 83214 - DNA, 756 bp, Arabidopsis thaliana
  misc_feature (1)..(756): Ceres Seq. ID no. 12669215
  misc_feature (1)..(756): Ortholog of  Ceres SEQ ID NO 14312328 as cited in SEQ ID NO 59022
atggctcctaagaattccagctggaacccttttgatgatgagaaggaggctgctaagagtttcagtttgaacccttttgatgatgatgatgatgacaaggaggttgagaaaagattcacttcatccttgaagccctcgggaggtaaagagaaccagacggttcaagaacttgagagctacgctgtgtataactctgaggaaacaacgaaaaccgtacaagggtgtttgaaagttgctgaagagattagatgtgatgcttctaaaactttggttatgttgaatgaacaaggagatcaaattactagaacacaccagaagacggttgatctcgatcatcatctttctcggggtgagaagattcttggacgcctcggaggtgttttttcaaggacttggaagccaaagaagtctcgttctataactggccctgtcataaccaaaggtgattcacctaagagaaaagttatcgacttaaagactagggaaaagctgggactgaacccttcactcaaaccaaaatcaaaaacacttcctgaagccgttgatgcttatcagaaaacacagattgcaaagcaagatgaagcccttaccgacttaagcgctcttcttggcgagttgaaaaatatggcagtggacatgggaacagcaatcgaaaggcaaaccaatgaactggatcatcttcaagataatgctgatgagctcaactacagagttaagcaatcgaaccaacgggctcgctatttactccggaagtaa

SEQ ID NO: 83215 - protein, 251 aa, Arabidopsis thaliana
  peptide (1)..(251): Ceres Seq. ID no. 12669216
MAPKNSSWNPFDDEKEAAKSFSLNPFDDDDDDKEVEKRFTSSLKPSGGKENQTVQELESYAVYNSEETTKTVQGCLKVAEEIRCDASKTLVMLNEQGDQITRTHQKTVDLDHHLSRGEKILGRLGGVFSRTWKPKKSRSITGPVITKGDSPKRKVIDLKTREKLGLNPSLKPKSKTLPEAVDAYQKTQIAKQDEALTDLSALLGELKNMAVDMGTAIERQTNELDHLQDNADELNYRVKQSNQRARYLLRK

SEQ ID NO: 83216 - protein, 160 aa, Arabidopsis thaliana
  peptide (1)..(160): Ceres Seq. ID no. 12669217
MLNEQGDQITRTHQKTVDLDHHLSRGEKILGRLGGVFSRTWKPKKSRSITGPVITKGDSPKRKVIDLKTREKLGLNPSLKPKSKTLPEAVDAYQKTQIAKQDEALTDLSALLGELKNMAVDMGTAIERQTNELDHLQDNADELNYRVKQSNQRARYLLRK

SEQ ID NO: 83217 - DNA, 1815 bp, Arabidopsis thaliana
  misc_feature (1)..(1815): Ceres Seq. ID no. 12669238
  misc_feature (1)..(1815): Ortholog of  Ceres SEQ ID NO 13655755 as cited in SEQ ID NO 65117
atggagaactcagtgacccaagatggtatcgcgacagtattagccaatcaatcccttgattcctcctctgttagacccgaaattgttgttcaagtcgtggatcttaagcctgctggaaatcgatatacgtttagtgccaatgatggaaagatgaagattaaagcaatgttaccagcgactttgacttctgatatcatctctggaaagattcagaatctgggtcttattcgtctccttgagtataccgtcaatgatattccaggcaaatcagaagaaaaatatatgcttataacaaaatgtgaggctgttgcttctgcacttgactcagagattaaggcggagattaaagcttccacaggcataatgttgaaacccaagcatgagtttgttgccaaatcagcttcacagattatcaatgagcaaaggggaaatgctgcacctgctgcaagaatggctatgaccagaagggttcatcctcttgtgtccttgaacccttatcaaggaagttggactattaaagttcgtgtcactaacaaaggagtcatgagaacttacaaaaatgccagaggagaaggatgtgtgtttaatgtggaactaactgatgaggaaggaacacagattcaggcaacaatgtttaacgcagctgcaaggaagttttatgacagattcgagatgggaaaggtgtactatatatccaggggatcacttaagcttgctaataagcagttcaagacggttcagaacgattatgagatgaccctaaatgagaattctgaggttgaagaagctagtaatgaagaaatgtttacccctgaaactaaattcaactttgtacccattgatgagttgggtacatacgtgaatcagaaagaccttattgatgttatcggtgttgttcaaagtgtttctcctaccatgagcattagaaggaagaacgacaatgagatgatcccaaagagagatataactttggctgatgagacaaagaaaactgttgtggtgtccctttggaatgatctagcaactggcattggccaagaactgctggacatggctgataatcaccctgttatcgcgattaaatctcttaaagttggagcttttcaaggtgtttcattgtctactatcagcagaagcaatgtggtgataaaccctaattctccagaagctacaaagttgaaatcttggtatgatgctgaagggaaagagacatctatgtctgctattggttctgggatgagttcttctgccaacaacggatcaagatccatgtattctgacagagtttttctttctcacatcacaagcaatccctctttaggcgaggagaagcctgtattcttcagcactagagcttacataagcttcatcaagccagaccaaacaatgtggtaccgtgcttgcaagacctgtaacaagaaagttactgaagcaatggactctggttattggtgtgaaagttgtcagaaaaaggaccaagaatgcagtttaaggtatataatggcggtgaaagtctccgactcaactggtgaaacttggttatctgcattcaatgatgaagcagagaagattatcggctgcacagctgatgatctcaatgatctaaaatcagaggaaggtgaagtgaatgagtttcagacaaaactgaaagaagctacttggtcatctcatctcttccggattagtgtttctcagcaagagtataacagtgagaagagacagaggataactgtaagaggtgtttctccaattgactttgctgctgaaacaagattattgctccaagacatttccaagaacaagacatctcagtaa

SEQ ID NO: 83218 - protein, 604 aa, Arabidopsis thaliana
  peptide (1)..(604): Ceres Seq. ID no. 12669239
MENSVTQDGIATVLANQSLDSSSVRPEIVVQVVDLKPAGNRYTFSANDGKMKIKAMLPATLTSDIISGKIQNLGLIRLLEYTVNDIPGKSEEKYMLITKCEAVASALDSEIKAEIKASTGIMLKPKHEFVAKSASQIINEQRGNAAPAARMAMTRRVHPLVSLNPYQGSWTIKVRVTNKGVMRTYKNARGEGCVFNVELTDEEGTQIQATMFNAAARKFYDRFEMGKVYYISRGSLKLANKQFKTVQNDYEMTLNENSEVEEASNEEMFTPETKFNFVPIDELGTYVNQKDLIDVIGVVQSVSPTMSIRRKNDNEMIPKRDITLADETKKTVVVSLWNDLATGIGQELLDMADNHPVIAIKSLKVGAFQGVSLSTISRSNVVINPNSPEATKLKSWYDAEGKETSMSAIGSGMSSSANNGSRSMYSDRVFLSHITSNPSLGEEKPVFFSTRAYISFIKPDQTMWYRACKTCNKKVTEAMDSGYWCESCQKKDQECSLRYIMAVKVSDSTGETWLSAFNDEAEKIIGCTADDLNDLKSEEGEVNEFQTKLKEATWSSHLFRISVSQQEYNSEKRQRITVRGVSPIDFAAETRLLLQDISKNKTSQ

SEQ ID NO: 83219 - protein, 554 aa, Arabidopsis thaliana
  peptide (1)..(554): Ceres Seq. ID no. 12669240
MKIKAMLPATLTSDIISGKIQNLGLIRLLEYTVNDIPGKSEEKYMLITKCEAVASALDSEIKAEIKASTGIMLKPKHEFVAKSASQIINEQRGNAAPAARMAMTRRVHPLVSLNPYQGSWTIKVRVTNKGVMRTYKNARGEGCVFNVELTDEEGTQIQATMFNAAARKFYDRFEMGKVYYISRGSLKLANKQFKTVQNDYEMTLNENSEVEEASNEEMFTPETKFNFVPIDELGTYVNQKDLIDVIGVVQSVSPTMSIRRKNDNEMIPKRDITLADETKKTVVVSLWNDLATGIGQELLDMADNHPVIAIKSLKVGAFQGVSLSTISRSNVVINPNSPEATKLKSWYDAEGKETSMSAIGSGMSSSANNGSRSMYSDRVFLSHITSNPSLGEEKPVFFSTRAYISFIKPDQTMWYRACKTCNKKVTEAMDSGYWCESCQKKDQECSLRYIMAVKVSDSTGETWLSAFNDEAEKIIGCTADDLNDLKSEEGEVNEFQTKLKEATWSSHLFRISVSQQEYNSEKRQRITVRGVSPIDFAAETRLLLQDISKNKTSQ

SEQ ID NO: 83220 - protein, 549 aa, Arabidopsis thaliana
  peptide (1)..(549): Ceres Seq. ID no. 12669241
MLPATLTSDIISGKIQNLGLIRLLEYTVNDIPGKSEEKYMLITKCEAVASALDSEIKAEIKASTGIMLKPKHEFVAKSASQIINEQRGNAAPAARMAMTRRVHPLVSLNPYQGSWTIKVRVTNKGVMRTYKNARGEGCVFNVELTDEEGTQIQATMFNAAARKFYDRFEMGKVYYISRGSLKLANKQFKTVQNDYEMTLNENSEVEEASNEEMFTPETKFNFVPIDELGTYVNQKDLIDVIGVVQSVSPTMSIRRKNDNEMIPKRDITLADETKKTVVVSLWNDLATGIGQELLDMADNHPVIAIKSLKVGAFQGVSLSTISRSNVVINPNSPEATKLKSWYDAEGKETSMSAIGSGMSSSANNGSRSMYSDRVFLSHITSNPSLGEEKPVFFSTRAYISFIKPDQTMWYRACKTCNKKVTEAMDSGYWCESCQKKDQECSLRYIMAVKVSDSTGETWLSAFNDEAEKIIGCTADDLNDLKSEEGEVNEFQTKLKEATWSSHLFRISVSQQEYNSEKRQRITVRGVSPIDFAAETRLLLQDISKNKTSQ

SEQ ID NO: 83221 - DNA, 1119 bp, Arabidopsis thaliana
  misc_feature (1)..(1119): Ceres Seq. ID no. 12669242
  misc_feature (1)..(1119): Ortholog of  Ceres SEQ ID NO 15225493 as cited in SEQ ID NO 65438
  misc_feature (1)..(1119): Ortholog of  Ceres SEQ ID NO 14313344 as cited in SEQ ID NO 69148
atggccttcaagtatcttctaccattgcttttactgtcattgttggttgctaattgtgcctcaaggcctttgtatcgtctcccaagcgaagcaaaacatgcaaccaagaaaccacttcagacttcccgtccttacaaccttgcacacagaggatcaaacggagagctccctgaagaaactgctcctgcatatatgagggccatagaggagggtgcagattttatagaaaccgatattttgtcttccaaagacggtgttcttatatgtcaccacgatgttaatctcgatgatacaaccgatgttgcagaccataaggagtttgcagaccgtaagaggacttatgaagtccaaggaatgaacatgaccggcttcttcactgttgattttactctcaaagagctgaaaacacttggtgcaaagcagaggtatcctttcagggatcaacaatacaatggtaaattcccgattattaccttcgacgagtatatttcgatagcactggatgcacctagagtggttgggatatatccagagatcaagaatccggttttcatgaatcagcaagtgaagtgggcggatggtaaaaaatttgaagataaatttgtggaaactttgaagaaatatggatacaaaggctcatatctgtctgaagattggttaaaacagccaatatttattcagtcttttgcagcaacttcgctagtttacatttcaaacatgacagactcaccaaaattgtttttgatcgacgatgtcactattcttaccgaagacactaataagacttacgcagagatcacatcagacgcatatttggattacattaaaccatatgtaattgggattggtccatggaaagacacaattgttcctgtgaacaataaccgtctcatgacaccaacagatttagttgcgagagcacattcgcgtaatcttcaggtccatccatacacataccgtaatgagaaccagtttctgcatttagagtttaatcaggacccttacctagagtatgattattggctcaataagatcggtgttgatggtttgttcactgatttcactggaagtctacacaattaccaggaattgaagtctcctttgcctcagcaacagtga

SEQ ID NO: 83222 - protein, 372 aa, Arabidopsis thaliana
  peptide (1)..(372): Ceres Seq. ID no. 12669243
MAFKYLLPLLLLSLLVANCASRPLYRLPSEAKHATKKPLQTSRPYNLAHRGSNGELPEETAPAYMRAIEEGADFIETDILSSKDGVLICHHDVNLDDTTDVADHKEFADRKRTYEVQGMNMTGFFTVDFTLKELKTLGAKQRYPFRDQQYNGKFPIITFDEYISIALDAPRVVGIYPEIKNPVFMNQQVKWADGKKFEDKFVETLKKYGYKGSYLSEDWLKQPIFIQSFAATSLVYISNMTDSPKLFLIDDVTILTEDTNKTYAEITSDAYLDYIKPYVIGIGPWKDTIVPVNNNRLMTPTDLVARAHSRNLQVHPYTYRNENQFLHLEFNQDPYLEYDYWLNKIGVDGLFTDFTGSLHNYQELKSPLPQQQ

SEQ ID NO: 83223 - protein, 308 aa, Arabidopsis thaliana
  peptide (1)..(308): Ceres Seq. ID no. 12669244
MRAIEEGADFIETDILSSKDGVLICHHDVNLDDTTDVADHKEFADRKRTYEVQGMNMTGFFTVDFTLKELKTLGAKQRYPFRDQQYNGKFPIITFDEYISIALDAPRVVGIYPEIKNPVFMNQQVKWADGKKFEDKFVETLKKYGYKGSYLSEDWLKQPIFIQSFAATSLVYISNMTDSPKLFLIDDVTILTEDTNKTYAEITSDAYLDYIKPYVIGIGPWKDTIVPVNNNRLMTPTDLVARAHSRNLQVHPYTYRNENQFLHLEFNQDPYLEYDYWLNKIGVDGLFTDFTGSLHNYQELKSPLPQQQ

SEQ ID NO: 83224 - protein, 254 aa, Arabidopsis thaliana
  peptide (1)..(254): Ceres Seq. ID no. 12669245
MNMTGFFTVDFTLKELKTLGAKQRYPFRDQQYNGKFPIITFDEYISIALDAPRVVGIYPEIKNPVFMNQQVKWADGKKFEDKFVETLKKYGYKGSYLSEDWLKQPIFIQSFAATSLVYISNMTDSPKLFLIDDVTILTEDTNKTYAEITSDAYLDYIKPYVIGIGPWKDTIVPVNNNRLMTPTDLVARAHSRNLQVHPYTYRNENQFLHLEFNQDPYLEYDYWLNKIGVDGLFTDFTGSLHNYQELKSPLPQQQ

SEQ ID NO: 83225 - DNA, 1126 bp, Arabidopsis thaliana
  misc_feature (1)..(1126): Ceres Seq. ID no. 12669246
  misc_feature (1)..(1126): Ortholog of  Ceres SEQ ID NO 13637939 as cited in SEQ ID NO 54930
aaaggctttaaaatagtctgggaaaagtgagccaacgtgtctttaagttatacggcggaagatggtggggtgggcgattgcgctacacggcggtgccggagacattccgatcgatctccccgacgagcgacgtatccctcgtgagagcgccctccgtcactgcctcgatcttggcatctccgccctcaaatccggcaagcctcccttggacgtcgccgaacttgtcgttcgtgaacttgagaaccacccggacttcaatgcgggtaaaggatctgtcttaactgcacaaggcactgttgaaatggaagcttccattatggacggtaaaaccaaaagatgtggagctgtctccggcttgaccactgttgttaatcccatttctttagctcgcctcgtcatggagaaaactcctcatatatatcttgcattcgatgctgctgaagcttttgcaagagcacatggtgttgagacggtagattctagccatttcataactcctgaaaacattgcaaggctaaagcaggccaaagaattcaatcgagtccagttggattacacagtccctagtccgaaagtaccggacaattgcggtgacagccaaataggaacggtcggatgtgtagctgtggacagtgctggaaatctagcttcggctacatcaacgggcggttatgtcaacaaaatggttggcagaattggggatacgccagtcattggcgcaggaacttacgctaaccacctttgtgccatctcagccacaggtaaaggagaggatatcatccgtggaaccgtggctagagacgtggctgcactcatggaatataaaggcttgtctttgactgaggcagcggcttatgttgttgaccaatctgttcccagaggaagctgtggactcgttgctgtctctgccaatggtgaagtcacaatgccgtttaacactaccggaatgttcagggcttgtgctagcgaagatggttactctgagatcgcaatctggccaaacaattgaaatcactagacgaaggaatggctttgtctattattaagcaactctgtttaatcttcttctttagtttcagtttgtaagttgtaaccttatatgactcagtcttgcagtattttagtt

SEQ ID NO: 83226 - protein, 315 aa, Arabidopsis thaliana
  peptide (1)..(315): Ceres Seq. ID no. 12669247
MVGWAIALHGGAGDIPIDLPDERRIPRESALRHCLDLGISALKSGKPPLDVAELVVRELENHPDFNAGKGSVLTAQGTVEMEASIMDGKTKRCGAVSGLTTVVNPISLARLVMEKTPHIYLAFDAAEAFARAHGVETVDSSHFITPENIARLKQAKEFNRVQLDYTVPSPKVPDNCGDSQIGTVGCVAVDSAGNLASATSTGGYVNKMVGRIGDTPVIGAGTYANHLCAISATGKGEDIIRGTVARDVAALMEYKGLSLTEAAAYVVDQSVPRGSCGLVAVSANGEVTMPFNTTGMFRACASEDGYSEIAIWPNN

SEQ ID NO: 83227 - protein, 235 aa, Arabidopsis thaliana
  peptide (1)..(235): Ceres Seq. ID no. 12669248
MEASIMDGKTKRCGAVSGLTTVVNPISLARLVMEKTPHIYLAFDAAEAFARAHGVETVDSSHFITPENIARLKQAKEFNRVQLDYTVPSPKVPDNCGDSQIGTVGCVAVDSAGNLASATSTGGYVNKMVGRIGDTPVIGAGTYANHLCAISATGKGEDIIRGTVARDVAALMEYKGLSLTEAAAYVVDQSVPRGSCGLVAVSANGEVTMPFNTTGMFRACASEDGYSEIAIWPNN

SEQ ID NO: 83228 - protein, 230 aa, Arabidopsis thaliana
  peptide (1)..(230): Ceres Seq. ID no. 12669249
MDGKTKRCGAVSGLTTVVNPISLARLVMEKTPHIYLAFDAAEAFARAHGVETVDSSHFITPENIARLKQAKEFNRVQLDYTVPSPKVPDNCGDSQIGTVGCVAVDSAGNLASATSTGGYVNKMVGRIGDTPVIGAGTYANHLCAISATGKGEDIIRGTVARDVAALMEYKGLSLTEAAAYVVDQSVPRGSCGLVAVSANGEVTMPFNTTGMFRACASEDGYSEIAIWPNN

SEQ ID NO: 83229 - DNA, 1353 bp, Arabidopsis thaliana
  misc_feature (1)..(1353): Ceres Seq. ID no. 12669262
  misc_feature (1)..(1353): Ortholog of  Ceres SEQ ID NO 14315193 as cited in SEQ ID NO 57743
atcctctatctctcttttgttttttctctctctcacagagaaaaagaacacaatgccagtttctgcagagccttcttcatcttcttcaacaacaatcggtcaacacatgagactccaacgacctaggaatcatcgaaatctcccacccatttccaccgccgacgaacctctaatccccaaacctagccgcgtctctaaatccgccatgtcttccttcttcctcttgccagaaactactaagaagaaacccaacggaacggcgtcgtttcgtggtctaggctgcacaacctccgcatctcagcaagtttcagtcccggcagtgattcgctcctccgcggattgggatgctagtaatttcaaaattaagaagacgaagaagaagaacaagaacaagggtagtagtagctacaatggtggttcgattaagatcttgagcgaagctagtactagtagtagcgtcgcttgcgcagcgattcctgatgtttggtgtggtcctggagttgggttttcaacggatgctgtcgtcggaggctccattgacacagttgtttcagatcctccgagaaggaatattccggtgagacgcaaaatcgatggagataaaaccaatagtaacagtaataatcatagagaggtggttcttcttctcttcttcctagacgatctctcaatcaagagtctaatccttattttgattctgattcgagttttttgacatcgcgggctgagcagactgatagatatcatcgtcatctaagactgccttaccctgatggactcgctgagatgatgatgatgcagaatggttttgtgatgggaggagtattaagctcattcgatcaattccgtgacatgaggctcaatgtcgataacatgacatacgagcaacttttggagcttggtgaaagaattgggcatgtgaacactggacttactgaaaaacagatcaaaagttgtcttcggaaagtcaaaccatgccggcaagatacaacagttgctgatagaaagtgcatcatctgtcaagacgagtatgaggcgaaggacgaggtaggggaattacgatgtgggcacaggttccatatcgactgtgtgaatcaatggcttgtgaggaagaactcttgtccggtctgtaaaacgatggcgtacaataagtcttagttagatattatctcttcctgtgatgtgattcttgatttcgggattgaaaccaaatcactattttatgttaagattcttttttggctttttattcatgattgctatttttctgaggaaaaactgttgagacctttgtattacctatggaaaagtctcggagacattgtgaaccccacattgcgtgtgggtttgttc

SEQ ID NO: 83230 - protein, 237 aa, Arabidopsis thaliana
  peptide (1)..(237): Ceres Seq. ID no. 12669263
SSISLLFFLSLTEKKNTMPVSAEPSSSSSTTIGQHMRLQRPRNHRNLPPISTADEPLIPKPSRVSKSAMSSFFLLPETTKKKPNGTASFRGLGCTTSASQQVSVPAVIRSSADWDASNFKIKKTKKKNKNKGSSSYNGGSIKILSEASTSSSVACAAIPDVWCGPGVGFSTDAVVGGSIDTVVSDPPRRNIPVRRKIDGDKTNSNSNNHREVVLLLFFLDDLSIKSLILILILIRVF

SEQ ID NO: 83231 - protein, 220 aa, Arabidopsis thaliana
  peptide (1)..(220): Ceres Seq. ID no. 12669264
MPVSAEPSSSSSTTIGQHMRLQRPRNHRNLPPISTADEPLIPKPSRVSKSAMSSFFLLPETTKKKPNGTASFRGLGCTTSASQQVSVPAVIRSSADWDASNFKIKKTKKKNKNKGSSSYNGGSIKILSEASTSSSVACAAIPDVWCGPGVGFSTDAVVGGSIDTVVSDPPRRNIPVRRKIDGDKTNSNSNNHREVVLLLFFLDDLSIKSLILILILIRVF

SEQ ID NO: 83232 - protein, 202 aa, Arabidopsis thaliana
  peptide (1)..(202): Ceres Seq. ID no. 12669265
MRLQRPRNHRNLPPISTADEPLIPKPSRVSKSAMSSFFLLPETTKKKPNGTASFRGLGCTTSASQQVSVPAVIRSSADWDASNFKIKKTKKKNKNKGSSSYNGGSIKILSEASTSSSVACAAIPDVWCGPGVGFSTDAVVGGSIDTVVSDPPRRNIPVRRKIDGDKTNSNSNNHREVVLLLFFLDDLSIKSLILILILIRVF

SEQ ID NO: 83233 - DNA, 1171 bp, Arabidopsis thaliana
  misc_feature (1)..(1171): Ceres Seq. ID no. 12669273
  misc_feature (1)..(1171): Ortholog of  Ceres SEQ ID NO 14313796 as cited in SEQ ID NO 54544
atatgatatattctcaattttgttactcggaaacaatagaaaggataacgaatcgtttctcttcgatcgaaagaatatatatttggaagttttctctgcttttttgttttcgtttgatagaatgggaacagttctcgattcgcattttctggctctcactgctattgtcactgtgatttaccagttcatattcttcgtaatcacggctcttttcaaatttgatcaagtcactgactttgctggtagcacaaacttcgttatacttgctgtgttaacacttgttctcaaagcctcttggcattttcgacagatagtattgactttgctagttgtggtatggggtcttcgcttggggattttccttctaatgaggatcttgcaatggggggaagatcgtcgctttgatgaacagcgtggaaatatagtgagactaatcattttctggactcttcaggctgtgtgggtttggacggttagcttacctttaacacttgttaatgcaagtgatggtggtggatctcttaaacccgcagatgttatcggttggactatgtgggttttcggtttcttgattgaagctgcagctgatcaacagaagctatcattcaaaaactctcctgaaaacagaggaaaatggtgtgatgttggagtctggaagtattcaagacatccaaactacttcggtgagatgttactgtggtggggaatctttgtggctgcatcgcctgtgcttgaaggtgcagagtatcttgtcatattcggaccactctttctcactttgctacttctattcgtcagcggcataccattactcgaggcatcggctgacaaaaaacatggaaactcaggagcttacagatcctacaagaagacaacaagtcctctgattctgttcccaagaggagtgtatgggaacttaccaggatggttcaagacggtctttctcttcgagtttccattttacagccgaaatctccctcaagagttagggtagactccaaaacagcaaagagaaagaagtaaaagatgactgatttgtgatactcatatttgagttattgttcttcacaacactctttgataaaatttgtgtaaaaaattgcccgtaagaaactgaatttgtttgaaatattggacagtcttgacagattatctcagttgtatttggttc

SEQ ID NO: 83234 - protein, 330 aa, Arabidopsis thaliana
  peptide (1)..(330): Ceres Seq. ID no. 12669274
YDIFSILLLGNNRKDNESFLFDRKNIYLEVFSAFLFSFDRMGTVLDSHFLALTAIVTVIYQFIFFVITALFKFDQVTDFAGSTNFVILAVLTLVLKASWHFRQIVLTLLVVVWGLRLGIFLLMRILQWGEDRRFDEQRGNIVRLIIFWTLQAVWVWTVSLPLTLVNASDGGGSLKPADVIGWTMWVFGFLIEAAADQQKLSFKNSPENRGKWCDVGVWKYSRHPNYFGEMLLWWGIFVAASPVLEGAEYLVIFGPLFLTLLLLFVSGIPLLEASADKKHGNSGAYRSYKKTTSPLILFPRGVYGNLPGWFKTVFLFEFPFYSRNLPQELG

SEQ ID NO: 83235 - protein, 290 aa, Arabidopsis thaliana
  peptide (1)..(290): Ceres Seq. ID no. 12669275
MGTVLDSHFLALTAIVTVIYQFIFFVITALFKFDQVTDFAGSTNFVILAVLTLVLKASWHFRQIVLTLLVVVWGLRLGIFLLMRILQWGEDRRFDEQRGNIVRLIIFWTLQAVWVWTVSLPLTLVNASDGGGSLKPADVIGWTMWVFGFLIEAAADQQKLSFKNSPENRGKWCDVGVWKYSRHPNYFGEMLLWWGIFVAASPVLEGAEYLVIFGPLFLTLLLLFVSGIPLLEASADKKHGNSGAYRSYKKTTSPLILFPRGVYGNLPGWFKTVFLFEFPFYSRNLPQELG

SEQ ID NO: 83236 - protein, 208 aa, Arabidopsis thaliana; identical to SEQ ID NO: 37102
  peptide (1)..(208): Ceres Seq. ID no. 12669276

SEQ ID NO: 83237 - DNA, 1129 bp, Arabidopsis thaliana
  misc_feature (1)..(1129): Ceres Seq. ID no. 12669345
  misc_feature (1)..(1129): Ortholog of  Ceres SEQ ID NO 12617197 as cited in SEQ ID NO 63406
  misc_feature (1)..(1129): Ortholog of  Ceres SEQ ID NO 13597804 as cited in SEQ ID NO 64182
  misc_feature (1)..(1129): Ortholog of  Ceres SEQ ID NO 13598565 as cited in SEQ ID NO 65250
  misc_feature (1)..(1129): Ortholog of  Ceres SEQ ID NO 13598597 as cited in SEQ ID NO 65496
  misc_feature (1)..(1129): Ortholog of  Ceres SEQ ID NO 13596284 as cited in SEQ ID NO 68273
aaatcacaatctcaatatcacattcgttgcagagacaaagatgtctgagtatttggtaactggaggaacaggtttcattgcttcttacatcatcaaatcacttctcgaactcggacacaccgttcgaacaactgtccgaaacccacgtgatgaagaaaaggttggatttttatgggaatttcaaggagcaaaacagaggctaaagattctccaagctgatctaacggtagaaggaagttttgatgaagcagtgaatggtgttgatggagtattccacactgcttctcctgttcttgttccacaggatcataacattcaggagactttggttgatcctattataaagggtacaacaaatgtgatgagctcttgtgccaagtctaaagccacattgaaaaggattgttcttacgtcttcttgctcttcgatacgctaccgtttcgatgcaactgaagcttctcctctcaatgagtctcattggagtgatcctgaatattgcaaacgtttcaatctttggtatggatatgcaaagactttaggagaaagagaggcttggaggatagctgaagagaaaggattagacttggttgttgtgaatccttcgtttgtggttggtccattgcttggaccaaaaccaacaagtactctgcttatgattcttgctattgctaaaggtcttgctggagagtatccaaatttcactgtcgggtttgtgcatatagatgatgttgttgctgcacatgtattggctatggaagagcctaaagcatcagggagaatcatatgttcgagttctgttgctcattggtctgagatcattgagttgatgagaaataagtatcctaattacccatttgagaacaagtgtagtaacaaagaaggagacaatagtccacatagtatggatacaaggaagatacatgagttgggatttggatccttcaagtcactacctgagatgtttgatgattgcatcatcagttttcagaagaagggtctgctctaaatatatacattttcatacatcgaattgtcgattaatggatcgatttcaatgtattggactcttgccaagtagtaactggtttttaatttctgcctctagtataaattcaataagctggtgttg

SEQ ID NO: 83238 - protein, 334 aa, Arabidopsis thaliana; identical to SEQ ID NO: 41200
  peptide (1)..(334): Ceres Seq. ID no. 12669346

SEQ ID NO: 83239 - protein, 321 aa, Arabidopsis thaliana; identical to SEQ ID NO: 41201
  peptide (1)..(321): Ceres Seq. ID no. 12669347

SEQ ID NO: 83240 - protein, 214 aa, Arabidopsis thaliana; identical to SEQ ID NO: 41202
  peptide (1)..(214): Ceres Seq. ID no. 12669348

SEQ ID NO: 83241 - DNA, 1005 bp, Arabidopsis thaliana
  misc_feature (1)..(1005): Ceres Seq. ID no. 12669387
  misc_feature (1)..(1005): Ortholog of  Ceres SEQ ID NO 13502952 as cited in SEQ ID NO 62271
  misc_feature (1)..(1005): Ortholog of  Ceres SEQ ID NO 13502973 as cited in SEQ ID NO 68052
  misc_feature (1)..(1005): Ortholog of  Ceres SEQ ID NO 13596000 as cited in SEQ ID NO 68188
atggtgtctgtacgatctgtgttcgtggctctaaccattctttccatggatctaaggatctctcaagccagacctcatgtcactttgaacgagcaatcaattgttgattaccaccaacaatggatgactcaattctctcgagtttacaaggatgaatccgagaaagaaatgaggcttaaagtgttcaagaaaaacttgaaattcattgagaacttcaataatatggggaaccaaagctatacacttggtgtcaacgagttcacggattggaaaacagaagagttccttgcgacccacaccggcctccgcgttaacgtaacttcactatccgaactatttaataaaacgaagccatcaaggaattggaacatgagtgatatcgacatggaagacgaaagcaaagactggagagacgaaggagctgtaacacctgttaaatatcaaggagcatgtcgtttgacaaagatatctggcaaaaatctattaacactgtccgaacaacagctaatagattgcgacatagagaaaaacggtggttgcaatggcggagaatttgaagaagctttcaagtacataataaaaaacggaggcgtttctttagaaacggaatacccttaccaagtgaaaaaggagagttgtcgtgccaacgccagacgcgccccacatacacagattagagggtttcaaatggttccaagccacaacgagcgtgcgttgctcgaggccgtaagaagacagcccgtctcggtgttgattgacgcaagagcggacagtttcggtcattacaaagggggagtgtacgctgggctggactgtgggacagacgtgaatcatgcagtgacgatcgttgggtacggaacgatgagtgggctcaactactgggttcttaagaactcttggggtgagagttggggagaaaatggttacatgaggatccgtagagatgtggagtggcctcaaggaatgtgtggtatagctcaggttgctgcttatccggttttttaa

SEQ ID NO: 83242 - protein, 334 aa, Arabidopsis thaliana
  peptide (1)..(334): Ceres Seq. ID no. 12669388
MVSVRSVFVALTILSMDLRISQARPHVTLNEQSIVDYHQQWMTQFSRVYKDESEKEMRLKVFKKNLKFIENFNNMGNQSYTLGVNEFTDWKTEEFLATHTGLRVNVTSLSELFNKTKPSRNWNMSDIDMEDESKDWRDEGAVTPVKYQGACRLTKISGKNLLTLSEQQLIDCDIEKNGGCNGGEFEEAFKYIIKNGGVSLETEYPYQVKKESCRANARRAPHTQIRGFQMVPSHNERALLEAVRRQPVSVLIDARADSFGHYKGGVYAGLDCGTDVNHAVTIVGYGTMSGLNYWVLKNSWGESWGENGYMRIRRDVEWPQGMCGIAQVAAYPVF

SEQ ID NO: 83243 - protein, 319 aa, Arabidopsis thaliana
  peptide (1)..(319): Ceres Seq. ID no. 12669389
MDLRISQARPHVTLNEQSIVDYHQQWMTQFSRVYKDESEKEMRLKVFKKNLKFIENFNNMGNQSYTLGVNEFTDWKTEEFLATHTGLRVNVTSLSELFNKTKPSRNWNMSDIDMEDESKDWRDEGAVTPVKYQGACRLTKISGKNLLTLSEQQLIDCDIEKNGGCNGGEFEEAFKYIIKNGGVSLETEYPYQVKKESCRANARRAPHTQIRGFQMVPSHNERALLEAVRRQPVSVLIDARADSFGHYKGGVYAGLDCGTDVNHAVTIVGYGTMSGLNYWVLKNSWGESWGENGYMRIRRDVEWPQGMCGIAQVAAYPVF

SEQ ID NO: 83244 - protein, 293 aa, Arabidopsis thaliana
  peptide (1)..(293): Ceres Seq. ID no. 12669390
MTQFSRVYKDESEKEMRLKVFKKNLKFIENFNNMGNQSYTLGVNEFTDWKTEEFLATHTGLRVNVTSLSELFNKTKPSRNWNMSDIDMEDESKDWRDEGAVTPVKYQGACRLTKISGKNLLTLSEQQLIDCDIEKNGGCNGGEFEEAFKYIIKNGGVSLETEYPYQVKKESCRANARRAPHTQIRGFQMVPSHNERALLEAVRRQPVSVLIDARADSFGHYKGGVYAGLDCGTDVNHAVTIVGYGTMSGLNYWVLKNSWGESWGENGYMRIRRDVEWPQGMCGIAQVAAYPVF

SEQ ID NO: 83245 - DNA, 1563 bp, Arabidopsis thaliana
  misc_feature (1)..(1563): Ceres Seq. ID no. 12669396
  misc_feature (1)..(1563): Ortholog of  Ceres SEQ ID NO 13599900 as cited in SEQ ID NO 531
  misc_feature (1)..(1563): Ortholog of  Ceres SEQ ID NO 13659971 as cited in SEQ ID NO 67565
  misc_feature (1)..(1563): Ortholog of  Ceres SEQ ID NO 13500385 as cited in SEQ ID NO 67583
atggctcaagccttggctcaaccaccactggtggtcaccaccgtcgtcccagacccgccgccgccgccaccaccaccgcacccaaagccgtatgctctacgatacatggcggatcttcttggccggattggtataatggatacagacaaagatggtaacatcagcccacagagtccgaggagtcctaggagcccaagaaacaacattctcatggggaagtacgagcttgggaagcttctcggccacggaacctttgcaaaggtttatttagctcaaaacatcaaatctggagataaagtcgccattaaagtcatcgacaaggagaagattatgaagagtggtttggttgctcacatcaaacgggaaatctctatcctccgccgtgtccgtcacccttacatcgttcatctattcgaggttatggcgacgaagtccaagatttactttgtgatggagtacgttggaggcggcgagttgttcaacacggttgctaaaggtcgattgcccgaggaaactgctcggagatatttccagcagctgatctcctctgtttcgttctgccatggccgcggtgtttaccaccgtgaccttaaaccagagaatctgcttttagacaacaaagggaaccttaaagtatctgactttggtctcagcgcggtggcagagcagcttcgtcaagacgggctctgccacacgttttgcgggactccagcgtatattgcacccgaggttttgactagaaaagggtacgatgcagcgaaagccgatgtttggtcatgtggagtgatcttattcgtgttgatggctggtcacattccgttctacgacaagaacataatggttatgtacaagaagatttacaaaggggaatttaggtgtcctcgttggttttcatcggatcttgttcggttattgactcggcttcttgatacgaatccggatactcggattacaatacccgagatcatgaagaacagatggttcaagaaaggattcaaacatgttaaattctacatcgaagatgataaactgtgtagggaagatgaagatgaggaggaagaggcatcatcatcaggccgctcttcgacagtttcagagagcgatgcagagttcgatgtaaaacggatgggaataggttcaatgccaagaccctcgagcttaaacgcgtttgacattatatctttctcttcagggtttgatctgtctggtttgtttgaggaagaaggaggagaagggacgaggtttgtgtcaggtgctcctgtttcaaagatcatatcgaagctggaagagattgcgaaaatcgtgagctttactgtgaggaagaaagaatggagtttgagattagaaggttgtagagaaggagcaaaaggaccgttgacaattgcggctgagatatttgagctgactccatctctagtggtggtggaggtgaagaagaaaggaggagacagagaagagtatgaagagttttgcaacaaggaactcagaccagagctggagaaactaatccatgaagaagttgtagtagaagaagcattgtatttgccatctgatactgaatag

SEQ ID NO: 83246 - protein, 520 aa, Arabidopsis thaliana
  peptide (1)..(520): Ceres Seq. ID no. 12669397
MAQALAQPPLVVTTVVPDPPPPPPPPHPKPYALRYMADLLGRIGIMDTDKDGNISPQSPRSPRSPRNNILMGKYELGKLLGHGTFAKVYLAQNIKSGDKVAIKVIDKEKIMKSGLVAHIKREISILRRVRHPYIVHLFEVMATKSKIYFVMEYVGGGELFNTVAKGRLPEETARRYFQQLISSVSFCHGRGVYHRDLKPENLLLDNKGNLKVSDFGLSAVAEQLRQDGLCHTFCGTPAYIAPEVLTRKGYDAAKADVWSCGVILFVLMAGHIPFYDKNIMVMYKKIYKGEFRCPRWFSSDLVRLLTRLLDTNPDTRITIPEIMKNRWFKKGFKHVKFYIEDDKLCREDEDEEEEASSSGRSSTVSESDAEFDVKRMGIGSMPRPSSLNAFDIISFSSGFDLSGLFEEEGGEGTRFVSGAPVSKIISKLEEIAKIVSFTVRKKEWSLRLEGCREGAKGPLTIAAEIFELTPSLVVVEVKKKGGDREEYEEFCNKELRPELEKLIHEEVVVEEALYLPSDTE

SEQ ID NO: 83247 - protein, 485 aa, Arabidopsis thaliana
  peptide (1)..(485): Ceres Seq. ID no. 12669398
MADLLGRIGIMDTDKDGNISPQSPRSPRSPRNNILMGKYELGKLLGHGTFAKVYLAQNIKSGDKVAIKVIDKEKIMKSGLVAHIKREISILRRVRHPYIVHLFEVMATKSKIYFVMEYVGGGELFNTVAKGRLPEETARRYFQQLISSVSFCHGRGVYHRDLKPENLLLDNKGNLKVSDFGLSAVAEQLRQDGLCHTFCGTPAYIAPEVLTRKGYDAAKADVWSCGVILFVLMAGHIPFYDKNIMVMYKKIYKGEFRCPRWFSSDLVRLLTRLLDTNPDTRITIPEIMKNRWFKKGFKHVKFYIEDDKLCREDEDEEEEASSSGRSSTVSESDAEFDVKRMGIGSMPRPSSLNAFDIISFSSGFDLSGLFEEEGGEGTRFVSGAPVSKIISKLEEIAKIVSFTVRKKEWSLRLEGCREGAKGPLTIAAEIFELTPSLVVVEVKKKGGDREEYEEFCNKELRPELEKLIHEEVVVEEALYLPSDTE

SEQ ID NO: 83248 - protein, 475 aa, Arabidopsis thaliana
  peptide (1)..(475): Ceres Seq. ID no. 12669399
MDTDKDGNISPQSPRSPRSPRNNILMGKYELGKLLGHGTFAKVYLAQNIKSGDKVAIKVIDKEKIMKSGLVAHIKREISILRRVRHPYIVHLFEVMATKSKIYFVMEYVGGGELFNTVAKGRLPEETARRYFQQLISSVSFCHGRGVYHRDLKPENLLLDNKGNLKVSDFGLSAVAEQLRQDGLCHTFCGTPAYIAPEVLTRKGYDAAKADVWSCGVILFVLMAGHIPFYDKNIMVMYKKIYKGEFRCPRWFSSDLVRLLTRLLDTNPDTRITIPEIMKNRWFKKGFKHVKFYIEDDKLCREDEDEEEEASSSGRSSTVSESDAEFDVKRMGIGSMPRPSSLNAFDIISFSSGFDLSGLFEEEGGEGTRFVSGAPVSKIISKLEEIAKIVSFTVRKKEWSLRLEGCREGAKGPLTIAAEIFELTPSLVVVEVKKKGGDREEYEEFCNKELRPELEKLIHEEVVVEEALYLPSDTE

SEQ ID NO: 83249 - DNA, 1815 bp, Arabidopsis thaliana
  misc_feature (1)..(1815): Ceres Seq. ID no. 12669408
  misc_feature (1)..(1815): Ortholog of  Ceres SEQ ID NO 14316184 as cited in SEQ ID NO 54517
  misc_feature (1)..(1815): Ortholog of  Ceres SEQ ID NO 15226529 as cited in SEQ ID NO 55005
  misc_feature (1)..(1815): Ortholog of  Ceres SEQ ID NO 12616225 as cited in SEQ ID NO 68930
gctgtttcagactcaccaaaaaaacttctccttgtcagaaaaaaaaaaaaaaactactgaatctctctgtttttttttcctttcacaacatctcaatggagacattgaagaagaatccatcagtgagaagaaaaagcaagttagcgagaacattccagaaagtatgtaacctaagaacaacgtcgacgaaggtctcctccaacaacggaatcggaatctgtatgttaaagtcccaaaatccaaatttcgacgacgaagacgacgacggagactctgttttcgatttaaagagtacttccagtagcagaagcggagagatcaaagtgcgagagcgtaatagagctgttttacaagctgtggttgcgaagatcttcgctagtacgacttccattaaagctgcttacgcagagcttcagatggcgcaacgtccgtacgataacgacgctatacaagcggcggatacggcggtggtcgaagagcttagagctttatcggagcttaaacggagttttctcaggaaggaattgaatctgtctccgcaagttgcgattatgttagctgagatccaggagcaacagagtttgatgaggacttatgaaatcacgattaagaaactcgagtttgaagttacggagaagcaattgaagatcgatgaattgaagatgagttttgaagagagtttggttgtgaataaatcgttggagaagaaactctcagcgagtggatcggtctctgtgtttgataatattgaaattcgaaatttgaatttgagtagttttgttcaggttttaggttttacgttgagatctgtgagaagcttcgtgaaattgattgtgaaggagatggaatcagcgagctgggatctagacgccgccgcttccgccgctgtttcggtgaacgttaaaaacgcttccaccgttttcgcgaggccgagtcaccgttgtttcgcgtttgaatcgtttgtttgtgggaaaatgtttgagaattttggagctcctgatttctcgagacgtgaggaattcgaaaagttgagatccgttgacccgattcagtacttgacccggaacccgggttcgtcttttgccaggttcgtggttcataagtacttgagcgttgtacatgcgaagatggagtgttctttcttcgggaacttgaaccagaggaagctggttaactcgggtgggtttccggactcgggtttcttcgcgacgttttgtgaaatggcaaaacggatctggcttttacactgcttagcgttttcattaagcggaaacgtcacggtgtttcagctcaaacgaggttgtagattctctcaagtatatatggagagtgtgaaatccggcgatgagtcattattctccggtgataattcagatattcgggtcgggttcacggttgttcccgggtttaaaatcggcgagaatgtgatacaaagccaggtttacttgactccggttaacggttttacttcatgaataggccaatccaaagagaacgcggtgggttgtgttcacgcgccggggaagaaaaaagagaggcggcgcgtgaaaaggaaatggtggggacatgattccttgggggcagcaagactggcaagtgggacatgttttaagaatgtgacggagacagaaaatggcgcgagggacaatcattatgaaaaaacagtttagattagtgatcattttttgtttttaaaatttttagattatacagcttaaagtatgaagggcatagaagaaaaataatattctgtgtttttctataacgtattacgtaaaagtttttgttatatacctgatattttataatgtttgt

SEQ ID NO: 83250 - protein, 490 aa, Arabidopsis thaliana
  peptide (1)..(490): Ceres Seq. ID no. 12669409
CFRLTKKTSPCQKKKKKLLNLSVFFSFHNISMETLKKNPSVRRKSKLARTFQKVCNLRTTSTKVSSNNGIGICMLKSQNPNFDDEDDDGDSVFDLKSTSSSRSGEIKVRERNRAVLQAVVAKIFASTTSIKAAYAELQMAQRPYDNDAIQAADTAVVEELRALSELKRSFLRKELNLSPQVAIMLAEIQEQQSLMRTYEITIKKLEFEVTEKQLKIDELKMSFEESLVVNKSLEKKLSASGSVSVFDNIEIRNLNLSSFVQVLGFTLRSVRSFVKLIVKEMESASWDLDAAASAAVSVNVKNASTVFARPSHRCFAFESFVCGKMFENFGAPDFSRREEFEKLRSVDPIQYLTRNPGSSFARFVVHKYLSVVHAKMECSFFGNLNQRKLVNSGGFPDSGFFATFCEMAKRIWLLHCLAFSLSGNVTVFQLKRGCRFSQVYMESVKSGDESLFSGDNSDIRVGFTVVPGFKIGENVIQSQVYLTPVNGFTS

SEQ ID NO: 83251 - protein, 459 aa, Arabidopsis thaliana
  peptide (1)..(459): Ceres Seq. ID no. 12669410
METLKKNPSVRRKSKLARTFQKVCNLRTTSTKVSSNNGIGICMLKSQNPNFDDEDDDGDSVFDLKSTSSSRSGEIKVRERNRAVLQAVVAKIFASTTSIKAAYAELQMAQRPYDNDAIQAADTAVVEELRALSELKRSFLRKELNLSPQVAIMLAEIQEQQSLMRTYEITIKKLEFEVTEKQLKIDELKMSFEESLVVNKSLEKKLSASGSVSVFDNIEIRNLNLSSFVQVLGFTLRSVRSFVKLIVKEMESASWDLDAAASAAVSVNVKNASTVFARPSHRCFAFESFVCGKMFENFGAPDFSRREEFEKLRSVDPIQYLTRNPGSSFARFVVHKYLSVVHAKMECSFFGNLNQRKLVNSGGFPDSGFFATFCEMAKRIWLLHCLAFSLSGNVTVFQLKRGCRFSQVYMESVKSGDESLFSGDNSDIRVGFTVVPGFKIGENVIQSQVYLTPVNGFTS

SEQ ID NO: 83252 - protein, 417 aa, Arabidopsis thaliana
  peptide (1)..(417): Ceres Seq. ID no. 12669411
MLKSQNPNFDDEDDDGDSVFDLKSTSSSRSGEIKVRERNRAVLQAVVAKIFASTTSIKAAYAELQMAQRPYDNDAIQAADTAVVEELRALSELKRSFLRKELNLSPQVAIMLAEIQEQQSLMRTYEITIKKLEFEVTEKQLKIDELKMSFEESLVVNKSLEKKLSASGSVSVFDNIEIRNLNLSSFVQVLGFTLRSVRSFVKLIVKEMESASWDLDAAASAAVSVNVKNASTVFARPSHRCFAFESFVCGKMFENFGAPDFSRREEFEKLRSVDPIQYLTRNPGSSFARFVVHKYLSVVHAKMECSFFGNLNQRKLVNSGGFPDSGFFATFCEMAKRIWLLHCLAFSLSGNVTVFQLKRGCRFSQVYMESVKSGDESLFSGDNSDIRVGFTVVPGFKIGENVIQSQVYLTPVNGFTS

SEQ ID NO: 83253 - DNA, 774 bp, Arabidopsis thaliana
  misc_feature (1)..(774): Ceres Seq. ID no. 12669439
  misc_feature (1)..(774): Ortholog of  Ceres SEQ ID NO 15225415 as cited in SEQ ID NO 0
aaacataagaacaaacttcatcttcttcattcttctttcttctctttttgtcccgctttcgtagtttttcaaaaggcgaaatggcgggtgagcaaatcaaacctgttgcctctggacttctagttttgaacttctgcatgtatgtgatcgttctaggcattggaggatgggccatgaaccgagccatcgaccatggattcgaagtcggccctaatttagagcttccagcacatttctccccaatttatttcccgatgggaaacgcagccacaggattctttgtgatattcgcgttgctagcgggagtagttggagcagcttccacaatctcaggccttagccacattcgttcgtggaccgtgggaagcttaccagcagcagccacagctgcaaccattgcctggaccctcacagtccttgccatgggtttcgcttggaaagaaatcgagctacaagggagaaatgcaaaactgagaaccatggaggcgttcttgatcatactctcagtcacccagcttatttacatcgcagcagttcatggcgtgaggagaccttaaggaatcattcatgggcgtcggatttcttttcttcctattgtggcaatcatccgaaactcgggattgtgtgtgtgagcgtttgtatttgtgtgagtgtgctttattttcttcataggaagcttaagataaattcatgcattctttatgtacaaaaggattagatcttgttttgtgtgttgtcactttgtgttcatggaataaaatcgaactttgaggc

SEQ ID NO: 83254 - protein, 158 aa, Arabidopsis thaliana
  peptide (1)..(158): Ceres Seq. ID no. 12669440
MAGEQIKPVASGLLVLNFCMYVIVLGIGGWAMNRAIDHGFEVGPNLELPAHFSPIYFPMGNAATGFFVIFALLAGVVGAASTISGLSHIRSWTVGSLPAAATAATIAWTLTVLAMGFAWKEIELQGRNAKLRTMEAFLIILSVTQLIYIAAVHGVRRP

SEQ ID NO: 83255 - protein, 139 aa, Arabidopsis thaliana
  peptide (1)..(139): Ceres Seq. ID no. 12669441
MYVIVLGIGGWAMNRAIDHGFEVGPNLELPAHFSPIYFPMGNAATGFFVIFALLAGVVGAASTISGLSHIRSWTVGSLPAAATAATIAWTLTVLAMGFAWKEIELQGRNAKLRTMEAFLIILSVTQLIYIAAVHGVRRP

SEQ ID NO: 83256 - protein, 127 aa, Arabidopsis thaliana
  peptide (1)..(127): Ceres Seq. ID no. 12669442
MNRAIDHGFEVGPNLELPAHFSPIYFPMGNAATGFFVIFALLAGVVGAASTISGLSHIRSWTVGSLPAAATAATIAWTLTVLAMGFAWKEIELQGRNAKLRTMEAFLIILSVTQLIYIAAVHGVRRP

SEQ ID NO: 83257 - DNA, 723 bp, Arabidopsis thaliana
  misc_feature (1)..(723): Ceres Seq. ID no. 12669443
  misc_feature (1)..(723): Ortholog of  Ceres SEQ ID NO 13638917 as cited in SEQ ID NO 56018
  misc_feature (1)..(723): Ortholog of  Ceres SEQ ID NO 13663116 as cited in SEQ ID NO 60731
  misc_feature (1)..(723): Ortholog of  Ceres SEQ ID NO 14316029 as cited in SEQ ID NO 67234
atggtggttacggattctccagtttcggggataatggctgatcagaacatcgatcctaacaccacgacgagccctagtcctaaagagaagcatgtttctgcgattaaggctatctccggcgacgagaaagctccgtcgaaggagaaaaagaactacgcgtcgaagaaatcaactaccgtaatccagaaatcgcactgtttccagaattcttggacattttggttcgataatccttcctccaaatcgaatcaagtcatatggggaagctctttgagatccttgtatacattcggtactatcgaagagttctggagtctctacaataacattcatcctccaaccaagtgggtttcgggggcggatctttactgcttcaaagataagattgaaccaaaatgggaagatcctatctgtgctaatggaggaaaatggagtatgatgttccctaaagctacactagaatgcaattggcttaacacgttacttgcgttggttggtgagcaatttgaccaaggagatgagatctgtggagcagttttgaacttcagagcgagaggggacaggatctctctatggacaaagaacgctgcaaatgaggaggctcagctaagcattgggaagcagtggaaggaacttcttggctacaatgagacaatcggatttatagttcatgaggatgcaaagactcttgatcgtgatgctaaacgtcgatatactgtatga

SEQ ID NO: 83258 - protein, 240 aa, Arabidopsis thaliana
  peptide (1)..(240): Ceres Seq. ID no. 12669444
MVVTDSPVSGIMADQNIDPNTTTSPSPKEKHVSAIKAISGDEKAPSKEKKNYASKKSTTVIQKSHCFQNSWTFWFDNPSSKSNQVIWGSSLRSLYTFGTIEEFWSLYNNIHPPTKWVSGADLYCFKDKIEPKWEDPICANGGKWSMMFPKATLECNWLNTLLALVGEQFDQGDEICGAVLNFRARGDRISLWTKNAANEEAQLSIGKQWKELLGYNETIGFIVHEDAKTLDRDAKRRYTV

SEQ ID NO: 83259 - protein, 229 aa, Arabidopsis thaliana
  peptide (1)..(229): Ceres Seq. ID no. 12669445
MADQNIDPNTTTSPSPKEKHVSAIKAISGDEKAPSKEKKNYASKKSTTVIQKSHCFQNSWTFWFDNPSSKSNQVIWGSSLRSLYTFGTIEEFWSLYNNIHPPTKWVSGADLYCFKDKIEPKWEDPICANGGKWSMMFPKATLECNWLNTLLALVGEQFDQGDEICGAVLNFRARGDRISLWTKNAANEEAQLSIGKQWKELLGYNETIGFIVHEDAKTLDRDAKRRYTV

SEQ ID NO: 83260 - DNA, 423 bp, Arabidopsis thaliana
  misc_feature (1)..(423): Ceres Seq. ID no. 12669446
  misc_feature (1)..(423): Ortholog of  Ceres SEQ ID NO 13638986 as cited in SEQ ID NO 56098
atgtcggaagaattcgacgaatctgagatcattttctctgacaattactttccgattcgccggcgagaagacggtaacgagaaagagaataaccgtccggtggatttccgggaaaattctgagagagtgtggaacaagtcatctagacggagtaaaacgacgccgttgccttcagcggtgacggcgttttctagttcgcttccggttaacataccgatgaggaggtattcgacggaggaggaatattccgatgacgacggaggaaggaaaatgattccgccgcatttgatagttggacggaggatggaaggaggtcaaatggcgttttccgtttgtacaggtaacggaagaactcttaaaggacgagatctgagccgggttcgtaattcggttctcaaattaaccgggtttttggaagcttga

SEQ ID NO: 83261 - protein, 140 aa, Arabidopsis thaliana
  peptide (1)..(140): Ceres Seq. ID no. 12669447
MSEEFDESEIIFSDNYFPIRRREDGNEKENNRPVDFRENSERVWNKSSRRSKTTPLPSAVTAFSSSLPVNIPMRRYSTEEEYSDDDGGRKMIPPHLIVGRRMEGGQMAFSVCTGNGRTLKGRDLSRVRNSVLKLTGFLEA

SEQ ID NO: 83262 - DNA, 1384 bp, Arabidopsis thaliana
  misc_feature (1)..(1384): Ceres Seq. ID no. 12669456
  misc_feature (1)..(1384): Ortholog of  Ceres SEQ ID NO 13584744 as cited in SEQ ID NO 69137
atgtatatatatattttcacttttagtgtctcatttgtagtggagaaaacaaaacatcacattaagtatcccctaattttgggggcttcgggtgccttggtaacaattgttctattggctgtgggaatatatgctcggggaatatacagaagagacaataataggagagaacgagatttgagagcccagggtctacaaactgtttgcttttcttggaggcaactgcaaacagcaacaaacaattttgatcaggccaacaaacttggagaaggaggcttcggatccgtattcaaaggagagctgtcggatggaactatcatagcagtcaagcagctttcttccaagtcaagtcaaggaaaccgcgagtttgtgaatgagataggcatgatttcaggtctgaaccatcctaaccttgtcaagctttatggatgctgtgtcgagagagatcaattgctgctcgtgtatgagtacatggaaaataactcccttgctcttgctttgtttggacaaaactccttgaaattggactgggcagcaagacaaaaaatatgtgttggaatcgcaagagggcttgaattcctccacgatggatcagcgatgagaatggttcaccgtgacataaaaaccactaatgtgcttctagacaccgaccttaatgcaaaaatatctgactttggattagctaggcttcatgaagcagaacacactcacattagcaccaaggttgcaggaaccatcggatatatggctccagaatatgcattatggggtcaactgacagagaaagcagatgtgtacagcttcggagttgtggcaatggaaattgttagtggaaagagtaataccaaacagcagggaaatgctgatagcgtctcgcttatcaattgggcgctgacgctgcaacagacaggggacatactggagattgtagatcgaatgcttgagggtgagttcaatagaagtgaagccgtgaggatgatcaaagttgctctcgtttgcacaaactcatctccttccttaaggccaacaatgtcagaggctgtgaagatgctagagggagagatcgaaataacacaggttatgtcagatcctggtatatatgggcacgactggagcatctcaaagctgagggacattgatacgcatagtagctcgagcacgtctggtgtgaccgatcagacgacaacaacaatgaaatcctctgtttctggttgtgatctctatccgttataccctgaatccatgatcttaaactccacagtagagaattcttcctcgtcactgtaatatcaaaagctatgatacattgcctacttaatgagaggctagtgaggttatccgaaagttaactacgtagttatatcattaaagttgtctggaacct

SEQ ID NO: 83263 - protein, 428 aa, Arabidopsis thaliana
  peptide (1)..(428): Ceres Seq. ID no. 12669457
MYIYIFTFSVSFVVEKTKHHIKYPLILGASGALVTIVLLAVGIYARGIYRRDNNRRERDLRAQGLQTVCFSWRQLQTATNNFDQANKLGEGGFGSVFKGELSDGTIIAVKQLSSKSSQGNREFVNEIGMISGLNHPNLVKLYGCCVERDQLLLVYEYMENNSLALALFGQNSLKLDWAARQKICVGIARGLEFLHDGSAMRMVHRDIKTTNVLLDTDLNAKISDFGLARLHEAEHTHISTKVAGTIGYMAPEYALWGQLTEKADVYSFGVVAMEIVSGKSNTKQQGNADSVSLINWALTLQQTGDILEIVDRMLEGEFNRSEAVRMIKVALVCTNSSPSLRPTMSEAVKMLEGEIEITQVMSDPGIYGHDWSISKLRDIDTHSSSSTSGVTDQTTTTMKSSVSGCDLYPLYPESMILNSTVENSSSSL

SEQ ID NO: 83264 - protein, 300 aa, Arabidopsis thaliana
  peptide (1)..(300): Ceres Seq. ID no. 12669458
MISGLNHPNLVKLYGCCVERDQLLLVYEYMENNSLALALFGQNSLKLDWAARQKICVGIARGLEFLHDGSAMRMVHRDIKTTNVLLDTDLNAKISDFGLARLHEAEHTHISTKVAGTIGYMAPEYALWGQLTEKADVYSFGVVAMEIVSGKSNTKQQGNADSVSLINWALTLQQTGDILEIVDRMLEGEFNRSEAVRMIKVALVCTNSSPSLRPTMSEAVKMLEGEIEITQVMSDPGIYGHDWSISKLRDIDTHSSSSTSGVTDQTTTTMKSSVSGCDLYPLYPESMILNSTVENSSSSL

SEQ ID NO: 83265 - protein, 271 aa, Arabidopsis thaliana
  peptide (1)..(271): Ceres Seq. ID no. 12669459
MENNSLALALFGQNSLKLDWAARQKICVGIARGLEFLHDGSAMRMVHRDIKTTNVLLDTDLNAKISDFGLARLHEAEHTHISTKVAGTIGYMAPEYALWGQLTEKADVYSFGVVAMEIVSGKSNTKQQGNADSVSLINWALTLQQTGDILEIVDRMLEGEFNRSEAVRMIKVALVCTNSSPSLRPTMSEAVKMLEGEIEITQVMSDPGIYGHDWSISKLRDIDTHSSSSTSGVTDQTTTTMKSSVSGCDLYPLYPESMILNSTVENSSSSL

SEQ ID NO: 83266 - DNA, 3646 bp, Arabidopsis thaliana
  misc_feature (1)..(3646): Ceres Seq. ID no. 12669464
  misc_feature (1)..(3646): Ortholog of  Ceres SEQ ID NO 13655640 as cited in SEQ ID NO 63844
gggtttacagattctatgcaaagtttgctcctttttctcattttatttgtaaagtttccttttttgggttttcattatctgttggaaatgggatttcatgattggtagccgcaacaattccggtgacgttggggtttttcatttttttaattgaagttttttgagtccaaaatctgcaggtgttaattgggtgtgattaggtccattagggtttattaaatcattttttgattgattatggtttgaatccccttgaccattgagttaccttgagaaagaacttgtcatatttttgtattaaactcttcattaggccttctttcacatgatgatgatgatgatgaattgatgatcctataaactgttgaagcaatcattcatattttgttgtggttgatgaagagttctagataaattgtttatcctgctttagtttgatgattgttaaggccaagaagagtgtaattcttgttgttgctcaagtaattgaactgatattttatgatgtttgcttctgtgtctgttccttagtcgatgctctgcagcaaatcgctaccacattgggctcgaaattctggaaattcgatgctgaaaattgtaagattgaaatggtggggttaactgaaactcctcctccaacagctaagcaagaaatagaatgtgaatgcagtcccactaacgacactgattgtcatgttgtcaaatttgcattcaaggaccataatcttccaggaactcttcctcaaatagtcaagcttccctaccttcgggagatagacttggcctacaactacatcaatgggaccttacctcgtgaatgggcttcttcaaatttaacttttatttctcttcttgtgaatcggttgtctggagaaattccgaaggagtttggaaactcttctctaacatacttggatctcgagtcaaatgcgttttctggaactattcctcaggagcttgggaacttagtccacttgaaaaaactgttgctttcctctaacaaattgaccggaactttgccagcttcactagctagactacagaatatgacagatttcaggattaacgatcttcaactcagtggaacgatacctagttacatacaaaattggaagcaactcgagagacttgaaatgattgcatctggtctcactggtccaatcccatcggtcatctcagttctgagcaatcttgttaatctgaggatcagtgatatacgtggaccagtccaaccattcccttcgttgaagaacgtgacaggtctaactaaaattatattgaagaactgtaacatttctggacaaattcctacttatctttcacatttgaaggagttggagacactggatttgagttttaacaagttggttgggggaattccgtcgcttgcacaagcagaaaatttacggcttataattttggctggaaatatgctcgagggagatgctccagatgaattactaagagatggaatcacagaagatctttcatataacaatctcaagtggcagagtcctgaaagtcgtgcttgtcgcccaaatatgaatctgaatctaaacttgtttcagagcacttcgacaaaaaaatcgagcaaatttctgccgtgtatcaaagatttcaaatgtcctcgatattctagctgcttgcatgtgaactgcggtggaagcgatatgtatgttaaggagaaaaaaacaaaagaattatatgaaggagatggaaatgttgaaggtggtgctgctaagtattttttgaagcctgacgctaattggggatttagcagcacaggggacttcatggacgataacaatttccaaaacactagattcaccatgtttgtcccggcatctaaccagtctgatctctacaaatcggcacgaattgctccagtatctctaacttacttccatgcctgcttggaaaatggaaattacactataaatctagacttcgctgagatacggttcaccaatgatgaaaactataaccggcttggaaggcgtctgtttgacatttacattcaggagaaattagtggcaaaggactttaacatcatggatgaagcaaagggagctcaaacacctataatcaaaccacttactgcctatgtgacaaaccactttttaaccatccggttgagttgggccggtaaaggaactaccaggattcccactagaggggtttatggtcctatcatatcggctatttccatagtttcagattccaagccgtgcgaacgtccgaaaactggaatgagccctggagcatatattgcaattggaattggagcaccatgtcttattatctttatactgggatttctgtggatatgtggctgcctcccaagatgtggtcgacaacgaaaagatccgtatgaagaagagttgccttctggaacttttacattgaggcaaatcaaattcgctacggatgacttcaatccaactaacaagattggagaaggtggtttcggtgctgtctttaagggtgtgttagcagatggaagagttgtagcagttaagcaactctcatctaaatcgagacaagggaaccgagaatttctaaacgagataggcgcaatttcttgtcttcaacatccaaatctcgtcaagcttcatggtttctgcgtcgagcgggctcagctattactggcgtacgaatacatggaaaataacagtttatctagcgcgttattcagtccaaagcataaacagataccaatggactggcctactaggtttaagatttgctgcgggatcgcaaagggtctcgcgtttctccatgaggaatcaccgttgaagtttgtacatagagacatcaaggccacaaatattttattggacaaggacttaactcccaagatatctgatttcggattggctaggcttgacgaagaggagaaaacacacatcagcaccaaagttgctgggactataggatatatggcaccagaatacgcactgtggggctacctaactttcaaagcagatgtctacagcttcggtgttttggttctagaaatcgtcgccggcataaccaacagtaatttcatgggggcaggagattccgtttgcctcttagaatttgctaacgagtgcgtagaatcggggcacttgatgcaagtagtggatgagaggttgaggcctgaagtggatagaaaagaagcagaggcggttataaaagtggctctcgtgtgctcgagcgcttctccaacagatcgtcctttaatgtcagaggtcgttgctatgctagaaggtctatatccagtgccagaatcaacaccaggagtaagcaggaacgcaggggatataaggtttaaggcatttaaagatttaaggagaggcatggagaacaatagtaagacgcagtgttctgttaaaagctatccgtcttcttcttcgacttcttctggggcaggacaagcagttcaagaaagaaagaaagaagagtcaaggccttgaagaggttttgaatccttccctctcttttttttttttttgtaaaatgtctgtctttagtaaaatgtttatgagtttattctgtgattagtcatttactgtaattccccatatctgtatttaggttctgttagttggggattgaatgttgtgaaaactcaaaactcaaatgatatataatcagtgatctt

SEQ ID NO: 83267 - protein, 1006 aa, Arabidopsis thaliana
  peptide (1)..(1006): Ceres Seq. ID no. 12669465
MIVKAKKSVILVVAQVIELIFYDVCFCVCSLVDALQQIATTLGSKFWKFDAENCKIEMVGLTETPPPTAKQEIECECSPTNDTDCHVVKFAFKDHNLPGTLPQIVKLPYLREIDLAYNYINGTLPREWASSNLTFISLLVNRLSGEIPKEFGNSSLTYLDLESNAFSGTIPQELGNLVHLKKLLLSSNKLTGTLPASLARLQNMTDFRINDLQLSGTIPSYIQNWKQLERLEMIASGLTGPIPSVISVLSNLVNLRISDIRGPVQPFPSLKNVTGLTKIILKNCNISGQIPTYLSHLKELETLDLSFNKLVGGIPSLAQAENLRLIILAGNMLEGDAPDELLRDGITEDLSYNNLKWQSPESRACRPNMNLNLNLFQSTSTKKSSKFLPCIKDFKCPRYSSCLHVNCGGSDMYVKEKKTKELYEGDGNVEGGAAKYFLKPDANWGFSSTGDFMDDNNFQNTRFTMFVPASNQSDLYKSARIAPVSLTYFHACLENGNYTINLDFAEIRFTNDENYNRLGRRLFDIYIQEKLVAKDFNIMDEAKGAQTPIIKPLTAYVTNHFLTIRLSWAGKGTTRIPTRGVYGPIISAISIVSDSKPCERPKTGMSPGAYIAIGIGAPCLIIFILGFLWICGCLPRCGRQRKDPYEEELPSGTFTLRQIKFATDDFNPTNKIGEGGFGAVFKGVLADGRVVAVKQLSSKSRQGNREFLNEIGAISCLQHPNLVKLHGFCVERAQLLLAYEYMENNSLSSALFSPKHKQIPMDWPTRFKICCGIAKGLAFLHEESPLKFVHRDIKATNILLDKDLTPKISDFGLARLDEEEKTHISTKVAGTIGYMAPEYALWGYLTFKADVYSFGVLVLEIVAGITNSNFMGAGDSVCLLEFANECVESGHLMQVVDERLRPEVDRKEAEAVIKVALVCSSASPTDRPLMSEVVAMLEGLYPVPESTPGVSRNAGDIRFKAFKDLRRGMENNSKTQCSVKSYPSSSSTSSGAGQAVQERKKEESRP

SEQ ID NO: 83268 - protein, 949 aa, Arabidopsis thaliana; identical to SEQ ID NO: 49856
  peptide (1)..(949): Ceres Seq. ID no. 12669466

SEQ ID NO: 83269 - protein, 803 aa, Arabidopsis thaliana; identical to SEQ ID NO: 49857
  peptide (1)..(803): Ceres Seq. ID no. 12669467

SEQ ID NO: 83270 - DNA, 792 bp, Arabidopsis thaliana
  misc_feature (1)..(792): Ceres Seq. ID no. 12669480
  misc_feature (1)..(792): Ortholog of  Ceres SEQ ID NO 14312166 as cited in SEQ ID NO 59253
atggattcgtctcagggaatttcagctactacacaacagaagatagtgattctgaatagcaacaacgagaagctagtgggtctgcttcatgaaactggttcaacagaaattgtggtcttgtgccatggctttcgatcaaccaagaatgaccaagtcatgaaaaatgttgctgctgctatagagaaagaagggatcagcgctttccgttttgatttctctgggaacggagagagtaaaggcagtttctattttggtaactacaactatgaagctgatgatctacattctgttatccgatacttcactaacatgaaccgtgtggttcctataattattggccacagtaaaggtggtgatgtggtcctcgtctatgcctcgaagtatcaagatattcgcaatgtaatcaatctctcgggacgttatgatctgaagagaggcataggagagcgtcttggggaagattatttggaaagaataaagcaacaaggattcatcgatattaaagaaggaaacgctgggtttcgtgttaccgaggagagcttaatggaaaggttaaacactgatatgcatgaagcttgcctcaagattgacaaagaatgcagggtcttgacggttcatggctcggctgacgaggtaatacccctggaagatgccaaggagtttgcaaagatcataccgaaccacaagctggagattgtggaaggagctgatcattgttataccaaacatcaaagtcaattaattacaaatgttatggagttcataaagacagtcattgtgaagaacaactag

SEQ ID NO: 83271 - protein, 263 aa, Arabidopsis thaliana
  peptide (1)..(263): Ceres Seq. ID no. 12669481
MDSSQGISATTQQKIVILNSNNEKLVGLLHETGSTEIVVLCHGFRSTKNDQVMKNVAAAIEKEGISAFRFDFSGNGESKGSFYFGNYNYEADDLHSVIRYFTNMNRVVPIIIGHSKGGDVVLVYASKYQDIRNVINLSGRYDLKRGIGERLGEDYLERIKQQGFIDIKEGNAGFRVTEESLMERLNTDMHEACLKIDKECRVLTVHGSADEVIPLEDAKEFAKIIPNHKLEIVEGADHCYTKHQSQLITNVMEFIKTVIVKNN

SEQ ID NO: 83272 - protein, 211 aa, Arabidopsis thaliana
  peptide (1)..(211): Ceres Seq. ID no. 12669482
MKNVAAAIEKEGISAFRFDFSGNGESKGSFYFGNYNYEADDLHSVIRYFTNMNRVVPIIIGHSKGGDVVLVYASKYQDIRNVINLSGRYDLKRGIGERLGEDYLERIKQQGFIDIKEGNAGFRVTEESLMERLNTDMHEACLKIDKECRVLTVHGSADEVIPLEDAKEFAKIIPNHKLEIVEGADHCYTKHQSQLITNVMEFIKTVIVKNN

SEQ ID NO: 83273 - protein, 160 aa, Arabidopsis thaliana
  peptide (1)..(160): Ceres Seq. ID no. 12669483
MNRVVPIIIGHSKGGDVVLVYASKYQDIRNVINLSGRYDLKRGIGERLGEDYLERIKQQGFIDIKEGNAGFRVTEESLMERLNTDMHEACLKIDKECRVLTVHGSADEVIPLEDAKEFAKIIPNHKLEIVEGADHCYTKHQSQLITNVMEFIKTVIVKNN

SEQ ID NO: 83274 - DNA, 933 bp, Arabidopsis thaliana
  misc_feature (1)..(933): Ceres Seq. ID no. 12669508
  misc_feature (1)..(933): Ortholog of  Ceres SEQ ID NO 13583691 as cited in SEQ ID NO 68890
atggcgactccgtcgtcgtctttctggaacacagcttcacgagaagccatgaaaagcggcgtgttactcgcgaaactctactgctttcttcatgtaacaacaaactatctcggattcatggcttatgcttatggtccgagcatgactccgacgcttcatccttcgggaaatgtgttattagcggagagaatctcgaagcggtatcagaaaccgagtcgtggagatatagttgtgatacgatctccagaaaaccctaataagactccaattaaaagagttattggtattgaaggtgattgtataagctttgtgattgattcaaggaagagtgatgaatctcaaaccattgtggttcctaaaggacatgtctttgttcaaggtgactatactcataactcacgagactcaagaaactttggtactgtaccttacggtcttattcaaggcagagtgctttggaggcgtcgaaatggtatctacactaaactcagtgagctttccattctctgtggtgctgaagttgcgtttctcgggtattcttgctctggaaaaccatacacattcggcagtccgtccttccaagccgtggcagagcggtttctcaacggcgaggcctcgtcgtcttcttcatcatcgttgcaacgatcggtcatgaatgctcatcagcaagcgaagattcaagagctttgcaaagtatacaatagattggtggaggagataacggtggaagaagtcaaattaaagaagacggctgcattggcggagatgatgcccatgaatgaggatgcgtggtggaaagtggatccaaatgacgtgaaggatcgcgaagaggtgaagaagatgatggagaagcatcaagagctctatgagaaactgtgcgaggaagctgcttcaaggatcaagagaggacatgatgagaataataacaaatga

SEQ ID NO: 83275 - protein, 310 aa, Arabidopsis thaliana
  peptide (1)..(310): Ceres Seq. ID no. 12669509
MATPSSSFWNTASREAMKSGVLLAKLYCFLHVTTNYLGFMAYAYGPSMTPTLHPSGNVLLAERISKRYQKPSRGDIVVIRSPENPNKTPIKRVIGIEGDCISFVIDSRKSDESQTIVVPKGHVFVQGDYTHNSRDSRNFGTVPYGLIQGRVLWRRRNGIYTKLSELSILCGAEVAFLGYSCSGKPYTFGSPSFQAVAERFLNGEASSSSSSSLQRSVMNAHQQAKIQELCKVYNRLVEEITVEEVKLKKTAALAEMMPMNEDAWWKVDPNDVKDREEVKKMMEKHQELYEKLCEEAASRIKRGHDENNNK

SEQ ID NO: 83276 - protein, 294 aa, Arabidopsis thaliana
  peptide (1)..(294): Ceres Seq. ID no. 12669510
MKSGVLLAKLYCFLHVTTNYLGFMAYAYGPSMTPTLHPSGNVLLAERISKRYQKPSRGDIVVIRSPENPNKTPIKRVIGIEGDCISFVIDSRKSDESQTIVVPKGHVFVQGDYTHNSRDSRNFGTVPYGLIQGRVLWRRRNGIYTKLSELSILCGAEVAFLGYSCSGKPYTFGSPSFQAVAERFLNGEASSSSSSSLQRSVMNAHQQAKIQELCKVYNRLVEEITVEEVKLKKTAALAEMMPMNEDAWWKVDPNDVKDREEVKKMMEKHQELYEKLCEEAASRIKRGHDENNNK

SEQ ID NO: 83277 - protein, 271 aa, Arabidopsis thaliana
  peptide (1)..(271): Ceres Seq. ID no. 12669511
MAYAYGPSMTPTLHPSGNVLLAERISKRYQKPSRGDIVVIRSPENPNKTPIKRVIGIEGDCISFVIDSRKSDESQTIVVPKGHVFVQGDYTHNSRDSRNFGTVPYGLIQGRVLWRRRNGIYTKLSELSILCGAEVAFLGYSCSGKPYTFGSPSFQAVAERFLNGEASSSSSSSLQRSVMNAHQQAKIQELCKVYNRLVEEITVEEVKLKKTAALAEMMPMNEDAWWKVDPNDVKDREEVKKMMEKHQELYEKLCEEAASRIKRGHDENNNK

SEQ ID NO: 83278 - DNA, 1478 bp, Arabidopsis thaliana
  misc_feature (1)..(1478): Ceres Seq. ID no. 12669512
  misc_feature (1)..(1478): Ortholog of  Ceres SEQ ID NO 13598741 as cited in SEQ ID NO 62749
  misc_feature (1)..(1478): Ortholog of  Ceres SEQ ID NO 12587535 as cited in SEQ ID NO 64020
  misc_feature (1)..(1478): Ortholog of  Ceres SEQ ID NO 12586366 as cited in SEQ ID NO 68983
gctgcccgaaaagaacatacagaaagacactttcacatttcacacttacagagagagagaagagagataaagagagcatttagatatcttgaggaagacgaagaagaagtagaggagagatatggttccgagcaacaatagatgcaaatggagttccattttcttgtttctgctcagtgtctccgttgccgtcttagtcgccgtcgctgacgacaagtctccggcggttgaggatggtttagtgatcaacggcgacttcgaaacatcaccgtcaagtggctttcctgacgacggagtaactgacggaccatccgatatcccaagctggaaatccaacggtacggtggagctaataaattccggtcaaaaacaaggcggaatgatcctcattgtcccacaaggccgtcacgccgtccgattagggaacgacgcagagatcagccaagatctaacggttgagaaaggttttgtctattcagtcacgttcagcgctgctcgcacgtgcgctcaactcgaatcgataaacgtgtcggtagcgtctgtgaacgcagacgcggacgatatgctggcgtcgcggaacgttgatttgcaaacgctttatagcgttcaagggtgggacccttatgcgtgggcgtttgaagcggaagatgatcatgtacggttggtttttaagaatccgggtatggaagatgatccgacttgtggaccaatcatcgatgacattgctattaagaagctctttactcctgataaacccaaagataatgcggtgattaatggagatttcgaagatggtccatggatgtttaggaacacgtctcttggtgttttacttccgacaaacctcgacgaagaaatctcgtctcttcctggttggactgttgaatcgaacagagcggttcggtttgttgactcggatcacttctctgttccaaagggcaaacgagccgtcgagctactctcaggcaaagaaggaattatttcacaaatggttgagaccaaagcagataagccgtacatattgtctttctcactaggccacgcaggtgataaatgcaaggaaccattggctattatggcattcgcaggtgatcaggcgcagaactttcattacatggcgcaagcgaactccagtttcgaaaaggccggtttgaatttcacggctaaggctgatcgaaccagagttgcgttctacagtgtttattacaatacgaggactgatgatatgagctccttgtgtggacctgtgatcgatgacgttagagtgtggttctccgggtcgaagagaatcggagctgggtttgggttttgggtttttgttcttctcgttgtcggtttggtttaagtaactcaaaatttagatgttccggttttattctagtgtaccagtaaaatgttgttgcaaaccaagaagaattctgtatggtttatttatccatcgggttaaagcaaattcgaaggtgtttatcgttatgcaa

SEQ ID NO: 83279 - protein, 407 aa, Arabidopsis thaliana
  peptide (1)..(407): Ceres Seq. ID no. 12669513
MVPSNNRCKWSSIFLFLLSVSVAVLVAVADDKSPAVEDGLVINGDFETSPSSGFPDDGVTDGPSDIPSWKSNGTVELINSGQKQGGMILIVPQGRHAVRLGNDAEISQDLTVEKGFVYSVTFSAARTCAQLESINVSVASVNADADDMLASRNVDLQTLYSVQGWDPYAWAFEAEDDHVRLVFKNPGMEDDPTCGPIIDDIAIKKLFTPDKPKDNAVINGDFEDGPWMFRNTSLGVLLPTNLDEEISSLPGWTVESNRAVRFVDSDHFSVPKGKRAVELLSGKEGIISQMVETKADKPYILSFSLGHAGDKCKEPLAIMAFAGDQAQNFHYMAQANSSFEKAGLNFTAKADRTRVAFYSVYYNTRTDDMSSLCGPVIDDVRVWFSGSKRIGAGFGFWVFVLLVVGLV

SEQ ID NO: 83280 - protein, 321 aa, Arabidopsis thaliana
  peptide (1)..(321): Ceres Seq. ID no. 12669514
MILIVPQGRHAVRLGNDAEISQDLTVEKGFVYSVTFSAARTCAQLESINVSVASVNADADDMLASRNVDLQTLYSVQGWDPYAWAFEAEDDHVRLVFKNPGMEDDPTCGPIIDDIAIKKLFTPDKPKDNAVINGDFEDGPWMFRNTSLGVLLPTNLDEEISSLPGWTVESNRAVRFVDSDHFSVPKGKRAVELLSGKEGIISQMVETKADKPYILSFSLGHAGDKCKEPLAIMAFAGDQAQNFHYMAQANSSFEKAGLNFTAKADRTRVAFYSVYYNTRTDDMSSLCGPVIDDVRVWFSGSKRIGAGFGFWVFVLLVVGLV

SEQ ID NO: 83281 - protein, 260 aa, Arabidopsis thaliana
  peptide (1)..(260): Ceres Seq. ID no. 12669515
MLASRNVDLQTLYSVQGWDPYAWAFEAEDDHVRLVFKNPGMEDDPTCGPIIDDIAIKKLFTPDKPKDNAVINGDFEDGPWMFRNTSLGVLLPTNLDEEISSLPGWTVESNRAVRFVDSDHFSVPKGKRAVELLSGKEGIISQMVETKADKPYILSFSLGHAGDKCKEPLAIMAFAGDQAQNFHYMAQANSSFEKAGLNFTAKADRTRVAFYSVYYNTRTDDMSSLCGPVIDDVRVWFSGSKRIGAGFGFWVFVLLVVGLV

SEQ ID NO: 83282 - DNA, 1131 bp, Arabidopsis thaliana
  misc_feature (1)..(1131): Ceres Seq. ID no. 12669533
  misc_feature (1)..(1131): Ortholog of  Ceres SEQ ID NO 13596816 as cited in SEQ ID NO 62287
atgtctaacatgtttagcagaattgccatgaccaactctatcgttcttcttctattttccttgactttcttagaacatggattgttgtttcaaagggtctcctctcttggcatcaactatggtcaagtcggcgacaatcttcctccaccggacaaagttctacaactcttgagttcactccatatcaataagacaagaatctatgacacaaaccctcgagtgttaacctcatttgccaattccaatatcgagctctttgtcaccgtcgaaaatgaaatgcttcccagcttagtagaccctcaacaagctctccaatgggtcactacccgtatcaaaccctactttccggccaccaagatcggtggtatcgccgtcggcaacgaactatacactgacgatgactcaagccttatagggtatcttatgcctgcaatgatgagcattcatggggctttggtccaaaccggactagacaagtacattcaagtatcgactccgaactcactatccgtccttcaagaatcttaccctccatccgccggatgttttaggccggaagtagctggcgtaatgacacagctactaggtttcttgcgtaacacgaattcccccttctggatcaacgcttacccttacttcgcttacaaggattccccaacaaagatcccattagactacgtcctcttcaaccctaaccctggaatggttgacccctataccaagtaccgctatgacaacatgctctacgctcaagtagacgctgtgatctttgccatggcgaggcttggcttcaaagacatcgaagttggggtctcggagactggatggccgtctaaaggcgatggagatgaggttggagccactgtggccaacgcagccgtttataacaaaaatattctaaggagacaacttcaaaatgaaggaacgccattgagaccaaacttgagttttgatgtttatctatttgctcttttcaatgaagaccttaaaccaggaccaacctctgagaggaattatggattgtatcagcctgatgagaccatgacttacaatgtaggctttaaagaagggaaagcaacggttgatgtattggacatgcgtttatttgttggccattcacatgctaattag

SEQ ID NO: 83283 - protein, 376 aa, Arabidopsis thaliana
  peptide (1)..(376): Ceres Seq. ID no. 12669534
MSNMFSRIAMTNSIVLLLFSLTFLEHGLLFQRVSSLGINYGQVGDNLPPPDKVLQLLSSLHINKTRIYDTNPRVLTSFANSNIELFVTVENEMLPSLVDPQQALQWVTTRIKPYFPATKIGGIAVGNELYTDDDSSLIGYLMPAMMSIHGALVQTGLDKYIQVSTPNSLSVLQESYPPSAGCFRPEVAGVMTQLLGFLRNTNSPFWINAYPYFAYKDSPTKIPLDYVLFNPNPGMVDPYTKYRYDNMLYAQVDAVIFAMARLGFKDIEVGVSETGWPSKGDGDEVGATVANAAVYNKNILRRQLQNEGTPLRPNLSFDVYLFALFNEDLKPGPTSERNYGLYQPDETMTYNVGFKEGKATVDVLDMRLFVGHSHAN

SEQ ID NO: 83284 - protein, 373 aa, Arabidopsis thaliana
  peptide (1)..(373): Ceres Seq. ID no. 12669535
MFSRIAMTNSIVLLLFSLTFLEHGLLFQRVSSLGINYGQVGDNLPPPDKVLQLLSSLHINKTRIYDTNPRVLTSFANSNIELFVTVENEMLPSLVDPQQALQWVTTRIKPYFPATKIGGIAVGNELYTDDDSSLIGYLMPAMMSIHGALVQTGLDKYIQVSTPNSLSVLQESYPPSAGCFRPEVAGVMTQLLGFLRNTNSPFWINAYPYFAYKDSPTKIPLDYVLFNPNPGMVDPYTKYRYDNMLYAQVDAVIFAMARLGFKDIEVGVSETGWPSKGDGDEVGATVANAAVYNKNILRRQLQNEGTPLRPNLSFDVYLFALFNEDLKPGPTSERNYGLYQPDETMTYNVGFKEGKATVDVLDMRLFVGHSHAN

SEQ ID NO: 83285 - protein, 367 aa, Arabidopsis thaliana
  peptide (1)..(367): Ceres Seq. ID no. 12669536
MTNSIVLLLFSLTFLEHGLLFQRVSSLGINYGQVGDNLPPPDKVLQLLSSLHINKTRIYDTNPRVLTSFANSNIELFVTVENEMLPSLVDPQQALQWVTTRIKPYFPATKIGGIAVGNELYTDDDSSLIGYLMPAMMSIHGALVQTGLDKYIQVSTPNSLSVLQESYPPSAGCFRPEVAGVMTQLLGFLRNTNSPFWINAYPYFAYKDSPTKIPLDYVLFNPNPGMVDPYTKYRYDNMLYAQVDAVIFAMARLGFKDIEVGVSETGWPSKGDGDEVGATVANAAVYNKNILRRQLQNEGTPLRPNLSFDVYLFALFNEDLKPGPTSERNYGLYQPDETMTYNVGFKEGKATVDVLDMRLFVGHSHAN

SEQ ID NO: 83286 - DNA, 1908 bp, Arabidopsis thaliana
  misc_feature (1)..(1908): Ceres Seq. ID no. 12669552
  misc_feature (1)..(1908): Ortholog of  Ceres SEQ ID NO 14308709 as cited in SEQ ID NO 55376
  misc_feature (1)..(1908): Ortholog of  Ceres SEQ ID NO 15175785 as cited in SEQ ID NO 56970
  misc_feature (1)..(1908): Ortholog of  Ceres SEQ ID NO 15178157 as cited in SEQ ID NO 57481
  misc_feature (1)..(1908): Ortholog of  Ceres SEQ ID NO 13597407 as cited in SEQ ID NO 64106
  misc_feature (1)..(1908): Ortholog of  Ceres SEQ ID NO 14303309 as cited in SEQ ID NO 67739
  misc_feature (1)..(1908): Ortholog of  Ceres SEQ ID NO 12637747 as cited in SEQ ID NO 0
acacacttctaactcttttaacccaaaaaaaaatggagggaggaataatacatggaggagcagatgaatcagctttcaaagaatgtttctctctaacatggaagaatccttatgttcttcgtcttgctttctctgccggaatcggtggtcttctctttggttacgacaccggagtgatatcaggtgctctgctttatatcagagatgatttcaagtctgttgacagaaatacttggttacaggagatgatagtgagcatggcagttgcaggagccatcgttggagccgccataggaggttgggcgaacgacaaattagggaggagaagcgcgattctcatggcggatttcctctttttattaggagctatcattatggcggctgctcctaacccgtccctccttgtcgttggccgtgtttttgtgggcctcggggtcgggatggcctcgatgaccgctcctctatacatctcagaagcttcgcctgctaagatcagaggagctttggtcagtactaatgggtttctcattaccggaggacagttcttgtcttacctcataaacttagcctttactgatgtgaccggaacgtggagatggatgctcggaatcgccggaattccagctcttttacagtttgtcttaatgtttacactcccggagtcacctcgatggttataccgcaagggaagagaagaagaggctaaagcgattctaagaagaatatactcagcagaagatgtagaacaagagatacgtgcacttaaagactcagttgaaacagagatacttgaagaagggtcttccgagaaaatcaacatgatcaaactatgcaaagctaaaaccgttagacgaggactaatagctggtgttggtctccaagtgtttcaacagttcgttgggatcaacacagttatgtattacagtccaaccattgttcagcttgccggtttcgcttcaaacagaacagctcttctcttgtctctagttaccgcaggacttaatgcatttggttctataattagcatttacttcattgatagaatcggaaggaaaaagcttttgatcattagccttttcggagtcattatctcgctaggaatactaaccggtgttttttatgaagcggctactcacgctcctgcgattagctcactcgagacacaaaggttcaataatattagttgtccggattataagtcagctatgaataccaatgcttgggattgtatgacttgtttgaaagcttcttctccatcttgtggctattgttcctctcccattggaaaggaacatcccggggcatgttggatctctgatgattcggttaaggacttatgtcataacgaaaaccggctttggtacacgagaggatgtcctagcaattttggttggtttgctcttcttggattgggactttatatcatcttcttctctcctggaatggggactgttccatggatagttaactcagagatttatccattgagattcagaggaatatgtggaggaatagctgcaactgcaaattggatatcaaatttgattgtggctcaatcttttttgtcattgaccgaagctattgggacttcttggacttttctcatctttggagtgatctcagtcattgctcttctctttgttatggtttgtgttccggagacaaaaggaatgccaatggaggagattgagaagatgcttgaacgaagatcgatggagtttaagttttggaagaaaaaatcaaaacttgttgagaaacaaaaccagagtgcatgagagaaactcttaaaggaagcataatcaatgagaaagcacatgagacttgtaacttggtattgaaacttaatagtgacaaagtgatctattttaagaaccagtaaaaaagtgttgttatgaatctacttattgg

SEQ ID NO: 83287 - protein, 590 aa, Arabidopsis thaliana
  peptide (1)..(590): Ceres Seq. ID no. 12669553
TLLTLLTQKKMEGGIIHGGADESAFKECFSLTWKNPYVLRLAFSAGIGGLLFGYDTGVISGALLYIRDDFKSVDRNTWLQEMIVSMAVAGAIVGAAIGGWANDKLGRRSAILMADFLFLLGAIIMAAAPNPSLLVVGRVFVGLGVGMASMTAPLYISEASPAKIRGALVSTNGFLITGGQFLSYLINLAFTDVTGTWRWMLGIAGIPALLQFVLMFTLPESPRWLYRKGREEEAKAILRRIYSAEDVEQEIRALKDSVETEILEEGSSEKINMIKLCKAKTVRRGLIAGVGLQVFQQFVGINTVMYYSPTIVQLAGFASNRTALLLSLVTAGLNAFGSIISIYFIDRIGRKKLLIISLFGVIISLGILTGVFYEAATHAPAISSLETQRFNNISCPDYKSAMNTNAWDCMTCLKASSPSCGYCSSPIGKEHPGACWISDDSVKDLCHNENRLWYTRGCPSNFGWFALLGLGLYIIFFSPGMGTVPWIVNSEIYPLRFRGICGGIAATANWISNLIVAQSFLSLTEAIGTSWTFLIFGVISVIALLFVMVCVPETKGMPMEEIEKMLERRSMEFKFWKKKSKLVEKQNQSA

SEQ ID NO: 83288 - protein, 580 aa, Arabidopsis thaliana
  peptide (1)..(580): Ceres Seq. ID no. 12669554
MEGGIIHGGADESAFKECFSLTWKNPYVLRLAFSAGIGGLLFGYDTGVISGALLYIRDDFKSVDRNTWLQEMIVSMAVAGAIVGAAIGGWANDKLGRRSAILMADFLFLLGAIIMAAAPNPSLLVVGRVFVGLGVGMASMTAPLYISEASPAKIRGALVSTNGFLITGGQFLSYLINLAFTDVTGTWRWMLGIAGIPALLQFVLMFTLPESPRWLYRKGREEEAKAILRRIYSAEDVEQEIRALKDSVETEILEEGSSEKINMIKLCKAKTVRRGLIAGVGLQVFQQFVGINTVMYYSPTIVQLAGFASNRTALLLSLVTAGLNAFGSIISIYFIDRIGRKKLLIISLFGVIISLGILTGVFYEAATHAPAISSLETQRFNNISCPDYKSAMNTNAWDCMTCLKASSPSCGYCSSPIGKEHPGACWISDDSVKDLCHNENRLWYTRGCPSNFGWFALLGLGLYIIFFSPGMGTVPWIVNSEIYPLRFRGICGGIAATANWISNLIVAQSFLSLTEAIGTSWTFLIFGVISVIALLFVMVCVPETKGMPMEEIEKMLERRSMEFKFWKKKSKLVEKQNQSA

SEQ ID NO: 83289 - protein, 509 aa, Arabidopsis thaliana
  peptide (1)..(509): Ceres Seq. ID no. 12669555
MIVSMAVAGAIVGAAIGGWANDKLGRRSAILMADFLFLLGAIIMAAAPNPSLLVVGRVFVGLGVGMASMTAPLYISEASPAKIRGALVSTNGFLITGGQFLSYLINLAFTDVTGTWRWMLGIAGIPALLQFVLMFTLPESPRWLYRKGREEEAKAILRRIYSAEDVEQEIRALKDSVETEILEEGSSEKINMIKLCKAKTVRRGLIAGVGLQVFQQFVGINTVMYYSPTIVQLAGFASNRTALLLSLVTAGLNAFGSIISIYFIDRIGRKKLLIISLFGVIISLGILTGVFYEAATHAPAISSLETQRFNNISCPDYKSAMNTNAWDCMTCLKASSPSCGYCSSPIGKEHPGACWISDDSVKDLCHNENRLWYTRGCPSNFGWFALLGLGLYIIFFSPGMGTVPWIVNSEIYPLRFRGICGGIAATANWISNLIVAQSFLSLTEAIGTSWTFLIFGVISVIALLFVMVCVPETKGMPMEEIEKMLERRSMEFKFWKKKSKLVEKQNQSA

SEQ ID NO: 83290 - DNA, 1654 bp, Arabidopsis thaliana
  misc_feature (1)..(1654): Ceres Seq. ID no. 12669566
  misc_feature (1)..(1654): Ortholog of  Ceres SEQ ID NO 14304910 as cited in SEQ ID NO 53701
atacaaaacacatatcacactctctttacttcgtcgctttttttttctttagactttccggtgatcggagccaaaaaaaggaaagattcaccggcgaaatggacgaatcttggcgtatgaagatgggtttaagcgttgatccattcttctccattgctcgtaaatcaatggatgctcgtatcgacgcggaagacttcgctgatgttttcggcggtccgccgcgaagcgttctcacccgaaaattttccggcgacttctctcgttccgactgtttctacgacgagatttttcagcctccgggaactttctcctccggcggctctcttgcgtcttctaaatctcacggaagaaacttaccggcattcagaattccgtccggcggggaaggattttacgacggcgtgtttggtggtcgcggcggttctgcgaaggaaggatcgaaaaaacagagctcgatgacgaaaccaagatcgaattcatcgtcgatgctctcttccgaggaggccagtcctcactatcctccaccagcggcagcttccggcgacgactccggattctcttctttcacttctagacttagaccgttaaacgtcccgtcgagaagtcataaacgagagtcaaagaaacagagtttctcggcggttccaaaagcaaaagattcattttccggccaaaataacacaccggaaaaagctgatttctactacaaaaaaacacatttcggcggatcaagaagagcctcgccagaaaccataagcttggatccgaattccttcagaagaatggatgactacggaccaagctcccctgcatcttcccctgtttcttccttcatctgcgaagaagaagacgacaacactcatgctaaacagagaacaaacagagactgtaaagtcgaagaggtagtagtagaagatgaagaagacgaagaagaagaagagatgagctcttacgtcatcgagataaactcagatcgattcgaccgatacagagaagaaggaggaggaggaggaggaaattcagattcaaacgacatggatgaagcaatagcttgggctaaagaaagatctcaaagaccagaagcaaagcaaacagaagaagatgtaatcgattcgagaagaagtgaagaagaacccaaatcagaagaagagatggagatggagatgaaagatgaagagataagaatctggttaaccggaaaagagacaaacattagacttctcctctcaactttacatcatgttctttggtcaaatagcaattgggattcgattcctttagcaaatcttcgagatggatcacaagtgaagaaagcttatcaaagagctcggctttgtttacatccagataagctacaacaaagaggaggaacttcaccgattcaaaaatctgtcgcgagtagagttttcgccattcttcaggaagcatgggctgtgtacgtaacaaatgaaggactctcgagctaaaccggaatccgcaaactacattcttttggtttatattaaaccagaagaatcggtttataatcatgtaagaagaataagagcaaagttaaaggaaaagtttgtttgtttttttgtaaaagactaaaagtcatatgaacattcccatgtgttgcctttgtatattccattgtcaatgttcttatatacag

SEQ ID NO: 83291 - protein, 487 aa, Arabidopsis thaliana
  peptide (1)..(487): Ceres Seq. ID no. 12669567
TKHISHSLYFVAFFFFRLSGDRSQKKERFTGEMDESWRMKMGLSVDPFFSIARKSMDARIDAEDFADVFGGPPRSVLTRKFSGDFSRSDCFYDEIFQPPGTFSSGGSLASSKSHGRNLPAFRIPSGGEGFYDGVFGGRGGSAKEGSKKQSSMTKPRSNSSSMLSSEEASPHYPPPAAASGDDSGFSSFTSRLRPLNVPSRSHKRESKKQSFSAVPKAKDSFSGQNNTPEKADFYYKKTHFGGSRRASPETISLDPNSFRRMDDYGPSSPASSPVSSFICEEEDDNTHAKQRTNRDCKVEEVVVEDEEDEEEEEMSSYVIEINSDRFDRYREEGGGGGGNSDSNDMDEAIAWAKERSQRPEAKQTEEDVIDSRRSEEEPKSEEEMEMEMKDEEIRIWLTGKETNIRLLLSTLHHVLWSNSNWDSIPLANLRDGSQVKKAYQRARLCLHPDKLQQRGGTSPIQKSVASRVFAILQEAWAVYVTNEGLSS

SEQ ID NO: 83292 - protein, 455 aa, Arabidopsis thaliana
  peptide (1)..(455): Ceres Seq. ID no. 12669568
MDESWRMKMGLSVDPFFSIARKSMDARIDAEDFADVFGGPPRSVLTRKFSGDFSRSDCFYDEIFQPPGTFSSGGSLASSKSHGRNLPAFRIPSGGEGFYDGVFGGRGGSAKEGSKKQSSMTKPRSNSSSMLSSEEASPHYPPPAAASGDDSGFSSFTSRLRPLNVPSRSHKRESKKQSFSAVPKAKDSFSGQNNTPEKADFYYKKTHFGGSRRASPETISLDPNSFRRMDDYGPSSPASSPVSSFICEEEDDNTHAKQRTNRDCKVEEVVVEDEEDEEEEEMSSYVIEINSDRFDRYREEGGGGGGNSDSNDMDEAIAWAKERSQRPEAKQTEEDVIDSRRSEEEPKSEEEMEMEMKDEEIRIWLTGKETNIRLLLSTLHHVLWSNSNWDSIPLANLRDGSQVKKAYQRARLCLHPDKLQQRGGTSPIQKSVASRVFAILQEAWAVYVTNEGLSS

SEQ ID NO: 83293 - protein, 449 aa, Arabidopsis thaliana
  peptide (1)..(449): Ceres Seq. ID no. 12669569
MKMGLSVDPFFSIARKSMDARIDAEDFADVFGGPPRSVLTRKFSGDFSRSDCFYDEIFQPPGTFSSGGSLASSKSHGRNLPAFRIPSGGEGFYDGVFGGRGGSAKEGSKKQSSMTKPRSNSSSMLSSEEASPHYPPPAAASGDDSGFSSFTSRLRPLNVPSRSHKRESKKQSFSAVPKAKDSFSGQNNTPEKADFYYKKTHFGGSRRASPETISLDPNSFRRMDDYGPSSPASSPVSSFICEEEDDNTHAKQRTNRDCKVEEVVVEDEEDEEEEEMSSYVIEINSDRFDRYREEGGGGGGNSDSNDMDEAIAWAKERSQRPEAKQTEEDVIDSRRSEEEPKSEEEMEMEMKDEEIRIWLTGKETNIRLLLSTLHHVLWSNSNWDSIPLANLRDGSQVKKAYQRARLCLHPDKLQQRGGTSPIQKSVASRVFAILQEAWAVYVTNEGLSS

SEQ ID NO: 83294 - DNA, 1590 bp, Arabidopsis thaliana
  misc_feature (1)..(1590): Ceres Seq. ID no. 12669574
  misc_feature (1)..(1590): Ortholog of  Ceres SEQ ID NO 13598368 as cited in SEQ ID NO 62140
atggagaacgcattggtcaaaactccactgagaaagctaagaagaagaagaactaaacgggtctggagattgaagcagaagctaaagcttgcatggaaatctatcaagatccgggtcaagtcacatcttccgggtttcttgtcaaccaagaaacacctcttccacattaaatcacgaaaggaagaacaagatttgtctcaagtggcccagaggatctgcaaaatctccaatgactcgaccaaatcactggcgtttctacttcagcttccaaaatactcagccgacgattttcttgaccgcggcgatctgatgactccagctgcgtctccaagggaaaaaatatccaaaatgtggcgtgagcttcacggtagcaacaattgggagaatcttcttgatcctctgcatccatggcttaggagagaagtaaccaaatatggagaattcgtggaatccgtttatgattcacttgatttcgatcctttatccgaattctgtggaagctctagatacaacaggaacaaactctttgaagagcttggtttaaccagacatggttacaaggtaacgaaatacatctacgcgatgtctcgtgtcgacgttcctcagtggttcttaagctcggctttgggagagacatggagcaaagattccaactggatgggctttgtagctgtgagtggagacagagagtcgttgaggattggtcggagagacattgttgtggcgtggcgtggaacggtgactcccacggaatggttcatggatcttaggacgagtatggagccgttcgattgtgaaggaaaacatggcaagaccgtggttaaggtgcaaagtgggtttttaagtatctacaactcgaaaagcgaactcacacggtacaacaaagaaagtgcatctgagcagacgatggatgaagtgaagcggctagtgaatttttttaaggatagaggcgaagaggtaagcctaaccattaccgggcatagcctcggaggtgcgctggcgcttatgaacgcttacgaggcggctagagatgttccagcgttatctggtaacatttcagtgatctcgtttggtgcgccgagggtaggtaacttggcattcaaggaaaagctaaacagtttaggagttaaggtgttacgtgtggtgaacaagcaagacattgtacctaagctacctggtatcgtgttcaacaaggtacttaacaaacttaatccgataacttcaaggctcaattgggtctacaggcatgtcggaacgcagcttaaactcgatgtcttcagttcgccttacgtaaaacgtgattcagacttagggagggctcataatctagaggtgtatctccatgttttggatggcttccaccgcaagaaatctgggtttagggttaacgctaggagagacgttgcttcggtgaacaagagcacagatatgttgttggatcatctaagaatacctgagttttggtaccaagtggcacataagggtctgatccttaacaaacagactggccggtgggtgaagcctgtccgtgcacctgaagacattccctctccgttaccgaccggaccaaaacctatttatagcttatga

SEQ ID NO: 83295 - protein, 529 aa, Arabidopsis thaliana
  peptide (1)..(529): Ceres Seq. ID no. 12669575
MENALVKTPLRKLRRRRTKRVWRLKQKLKLAWKSIKIRVKSHLPGFLSTKKHLFHIKSRKEEQDLSQVAQRICKISNDSTKSLAFLLQLPKYSADDFLDRGDLMTPAASPREKISKMWRELHGSNNWENLLDPLHPWLRREVTKYGEFVESVYDSLDFDPLSEFCGSSRYNRNKLFEELGLTRHGYKVTKYIYAMSRVDVPQWFLSSALGETWSKDSNWMGFVAVSGDRESLRIGRRDIVVAWRGTVTPTEWFMDLRTSMEPFDCEGKHGKTVVKVQSGFLSIYNSKSELTRYNKESASEQTMDEVKRLVNFFKDRGEEVSLTITGHSLGGALALMNAYEAARDVPALSGNISVISFGAPRVGNLAFKEKLNSLGVKVLRVVNKQDIVPKLPGIVFNKVLNKLNPITSRLNWVYRHVGTQLKLDVFSSPYVKRDSDLGRAHNLEVYLHVLDGFHRKKSGFRVNARRDVASVNKSTDMLLDHLRIPEFWYQVAHKGLILNKQTGRWVKPVRAPEDIPSPLPTGPKPIYSL

SEQ ID NO: 83296 - protein, 426 aa, Arabidopsis thaliana
  peptide (1)..(426): Ceres Seq. ID no. 12669576
MTPAASPREKISKMWRELHGSNNWENLLDPLHPWLRREVTKYGEFVESVYDSLDFDPLSEFCGSSRYNRNKLFEELGLTRHGYKVTKYIYAMSRVDVPQWFLSSALGETWSKDSNWMGFVAVSGDRESLRIGRRDIVVAWRGTVTPTEWFMDLRTSMEPFDCEGKHGKTVVKVQSGFLSIYNSKSELTRYNKESASEQTMDEVKRLVNFFKDRGEEVSLTITGHSLGGALALMNAYEAARDVPALSGNISVISFGAPRVGNLAFKEKLNSLGVKVLRVVNKQDIVPKLPGIVFNKVLNKLNPITSRLNWVYRHVGTQLKLDVFSSPYVKRDSDLGRAHNLEVYLHVLDGFHRKKSGFRVNARRDVASVNKSTDMLLDHLRIPEFWYQVAHKGLILNKQTGRWVKPVRAPEDIPSPLPTGPKPIYSL

SEQ ID NO: 83297 - protein, 413 aa, Arabidopsis thaliana
  peptide (1)..(413): Ceres Seq. ID no. 12669577
MWRELHGSNNWENLLDPLHPWLRREVTKYGEFVESVYDSLDFDPLSEFCGSSRYNRNKLFEELGLTRHGYKVTKYIYAMSRVDVPQWFLSSALGETWSKDSNWMGFVAVSGDRESLRIGRRDIVVAWRGTVTPTEWFMDLRTSMEPFDCEGKHGKTVVKVQSGFLSIYNSKSELTRYNKESASEQTMDEVKRLVNFFKDRGEEVSLTITGHSLGGALALMNAYEAARDVPALSGNISVISFGAPRVGNLAFKEKLNSLGVKVLRVVNKQDIVPKLPGIVFNKVLNKLNPITSRLNWVYRHVGTQLKLDVFSSPYVKRDSDLGRAHNLEVYLHVLDGFHRKKSGFRVNARRDVASVNKSTDMLLDHLRIPEFWYQVAHKGLILNKQTGRWVKPVRAPEDIPSPLPTGPKPIYSL

SEQ ID NO: 83298 - DNA, 1813 bp, Arabidopsis thaliana
  misc_feature (1)..(1813): Ceres Seq. ID no. 12669585
  misc_feature (1)..(1813): Ortholog of  Ceres SEQ ID NO 15171446 as cited in SEQ ID NO 51590
ttcttccagtaaacttggatgacactgtgaatttcataatttgcccttctccggaatggctaatcactctcggcctcacatctgccagtgtttgactcggctagcctccgtcaaacggaacgccgtcgtcacagtctacggaaaccggaagcgcaccggcagggagttcgttgacggcgtactgagccttgccgccggactgattcgtctcggcctccgaaacggtgatgtcgtctctattgctgcttttaacagtgatttgttcttggagtggttattagctgttgcattggttggaggagtagttgctcctttgaattacagatggagcttgaaagaagcaaaaatggcaatgctgctagtagaacctgtgcttttggttactgatgagacatgtgtctcgtggtgcattgatgttcaaaatggagatataccttccttgaaatggcgtgtgttgatggagtctacttcaacagattttgcaaatgaacttaaccagtttttgacaaccgagatgcttaaacagcgtacactggtgccttccttagcaacgtatgcttgggcttctgatgatgctgttgttatatgtttcacttctggtacaacgggaagacccaagggtgtgacgataagccacttggctttcataacacagtctctagctaagattgctattgctggctacggtgaggatgatgtgtatttgcacacgtctccattagttcatatcggcggtctgtcatcagctatggccatgctaatggttggagcttgccatgttctgctgcccaagtttgatgccaaaacagctcttcaagttatggaacaaaaccatataacttgcttcatcaccgtcccagctatgatggctgatcttattcgtgtcaacaggacaacgaaaaatggagctgaaaaccgcggtgtgagaaagatactaaacggaggtggatctttatcaagcgaactccttaaagaagctgtgaacatcttcccatgtgcgaggatactttcagcatatgggatgacagaggcgtgctcttcgctgaccttcatgactctccatgatccaacacaagagtcttttaaggtgacttatcctttgcttaaccaaccaaagcaaggcacatgtgttggcaagcctgcccctcatatcgaactgatggttaaactcgacgaagattcatcgagggtcgggaaaattctaacgcgcggaccacacactatgcttagatattggggtcatcaagtagctcaagaaaatgttgaaacatcagaatccagaagcaatgaagcttggcttgacacaggtgatatcggggcctttgatgagtttggtaacttatggcttataggccggtccaatggccgaatcaagactggaggcgagaatgtttaccccgaagaggtggaagctgttctagtagagcatccagggattgtttctgctgtggtgataggcgtcattgatactcgtcttggagagatggtcgttgcttgtgttcgtttacaggagaaatggatatggtctgatgttgaaaaccgtaaaggaagtttccaactgtcaagtgagacactcaaacatcattgcagaacacagaacctaaccgggtttaagataccgaagaggtttgtccgatgggagaagcagtttccgttgacaacaactgggaaagtgaaaagagatgaagttcgaagacaagttttgtctcatttccaaatcatgactagctctctctgatcattacaattttaaaccgttaaaacattctttatttgtttgatgatacaaatttttagttagttttagtttgat

SEQ ID NO: 83299 - protein, 560 aa, Arabidopsis thaliana
  peptide (1)..(560): Ceres Seq. ID no. 12669586
MANHSRPHICQCLTRLASVKRNAVVTVYGNRKRTGREFVDGVLSLAAGLIRLGLRNGDVVSIAAFNSDLFLEWLLAVALVGGVVAPLNYRWSLKEAKMAMLLVEPVLLVTDETCVSWCIDVQNGDIPSLKWRVLMESTSTDFANELNQFLTTEMLKQRTLVPSLATYAWASDDAVVICFTSGTTGRPKGVTISHLAFITQSLAKIAIAGYGEDDVYLHTSPLVHIGGLSSAMAMLMVGACHVLLPKFDAKTALQVMEQNHITCFITVPAMMADLIRVNRTTKNGAENRGVRKILNGGGSLSSELLKEAVNIFPCARILSAYGMTEACSSLTFMTLHDPTQESFKVTYPLLNQPKQGTCVGKPAPHIELMVKLDEDSSRVGKILTRGPHTMLRYWGHQVAQENVETSESRSNEAWLDTGDIGAFDEFGNLWLIGRSNGRIKTGGENVYPEEVEAVLVEHPGIVSAVVIGVIDTRLGEMVVACVRLQEKWIWSDVENRKGSFQLSSETLKHHCRTQNLTGFKIPKRFVRWEKQFPLTTTGKVKRDEVRRQVLSHFQIMTSSL

SEQ ID NO: 83300 - protein, 463 aa, Arabidopsis thaliana
  peptide (1)..(463): Ceres Seq. ID no. 12669587
MAMLLVEPVLLVTDETCVSWCIDVQNGDIPSLKWRVLMESTSTDFANELNQFLTTEMLKQRTLVPSLATYAWASDDAVVICFTSGTTGRPKGVTISHLAFITQSLAKIAIAGYGEDDVYLHTSPLVHIGGLSSAMAMLMVGACHVLLPKFDAKTALQVMEQNHITCFITVPAMMADLIRVNRTTKNGAENRGVRKILNGGGSLSSELLKEAVNIFPCARILSAYGMTEACSSLTFMTLHDPTQESFKVTYPLLNQPKQGTCVGKPAPHIELMVKLDEDSSRVGKILTRGPHTMLRYWGHQVAQENVETSESRSNEAWLDTGDIGAFDEFGNLWLIGRSNGRIKTGGENVYPEEVEAVLVEHPGIVSAVVIGVIDTRLGEMVVACVRLQEKWIWSDVENRKGSFQLSSETLKHHCRTQNLTGFKIPKRFVRWEKQFPLTTTGKVKRDEVRRQVLSHFQIMTSSL

SEQ ID NO: 83301 - protein, 461 aa, Arabidopsis thaliana
  peptide (1)..(461): Ceres Seq. ID no. 12669588
MLLVEPVLLVTDETCVSWCIDVQNGDIPSLKWRVLMESTSTDFANELNQFLTTEMLKQRTLVPSLATYAWASDDAVVICFTSGTTGRPKGVTISHLAFITQSLAKIAIAGYGEDDVYLHTSPLVHIGGLSSAMAMLMVGACHVLLPKFDAKTALQVMEQNHITCFITVPAMMADLIRVNRTTKNGAENRGVRKILNGGGSLSSELLKEAVNIFPCARILSAYGMTEACSSLTFMTLHDPTQESFKVTYPLLNQPKQGTCVGKPAPHIELMVKLDEDSSRVGKILTRGPHTMLRYWGHQVAQENVETSESRSNEAWLDTGDIGAFDEFGNLWLIGRSNGRIKTGGENVYPEEVEAVLVEHPGIVSAVVIGVIDTRLGEMVVACVRLQEKWIWSDVENRKGSFQLSSETLKHHCRTQNLTGFKIPKRFVRWEKQFPLTTTGKVKRDEVRRQVLSHFQIMTSSL

SEQ ID NO: 83302 - DNA, 2550 bp, Arabidopsis thaliana
  misc_feature (1)..(2550): Ceres Seq. ID no. 12669593
  misc_feature (1)..(2550): Ortholog of  Ceres SEQ ID NO 14310362 as cited in SEQ ID NO 54251
  misc_feature (1)..(2550): Ortholog of  Ceres SEQ ID NO 13654989 as cited in SEQ ID NO 63117
  misc_feature (1)..(2550): Ortholog of  Ceres SEQ ID NO 13584744 as cited in SEQ ID NO 69137
atgtcgaagctgaggaaaaagtatctggaacatcttctatgtgtgttgattttctttacttatgttattggctatggagaagctcagtccaagagcttccttgtagattgtggctcaaatgctacaaccgaagtagatggaagaacatgggttggtgatttatctcccaacaagagtgtgaccctgcaaggatttgatgccattactgcttcgacatcgaaaggaagttctgtttacgctgagatatataagactgctcgtgttttcgacgctgtgttgaactatacatttgaaggtataactcaagggaattactttgttaggctccatttcagccctttcgctattgaaaaccacaatgtgaatgagtcttctttcagcgtctttgcggatggtctgagactgatgcttgacatcaacatcgcgggagaaatcgcgcataagaatctcatcttggaaagcactggtcacaatgctactgcctcttctttggttaaagagtttctgttacctactggaccaggaaaactggttttaagtttcatcccggagaaagggtctttcgggtttgtcaatgctattgagatagtctctgttgatgataagctttttaaggaatcagttactaaagttggtggaagtgaagtggagcttggtttgggtggacgagggattgaaactatgtataggctaaacgttggtggtcccaagctaggtccaagcaaagatcttaagctttatagaacatgggaaacagatttaagctacatggtgattgagaacgctggtgtagaagtcaagaacagctcaaatatcacatatgctttggctgatgattctcctgtggctcctcttcttgtttatgaaactgctaggatgatgtcaaacactgaagtcttggagaaacggttcaacatttcttggaagtttgaagttgatcctaatttcgactacttggttaggcttcatttctgtgagcttcttgttgataagcaaaaccagaggattttcaggatatacataaacaaccagacggctgctggtaatttcgatatatttgctcacgcgggcgggaagaacaaaggtatatatcaagattacttggatccggtctcctctaagaacgacgttctctggattcaacttggacctgactcatctgttggtgcttctggagacgctcttctgagtggtcttgagattttcaagctcagcaaaaatgggaatcttgctcatctcatcaggtttgattcgactggtcactcggtaagtgactcgaagatgcggattatttggatcagtgttggtgctggtatagcaattatcatttttttcgtgttcttgggaatcttggtagtatgtttatgcaagaaaaggcgaagcaaatcagatgagtcgaaaaacaatcctcccgggtggcgtccgttgtttttgcatgtcaataacagtactgcaaacgccaaagcaacgggaggctcgctgagactgaacactcttgcagcatctacaatgggaaggaagtttacactagccgagattcgtgcagcaactaagaactttgatgatggtttagctattggagttggagggtttggtaaggtttacagaggagagcttgaagatggaacactcatagctataaaacgagccaccccacattctcagcaagggcttgctgaattcgaaaccgagatcgtgatgctctcaagacttaggcataggcatcttgtgtctttgatcgggttctgcgatgagcacaatgagatgatcttggtttatgaatacatggcaaatggaactctcaggagtcatctctttggaagcaaccttccgccattatcatggaagcaacggcttgaagcttgtataggctctgcgagaggattgcattaccttcacacagggtcagagagaggaatcattcacagagatgtcaaaacaacaaacatactattagacgagaactttgtggcaaagatgtctgattttgggctgtcgaaagctggaccgtccatggaccatactcatgtgagtacagctgtgaaaggaagttttggttatcttgatcctgaatactttagaaggcaacagttaacagagaagtcagatgtttactcttttggtgttgtgttgttcgaagctgtttgtgctcgagctgttataaacccaactttgcctaaagaccagatcaaccttgcggaatgggctttaagctggcaaaaacagagaaacctcgagtccatcatcgactcaaatctgaggggaaactacagtcctgaatcgttggagaagtatggggagatagcagagaagtgcttagcggatgaagggaagaacaggccaatgatgggagaagtgttatggagcttggagtatgttttgcagattcatgaagcttggcttcgcaaacagaatggagaaaactcgttttcgagcagccaagcggtagaagaagcaccagagagctttactcttccagcttgttccaatcaagattcctcagaaactgagcagagccaaacaggatctgctcttcacaattcggcttag

SEQ ID NO: 83303 - protein, 849 aa, Arabidopsis thaliana
  peptide (1)..(849): Ceres Seq. ID no. 12669594
MSKLRKKYLEHLLCVLIFFTYVIGYGEAQSKSFLVDCGSNATTEVDGRTWVGDLSPNKSVTLQGFDAITASTSKGSSVYAEIYKTARVFDAVLNYTFEGITQGNYFVRLHFSPFAIENHNVNESSFSVFADGLRLMLDINIAGEIAHKNLILESTGHNATASSLVKEFLLPTGPGKLVLSFIPEKGSFGFVNAIEIVSVDDKLFKESVTKVGGSEVELGLGGRGIETMYRLNVGGPKLGPSKDLKLYRTWETDLSYMVIENAGVEVKNSSNITYALADDSPVAPLLVYETARMMSNTEVLEKRFNISWKFEVDPNFDYLVRLHFCELLVDKQNQRIFRIYINNQTAAGNFDIFAHAGGKNKGIYQDYLDPVSSKNDVLWIQLGPDSSVGASGDALLSGLEIFKLSKNGNLAHLIRFDSTGHSVSDSKMRIIWISVGAGIAIIIFFVFLGILVVCLCKKRRSKSDESKNNPPGWRPLFLHVNNSTANAKATGGSLRLNTLAASTMGRKFTLAEIRAATKNFDDGLAIGVGGFGKVYRGELEDGTLIAIKRATPHSQQGLAEFETEIVMLSRLRHRHLVSLIGFCDEHNEMILVYEYMANGTLRSHLFGSNLPPLSWKQRLEACIGSARGLHYLHTGSERGIIHRDVKTTNILLDENFVAKMSDFGLSKAGPSMDHTHVSTAVKGSFGYLDPEYFRRQQLTEKSDVYSFGVVLFEAVCARAVINPTLPKDQINLAEWALSWQKQRNLESIIDSNLRGNYSPESLEKYGEIAEKCLADEGKNRPMMGEVLWSLEYVLQIHEAWLRKQNGENSFSSSQAVEEAPESFTLPACSNQDSSETEQSQTGSALHNSA

SEQ ID NO: 83304 - protein, 714 aa, Arabidopsis thaliana
  peptide (1)..(714): Ceres Seq. ID no. 12669595
MLDINIAGEIAHKNLILESTGHNATASSLVKEFLLPTGPGKLVLSFIPEKGSFGFVNAIEIVSVDDKLFKESVTKVGGSEVELGLGGRGIETMYRLNVGGPKLGPSKDLKLYRTWETDLSYMVIENAGVEVKNSSNITYALADDSPVAPLLVYETARMMSNTEVLEKRFNISWKFEVDPNFDYLVRLHFCELLVDKQNQRIFRIYINNQTAAGNFDIFAHAGGKNKGIYQDYLDPVSSKNDVLWIQLGPDSSVGASGDALLSGLEIFKLSKNGNLAHLIRFDSTGHSVSDSKMRIIWISVGAGIAIIIFFVFLGILVVCLCKKRRSKSDESKNNPPGWRPLFLHVNNSTANAKATGGSLRLNTLAASTMGRKFTLAEIRAATKNFDDGLAIGVGGFGKVYRGELEDGTLIAIKRATPHSQQGLAEFETEIVMLSRLRHRHLVSLIGFCDEHNEMILVYEYMANGTLRSHLFGSNLPPLSWKQRLEACIGSARGLHYLHTGSERGIIHRDVKTTNILLDENFVAKMSDFGLSKAGPSMDHTHVSTAVKGSFGYLDPEYFRRQQLTEKSDVYSFGVVLFEAVCARAVINPTLPKDQINLAEWALSWQKQRNLESIIDSNLRGNYSPESLEKYGEIAEKCLADEGKNRPMMGEVLWSLEYVLQIHEAWLRKQNGENSFSSSQAVEEAPESFTLPACSNQDSSETEQSQTGSALHNSA

SEQ ID NO: 83305 - protein, 622 aa, Arabidopsis thaliana
  peptide (1)..(622): Ceres Seq. ID no. 12669596
MYRLNVGGPKLGPSKDLKLYRTWETDLSYMVIENAGVEVKNSSNITYALADDSPVAPLLVYETARMMSNTEVLEKRFNISWKFEVDPNFDYLVRLHFCELLVDKQNQRIFRIYINNQTAAGNFDIFAHAGGKNKGIYQDYLDPVSSKNDVLWIQLGPDSSVGASGDALLSGLEIFKLSKNGNLAHLIRFDSTGHSVSDSKMRIIWISVGAGIAIIIFFVFLGILVVCLCKKRRSKSDESKNNPPGWRPLFLHVNNSTANAKATGGSLRLNTLAASTMGRKFTLAEIRAATKNFDDGLAIGVGGFGKVYRGELEDGTLIAIKRATPHSQQGLAEFETEIVMLSRLRHRHLVSLIGFCDEHNEMILVYEYMANGTLRSHLFGSNLPPLSWKQRLEACIGSARGLHYLHTGSERGIIHRDVKTTNILLDENFVAKMSDFGLSKAGPSMDHTHVSTAVKGSFGYLDPEYFRRQQLTEKSDVYSFGVVLFEAVCARAVINPTLPKDQINLAEWALSWQKQRNLESIIDSNLRGNYSPESLEKYGEIAEKCLADEGKNRPMMGEVLWSLEYVLQIHEAWLRKQNGENSFSSSQAVEEAPESFTLPACSNQDSSETEQSQTGSALHNSA

SEQ ID NO: 83306 - DNA, 1893 bp, Arabidopsis thaliana
  misc_feature (1)..(1893): Ceres Seq. ID no. 12669611
  misc_feature (1)..(1893): Ortholog of  Ceres SEQ ID NO 12460981 as cited in SEQ ID NO 65146
tttattcacaaccccccattaatctctttctctgctgcagcttaaactttaaaaaacactacaagaacaacttcttcaggttctataaagagattccgaagaagaatcttttccagaaacagtgctttaagatgactgctgaagttaaggttgaggagaaacaggtggagtcagaggttgttattgctcctgctgttgttcctgaggagactactgttaaggctgttgtggaagagactaaggttgaagaagatgagagcaagcctgagggtgtggagaagagtgcttccttcaaagaagagagtgatttctttgctgatttgaaagaatctgagaaaaaggcactgagtgatctcaagtctaagcttgaggaagctattgttgacaacactctcttaaagacgaagaagaaggagagctctcctatgaaggagaagaaggaagaggttgtgaaacctgaagctgaggttgagaagaagaaggaagaagcagcagaggagaaggttgaagaagagaagaaatctgaggctgttgttaccgaagaagcaccgaaagctgagactgttgaggctgttgttacagaggagataatccccaaggaagaagtgactactgttgttgagaaggtagaagaagaaaccaaggaagaagagaagaaaaccgaggatgttgttactgaagaagtgaaagctgagactattgaggtggaggatgaagatgagtcggtggataaggatatcgagctttggggagtgccattgcttccaagcaaaggagctgaaagcacggatgttatcctcttgaagttcttgagagcaagagactttaaagtcaacgaagcctttgagatgctgaagaaaaccctcaaatggagaaagcaaaacaagattgattcgatccttggagaggagtttggggaggatcttgccactgcagcttacatgaacggtgtggaccgcgagtcccacccagtttgttacaatgtccacagcgaggagctttaccagacgattgggtcggagaagaacagagagaagttcttgagatggaggtttcagctgatggagaagggaatccagaagcttaatcttaaaccaggaggtgttacttctcttctccagatccacgatctcaaaaacgctcctggagtgtcaagaacagagatttgggtcggaatcaagaaagtaatcgagactttgcaggacaactatccggaattcgtgtccagaaacatattcatcaacgttccattctggttctacgccatgagagctgtcctctcgccattcttaactcaacgaaccaagagcaagtttgttgtggctcgtcccgctaaggtcagagagactcttctcaagtacattccagctgatgagctcccagttcagtacggtgggttcaaaacagtagacgataccgaattctccaacgaaactgtctctgaagttgttgttaagcctggatcatctgaaaccatcgaaatcccagctcctgagactgaaggtacattggtatgggacatagcggttttgggatgggaagtgaattacaaggaagagtttgtgccaacagaagaaggagcttacacggtaatagtccaaaaggtgaagaagatgggagcaaatgaaggaccaatcaggaacagtttcaagaacagtcaggctggtaagattgttcttaccgttgacaatgtctctggcaagaagaagaaagttctgtacaggtacagaaccaagactgaatcctcttcctgaagtggaggatttcatgtagtctctggatatataatattcttttctaaatttaaacgtttggtgttattatttatttttgagtgatatgtaagagaaagagatactcccattatttcattgatattcaatcttttgcttc

SEQ ID NO: 83307 - protein, 583 aa, Arabidopsis thaliana
  peptide (1)..(583): Ceres Seq. ID no. 12669612
YSQPPINLFLCCSLNFKKHYKNNFFRFYKEIPKKNLFQKQCFKMTAEVKVEEKQVESEVVIAPAVVPEETTVKAVVEETKVEEDESKPEGVEKSASFKEESDFFADLKESEKKALSDLKSKLEEAIVDNTLLKTKKKESSPMKEKKEEVVKPEAEVEKKKEEAAEEKVEEEKKSEAVVTEEAPKAETVEAVVTEEIIPKEEVTTVVEKVEEETKEEEKKTEDVVTEEVKAETIEVEDEDESVDKDIELWGVPLLPSKGAESTDVILLKFLRARDFKVNEAFEMLKKTLKWRKQNKIDSILGEEFGEDLATAAYMNGVDRESHPVCYNVHSEELYQTIGSEKNREKFLRWRFQLMEKGIQKLNLKPGGVTSLLQIHDLKNAPGVSRTEIWVGIKKVIETLQDNYPEFVSRNIFINVPFWFYAMRAVLSPFLTQRTKSKFVVARPAKVRETLLKYIPADELPVQYGGFKTVDDTEFSNETVSEVVVKPGSSETIEIPAPETEGTLVWDIAVLGWEVNYKEEFVPTEEGAYTVIVQKVKKMGANEGPIRNSFKNSQAGKIVLTVDNVSGKKKKVLYRYRTKTESSS

SEQ ID NO: 83308 - protein, 540 aa, Arabidopsis thaliana
  peptide (1)..(540): Ceres Seq. ID no. 12669613
MTAEVKVEEKQVESEVVIAPAVVPEETTVKAVVEETKVEEDESKPEGVEKSASFKEESDFFADLKESEKKALSDLKSKLEEAIVDNTLLKTKKKESSPMKEKKEEVVKPEAEVEKKKEEAAEEKVEEEKKSEAVVTEEAPKAETVEAVVTEEIIPKEEVTTVVEKVEEETKEEEKKTEDVVTEEVKAETIEVEDEDESVDKDIELWGVPLLPSKGAESTDVILLKFLRARDFKVNEAFEMLKKTLKWRKQNKIDSILGEEFGEDLATAAYMNGVDRESHPVCYNVHSEELYQTIGSEKNREKFLRWRFQLMEKGIQKLNLKPGGVTSLLQIHDLKNAPGVSRTEIWVGIKKVIETLQDNYPEFVSRNIFINVPFWFYAMRAVLSPFLTQRTKSKFVVARPAKVRETLLKYIPADELPVQYGGFKTVDDTEFSNETVSEVVVKPGSSETIEIPAPETEGTLVWDIAVLGWEVNYKEEFVPTEEGAYTVIVQKVKKMGANEGPIRNSFKNSQAGKIVLTVDNVSGKKKKVLYRYRTKTESSS

SEQ ID NO: 83309 - protein, 442 aa, Arabidopsis thaliana
  peptide (1)..(442): Ceres Seq. ID no. 12669614
MKEKKEEVVKPEAEVEKKKEEAAEEKVEEEKKSEAVVTEEAPKAETVEAVVTEEIIPKEEVTTVVEKVEEETKEEEKKTEDVVTEEVKAETIEVEDEDESVDKDIELWGVPLLPSKGAESTDVILLKFLRARDFKVNEAFEMLKKTLKWRKQNKIDSILGEEFGEDLATAAYMNGVDRESHPVCYNVHSEELYQTIGSEKNREKFLRWRFQLMEKGIQKLNLKPGGVTSLLQIHDLKNAPGVSRTEIWVGIKKVIETLQDNYPEFVSRNIFINVPFWFYAMRAVLSPFLTQRTKSKFVVARPAKVRETLLKYIPADELPVQYGGFKTVDDTEFSNETVSEVVVKPGSSETIEIPAPETEGTLVWDIAVLGWEVNYKEEFVPTEEGAYTVIVQKVKKMGANEGPIRNSFKNSQAGKIVLTVDNVSGKKKKVLYRYRTKTESSS

SEQ ID NO: 83310 - DNA, 1385 bp, Arabidopsis thaliana
  misc_feature (1)..(1385): Ceres Seq. ID no. 12669701
  misc_feature (1)..(1385): Ortholog of  Ceres SEQ ID NO 12617080 as cited in SEQ ID NO 63943
  misc_feature (1)..(1385): Ortholog of  Ceres SEQ ID NO 13657621 as cited in SEQ ID NO 65802
gatgctacttctgatttaccctttctctgcttttttctctcactctctcagttttctcctccttgattcctaaagtcttctcctttgcgtgcatttcttcaattttcagattcttcctaaggtggtagaatgatgaaatgagaatcgatagataagagtttaaagagcaccagaatctttgttatcttgcaatgtcgacgacgtctttgcaaacgattggtgctattaagtcttatcatcatcaagctcagcatttggttaagaattatctcttagctgatccttttattccttacacttctgtcctcaccggcattttcctttgcaaagtggtttatgatctttgtcattttatcagcaactcacattctaagacttatatcatcctcacgaaaattcaaagaatcgaatggaataaccgtggtatctcgacagttcatgctatttttatttcggctatgtcgctgtactttgtgttctggtccgacctcttttccgataggtggcataatgatcttgttgttttccggagctcacgactttcttctcttggtttagggatatctattggttacttccttgctgatcttgggatgatcttctggaaatatccttctttgggtggaattgagtatattgtgcatcactcgctatcgggggttgcagttgcctactctttattttccggggaaggacagttatatacctacatggtcctcatctccgagattacaaccccagagatcaacttgagatggtacctggacacggctggtatgaaaaaatcattggcatacgttgttaatggcgttttcatcttcttggcttggctggttgctagaattctactgttcatatacatgttttatcatgtttatctccactacaaccaggtcatgaggatgcacatctttggttacgttctggtattcggcgtaccagctgcgctcggtgtcatgaacttgatatggttcgggaagattgtgagaggggtaaagaaaacattagcaaagagatgtgaatgttgagattggtgagtcttcctcacaccgtttcttcacttcatcatctccttacttcttcgtccctctgacatatgcctgtctctctagtgtaagtagtttttgtctgatgaagaaagaaaaacgaaaaaacaaaaatgataatgatacgatcctctgactctgtaaatgatcaaaattcaagtctcttctttacgttttctcattatacaatgtaattctgttttcattctaatagttttggttctagggttttgattcaatttctgctacatttcgtttaaccggagttcgatacagtactaccaaaatgatgaacaactgtttggtgttcaagttctatggaagagaaaacatttggtc

SEQ ID NO: 83311 - protein, 278 aa, Arabidopsis thaliana
  peptide (1)..(278): Ceres Seq. ID no. 12669702
MSTTSLQTIGAIKSYHHQAQHLVKNYLLADPFIPYTSVLTGIFLCKVVYDLCHFISNSHSKTYIILTKIQRIEWNNRGISTVHAIFISAMSLYFVFWSDLFSDRWHNDLVVFRSSRLSSLGLGISIGYFLADLGMIFWKYPSLGGIEYIVHHSLSGVAVAYSLFSGEGQLYTYMVLISEITTPEINLRWYLDTAGMKKSLAYVVNGVFIFLAWLVARILLFIYMFYHVYLHYNQVMRMHIFGYVLVFGVPAALGVMNLIWFGKIVRGVKKTLAKRCEC

SEQ ID NO: 83312 - protein, 189 aa, Arabidopsis thaliana
  peptide (1)..(189): Ceres Seq. ID no. 12669703
MSLYFVFWSDLFSDRWHNDLVVFRSSRLSSLGLGISIGYFLADLGMIFWKYPSLGGIEYIVHHSLSGVAVAYSLFSGEGQLYTYMVLISEITTPEINLRWYLDTAGMKKSLAYVVNGVFIFLAWLVARILLFIYMFYHVYLHYNQVMRMHIFGYVLVFGVPAALGVMNLIWFGKIVRGVKKTLAKRCEC

SEQ ID NO: 83313 - protein, 144 aa, Arabidopsis thaliana
  peptide (1)..(144): Ceres Seq. ID no. 12669704
MIFWKYPSLGGIEYIVHHSLSGVAVAYSLFSGEGQLYTYMVLISEITTPEINLRWYLDTAGMKKSLAYVVNGVFIFLAWLVARILLFIYMFYHVYLHYNQVMRMHIFGYVLVFGVPAALGVMNLIWFGKIVRGVKKTLAKRCEC

SEQ ID NO: 83314 - DNA, 1773 bp, Arabidopsis thaliana
  misc_feature (1)..(1773): Ceres Seq. ID no. 12669712
  misc_feature (1)..(1773): Ortholog of  Ceres SEQ ID NO 15178310 as cited in SEQ ID NO 1089
  misc_feature (1)..(1773): Ortholog of  Ceres SEQ ID NO 14303173 as cited in SEQ ID NO 66550
atgggcatctgtgagatgaaaagctgctgctcatggcttcttttgatctcgttgctttgctcactatctaatgaaagtcaagcgattagtcctgacggcgaggcgcttctgagcttcagaaatgcagttactagatcagatagtttcatccatcagtggagaccggaagatccagatccatgtaactggaacggagtgacatgtgatgcaaaaacgaaaagagttataaccttgaatcttacttatcacaaaataatgggacctttacctcctgatattggaaagttggaccatttaaggcttttaatgcttcacaacaatgctttatatggagcaatacctacagcattgggaaattgcacagcattggaggaaattcacttgcagagtaactacttcactggaccaatcccagctgaaatgggagacctgcctggccttcaaaagctggacatgtcaagcaacactctcagtggacctatccctgcttcgcttgggcagttaaaaaagcttagtaacttcaatgtctcgaacaacttcctggtggggcaaataccttcagacggagtgctctctggattttctaagaactccttcattggaaatcttaacttgtgtggaaagcatgttgatgtcgtgtgccaagatgatagtggaaacccttcatcacattctcaatcaggtcaaaatcaaaagaaaaactctggtaagctgctgattagcgcatcagcaactgtaggtgcgctactcctagttgcactcatgtgtttctggggatgctttctatataaaaagctcggtaaagtcgagattaaaagccttgcaaaggatgttggtggaggtgcgtctattgtgatgttccacggagatttaccttactcttccaaagatatcattaagaagctggaaatgttgaatgaagagcacataattggatgtggaggctttggaacggtgtataagctggccatggatgatggcaaagtctttgcattgaagagaattctaaagttaaacgaagggtttgatcggttttttgagcgggagcttgagattcttgggagcatcaaacaccgatacctcgtgaatctacgtggatattgcaattcaccaacatcaaagctactgttatatgattacttgcccggtggtagccttgatgaagcacttcatgagagaggcgagcaattggactgggattcacgcgtaaatatcatcataggagctgcgaaagggttatcatatttgcatcatgattgttctcctcggattatacatcgtgatataaagtcgagcaacattttgcttgatggcaatctcgaggcacgggtatcggattttggtctagccaagttgttggaagacgaagaatctcatatcacaaccattgttgcaggcacatttgggtacctagctccagaatatatgcaaagtggtagagcaactgagaaaaccgatgtatacagttttggggttttggttcttgaagtcttgagtgggaaaagaccaaccgatgcttccttcatcgagaaaggccttaacgttgttggttggctaaagttcttaatcagcgaaaaacggccaagggatattgttgatccaaactgtgaaggaatgcagatggagagccttgacgctctactatcaatagcaacacagtgtgtgtctccgagtccagaagagcgtccaacgatgcatcgggttgtccagttacttgaatcagaggtcatgactccttgtcccagcgaattttatgattccagctctgattaa

SEQ ID NO: 83315 - protein, 590 aa, Arabidopsis thaliana
  peptide (1)..(590): Ceres Seq. ID no. 12669713
MGICEMKSCCSWLLLISLLCSLSNESQAISPDGEALLSFRNAVTRSDSFIHQWRPEDPDPCNWNGVTCDAKTKRVITLNLTYHKIMGPLPPDIGKLDHLRLLMLHNNALYGAIPTALGNCTALEEIHLQSNYFTGPIPAEMGDLPGLQKLDMSSNTLSGPIPASLGQLKKLSNFNVSNNFLVGQIPSDGVLSGFSKNSFIGNLNLCGKHVDVVCQDDSGNPSSHSQSGQNQKKNSGKLLISASATVGALLLVALMCFWGCFLYKKLGKVEIKSLAKDVGGGASIVMFHGDLPYSSKDIIKKLEMLNEEHIIGCGGFGTVYKLAMDDGKVFALKRILKLNEGFDRFFERELEILGSIKHRYLVNLRGYCNSPTSKLLLYDYLPGGSLDEALHERGEQLDWDSRVNIIIGAAKGLSYLHHDCSPRIIHRDIKSSNILLDGNLEARVSDFGLAKLLEDEESHITTIVAGTFGYLAPEYMQSGRATEKTDVYSFGVLVLEVLSGKRPTDASFIEKGLNVVGWLKFLISEKRPRDIVDPNCEGMQMESLDALLSIATQCVSPSPEERPTMHRVVQLLESEVMTPCPSEFYDSSSD

SEQ ID NO: 83316 - protein, 585 aa, Arabidopsis thaliana
  peptide (1)..(585): Ceres Seq. ID no. 12669714
MKSCCSWLLLISLLCSLSNESQAISPDGEALLSFRNAVTRSDSFIHQWRPEDPDPCNWNGVTCDAKTKRVITLNLTYHKIMGPLPPDIGKLDHLRLLMLHNNALYGAIPTALGNCTALEEIHLQSNYFTGPIPAEMGDLPGLQKLDMSSNTLSGPIPASLGQLKKLSNFNVSNNFLVGQIPSDGVLSGFSKNSFIGNLNLCGKHVDVVCQDDSGNPSSHSQSGQNQKKNSGKLLISASATVGALLLVALMCFWGCFLYKKLGKVEIKSLAKDVGGGASIVMFHGDLPYSSKDIIKKLEMLNEEHIIGCGGFGTVYKLAMDDGKVFALKRILKLNEGFDRFFERELEILGSIKHRYLVNLRGYCNSPTSKLLLYDYLPGGSLDEALHERGEQLDWDSRVNIIIGAAKGLSYLHHDCSPRIIHRDIKSSNILLDGNLEARVSDFGLAKLLEDEESHITTIVAGTFGYLAPEYMQSGRATEKTDVYSFGVLVLEVLSGKRPTDASFIEKGLNVVGWLKFLISEKRPRDIVDPNCEGMQMESLDALLSIATQCVSPSPEERPTMHRVVQLLESEVMTPCPSEFYDSSSD

SEQ ID NO: 83317 - protein, 505 aa, Arabidopsis thaliana
  peptide (1)..(505): Ceres Seq. ID no. 12669715
MGPLPPDIGKLDHLRLLMLHNNALYGAIPTALGNCTALEEIHLQSNYFTGPIPAEMGDLPGLQKLDMSSNTLSGPIPASLGQLKKLSNFNVSNNFLVGQIPSDGVLSGFSKNSFIGNLNLCGKHVDVVCQDDSGNPSSHSQSGQNQKKNSGKLLISASATVGALLLVALMCFWGCFLYKKLGKVEIKSLAKDVGGGASIVMFHGDLPYSSKDIIKKLEMLNEEHIIGCGGFGTVYKLAMDDGKVFALKRILKLNEGFDRFFERELEILGSIKHRYLVNLRGYCNSPTSKLLLYDYLPGGSLDEALHERGEQLDWDSRVNIIIGAAKGLSYLHHDCSPRIIHRDIKSSNILLDGNLEARVSDFGLAKLLEDEESHITTIVAGTFGYLAPEYMQSGRATEKTDVYSFGVLVLEVLSGKRPTDASFIEKGLNVVGWLKFLISEKRPRDIVDPNCEGMQMESLDALLSIATQCVSPSPEERPTMHRVVQLLESEVMTPCPSEFYDSSSD

SEQ ID NO: 83318 - DNA, 1335 bp, Arabidopsis thaliana
  misc_feature (1)..(1335): Ceres Seq. ID no. 12669723
  misc_feature (1)..(1335): Ortholog of  Ceres SEQ ID NO 15227139 as cited in SEQ ID NO 0
atgaaaatctttgatgttagtttcaccggagagttcatagtcaaagcttctggcgaccaaccggagaaagttaatagccttaatctctcaaattttgaccttctttccggccgttttccggtgacctacttttacttctaccccaagcaaccacaattatcctttgaaacaatcgtcaaatccctccaaagctctctctctcaaactctcagctacttctatcctttcgcgggtcagattgttcccaatgaaacatcacaagaagagcctatgatcatctgtaacaacaatggagctttgttcgttgaagcccgagctcatgtcgatctcaagagtttagatttttacaatcttgatgcgtttctccaatcaaagctggtacaggttaacccggatttctctttacagattcaagcgacagagttcgaatgtggaggcctcgctttaacattcacgtttgatcatgctttaggagacgcgagctccttcgggaaattcctcactttgtggtcagagatatcgagaaataagccggtttcttgtgtaccagatcacaggagaaacctcctccgggcacgctctcctccacgttatgaccctcacttggacaaaactttcataaaatgcagtgaggaagacattaagaacataccgatgtctaaaacgctcatcaagcgtctctaccacatcggtgcttcgagcctagacgcgttgcaagctctagctactgtaaacggagagagcaggacaaagattgaagctttctccgcttatgtgtggaagaaaatggtggattctatagagagcggtcataaaacctgcaagatgggatggcttgtcgacggtagaggaagacttgagaccgttacctcgagctacataggaaacgtattgtctatagctgtaggtgaagccagtatcgaaaatctgaagaaaaaccatgtgtcagatatagcaaacatagtgcataaatcgataacagaagtgacaaacgatactcatttcacagatttgatagattggatcgagagtcaccgacctggactgatgttggctcgggtggttctcggacaagaaggaccagctttggtcttgtcttcaggacgacggttccctgtggctgaattggattttggatttggtgctcctttcctaggaactgtatgttcaacggttgagaaaataggagttggttacctgaaccagcgacctagcgcctgcaatgatggctcgtggtcggtttctgctattgtgtggcctgaactcgctacagctttagagtctgactcggtgtttcagccaatgtctgctaaacatcttcaactccagacctga

SEQ ID NO: 83319 - protein, 444 aa, Arabidopsis thaliana
  peptide (1)..(444): Ceres Seq. ID no. 12669724
MKIFDVSFTGEFIVKASGDQPEKVNSLNLSNFDLLSGRFPVTYFYFYPKQPQLSFETIVKSLQSSLSQTLSYFYPFAGQIVPNETSQEEPMIICNNNGALFVEARAHVDLKSLDFYNLDAFLQSKLVQVNPDFSLQIQATEFECGGLALTFTFDHALGDASSFGKFLTLWSEISRNKPVSCVPDHRRNLLRARSPPRYDPHLDKTFIKCSEEDIKNIPMSKTLIKRLYHIGASSLDALQALATVNGESRTKIEAFSAYVWKKMVDSIESGHKTCKMGWLVDGRGRLETVTSSYIGNVLSIAVGEASIENLKKNHVSDIANIVHKSITEVTNDTHFTDLIDWIESHRPGLMLARVVLGQEGPALVLSSGRRFPVAELDFGFGAPFLGTVCSTVEKIGVGYLNQRPSACNDGSWSVSAIVWPELATALESDSVFQPMSAKHLQLQT

SEQ ID NO: 83320 - protein, 354 aa, Arabidopsis thaliana
  peptide (1)..(354): Ceres Seq. ID no. 12669725
MIICNNNGALFVEARAHVDLKSLDFYNLDAFLQSKLVQVNPDFSLQIQATEFECGGLALTFTFDHALGDASSFGKFLTLWSEISRNKPVSCVPDHRRNLLRARSPPRYDPHLDKTFIKCSEEDIKNIPMSKTLIKRLYHIGASSLDALQALATVNGESRTKIEAFSAYVWKKMVDSIESGHKTCKMGWLVDGRGRLETVTSSYIGNVLSIAVGEASIENLKKNHVSDIANIVHKSITEVTNDTHFTDLIDWIESHRPGLMLARVVLGQEGPALVLSSGRRFPVAELDFGFGAPFLGTVCSTVEKIGVGYLNQRPSACNDGSWSVSAIVWPELATALESDSVFQPMSAKHLQLQT

SEQ ID NO: 83321 - protein, 226 aa, Arabidopsis thaliana
  peptide (1)..(226): Ceres Seq. ID no. 12669726
MSKTLIKRLYHIGASSLDALQALATVNGESRTKIEAFSAYVWKKMVDSIESGHKTCKMGWLVDGRGRLETVTSSYIGNVLSIAVGEASIENLKKNHVSDIANIVHKSITEVTNDTHFTDLIDWIESHRPGLMLARVVLGQEGPALVLSSGRRFPVAELDFGFGAPFLGTVCSTVEKIGVGYLNQRPSACNDGSWSVSAIVWPELATALESDSVFQPMSAKHLQLQT

SEQ ID NO: 83322 - DNA, 1618 bp, Arabidopsis thaliana
  misc_feature (1)..(1618): Ceres Seq. ID no. 12669772
  misc_feature (1)..(1618): Ortholog of  Ceres SEQ ID NO 15176444 as cited in SEQ ID NO 53249
aaaaataaaccaaaatttaataacagagattatttgccttttaatacatatacacacacgcacatatctacctgcatcttcttcataatcattcctaagaaattctctctctcacacactcaagaacaagacaagagtcaagaaaaatcagatgagtctctatagcttcattagcttgttgttactgtttctcatcacgatttcaatggagtttaaagagacatcatccttaagaagagacatgaccaagcttttaaagctccaagagaagattcaagaaagactcgcagtcactcccactctctcaccagtgtcttctccttcttctcactctcccaaaatggttgggaaggtgatatacccgattggttacggagctgaccctacaggtggacaagacagtagtgacgcaatacttgaagctttaactgatgcttttcagttacaaactggacttgagatgctgccacgtgtcgctgatttaggtggtctagttattgatctccaaggtggcagttacatgatcggaaaacctctcaggttcccttcctccggtggcggaaatcttgtggtgaaaggtgggactttccgggcatcagaactgtttcctggtgataggcatttagttgagcttgtagcatcaaacgctaagaaaccaatgaaaatgtcgccagaggagtctttctccgatcagaaagaccagagctctgggatcttctatgaggatgtgaccttccaagatgttctcttcgactcaagattccgaggaggtggtattttggtgattgactcagctcgtatccgtataaccaattgttatttcctccatttcacaacgcaagggattaaagtccaaggaggtcatgagacatacatttcaaactccttcttggggcaacattcaacggtaggaggagacagagaagaaagaggatttactgggacaggaatcgatatctcgagtaacgacaatgccattacggatgtagtgattttctcggctggtatcggtatctctttgaatggtggtgcaaatatggttacgggtgtgcattgctacaataaagctacatggtttggtggcattggcattctagtgaaatcacatttaacgaggatagataattgttaccttgattacacaggtatagtcatagaagaccctgtccatgttcatgtcaccaatgctttgttcttaggagatgcaaacatcgtcttgagatcggtacacgggaagatttccggtgtaaacatcgtcaacaacatgtttagcggtaccgccaaaaacaacttcccgattgtcaagctagaaggagagtttcatgatattaatcaagttgtgattgatcaaaacaatgcagaagggatgatgctgaaatcaacaaccggaaaggccatggtttccgcaaatggaacacgatggatcgctgatttttcccctgttttggtattccctaaccggataaaccattaccagcattcgtttttcgctcaatccggacagatccctgcaaatgcagtgaccaatgtctccaacaatatggtggttgtagaaaccgatagagctgtaactggaaccgtgtcaataattgcttatcagtaaaacaacattcttcac

SEQ ID NO: 83323 - protein, 483 aa, Arabidopsis thaliana
  peptide (1)..(483): Ceres Seq. ID no. 12669773
MSLYSFISLLLLFLITISMEFKETSSLRRDMTKLLKLQEKIQERLAVTPTLSPVSSPSSHSPKMVGKVIYPIGYGADPTGGQDSSDAILEALTDAFQLQTGLEMLPRVADLGGLVIDLQGGSYMIGKPLRFPSSGGGNLVVKGGTFRASELFPGDRHLVELVASNAKKPMKMSPEESFSDQKDQSSGIFYEDVTFQDVLFDSRFRGGGILVIDSARIRITNCYFLHFTTQGIKVQGGHETYISNSFLGQHSTVGGDREERGFTGTGIDISSNDNAITDVVIFSAGIGISLNGGANMVTGVHCYNKATWFGGIGILVKSHLTRIDNCYLDYTGIVIEDPVHVHVTNALFLGDANIVLRSVHGKISGVNIVNNMFSGTAKNNFPIVKLEGEFHDINQVVIDQNNAEGMMLKSTTGKAMVSANGTRWIADFSPVLVFPNRINHYQHSFFAQSGQIPANAVTNVSNNMVVVETDRAVTGTVSIIAYQ

SEQ ID NO: 83324 - protein, 465 aa, Arabidopsis thaliana
  peptide (1)..(465): Ceres Seq. ID no. 12669774
MEFKETSSLRRDMTKLLKLQEKIQERLAVTPTLSPVSSPSSHSPKMVGKVIYPIGYGADPTGGQDSSDAILEALTDAFQLQTGLEMLPRVADLGGLVIDLQGGSYMIGKPLRFPSSGGGNLVVKGGTFRASELFPGDRHLVELVASNAKKPMKMSPEESFSDQKDQSSGIFYEDVTFQDVLFDSRFRGGGILVIDSARIRITNCYFLHFTTQGIKVQGGHETYISNSFLGQHSTVGGDREERGFTGTGIDISSNDNAITDVVIFSAGIGISLNGGANMVTGVHCYNKATWFGGIGILVKSHLTRIDNCYLDYTGIVIEDPVHVHVTNALFLGDANIVLRSVHGKISGVNIVNNMFSGTAKNNFPIVKLEGEFHDINQVVIDQNNAEGMMLKSTTGKAMVSANGTRWIADFSPVLVFPNRINHYQHSFFAQSGQIPANAVTNVSNNMVVVETDRAVTGTVSIIAYQ

SEQ ID NO: 83325 - protein, 453 aa, Arabidopsis thaliana
  peptide (1)..(453): Ceres Seq. ID no. 12669775
MTKLLKLQEKIQERLAVTPTLSPVSSPSSHSPKMVGKVIYPIGYGADPTGGQDSSDAILEALTDAFQLQTGLEMLPRVADLGGLVIDLQGGSYMIGKPLRFPSSGGGNLVVKGGTFRASELFPGDRHLVELVASNAKKPMKMSPEESFSDQKDQSSGIFYEDVTFQDVLFDSRFRGGGILVIDSARIRITNCYFLHFTTQGIKVQGGHETYISNSFLGQHSTVGGDREERGFTGTGIDISSNDNAITDVVIFSAGIGISLNGGANMVTGVHCYNKATWFGGIGILVKSHLTRIDNCYLDYTGIVIEDPVHVHVTNALFLGDANIVLRSVHGKISGVNIVNNMFSGTAKNNFPIVKLEGEFHDINQVVIDQNNAEGMMLKSTTGKAMVSANGTRWIADFSPVLVFPNRINHYQHSFFAQSGQIPANAVTNVSNNMVVVETDRAVTGTVSIIAYQ

SEQ ID NO: 83326 - DNA, 2598 bp, Arabidopsis thaliana
  misc_feature (1)..(2598): Ceres Seq. ID no. 12669816
  misc_feature (1)..(2598): Ortholog of  Ceres SEQ ID NO 13594209 as cited in SEQ ID NO 59089
  misc_feature (1)..(2598): Ortholog of  Ceres SEQ ID NO 13502874 as cited in SEQ ID NO 66298
  misc_feature (1)..(2598): Ortholog of  Ceres SEQ ID NO 12614124 as cited in SEQ ID NO 68392
atggagatgatattaatctctttgtgcttaaccaccttattagcatttctcttcctaaaaccactcctcaaacgaatcaccaccaccaaacctaagttaccaccgtctccatggcggcttccggtgattggaaacctccaccagctcggtcccaaccctcaccgctatctccattccctcagcctccggtatgggccactcatgctccttcatttcggccgtgtacctgtgcttgtggtttcttgtcctgacgtgactaatgacatcatgaaaacacacgaccttaagttcgcaaaccgcccgaaatcaaaagctattaatatatttatggaaggtggccgtgatataatctttggcccctacggagaagattggaagagtatgaagagtctgggtgtggtacatctgctcaataacaaaatggttaggtcctttgagaacctaagagaagaagagatcaaagtaatgacagagaagctggaagaagcatcttcatcttcttcatcagtaaatctaagcaaactccttatgactcttaccaacgatatcatatgcagaatcaccttgggaagaaaatataacgaagaggaaggtggaatcgatatcaagaacttagtgatgacatcctctgagttttttggcaaattcttttttggagattttattcctagtttggcatggatagactggatcagtggcatagatgataaaatgaaggacataaataacaagttagattgttttttagacagcatggtgcaagaacatgttgatgccgatcacaaagagccatcagattttattgatatgttgctactgattcaaaaggataaaaccaaacggtttaagtttgacagaagtgacttaatactcatactcaaggatatgtttttctctggaacagcaacaactgcctcacaattagaatggacaatgacagagcttatgagacatccagagtgtatgaaaaaacttcaagatgagattaattcattttcgacacataatttgaatgtaacggagaaagaagttgagaaaatgaactatttacattgcgtgattaaggaggggctacggttgcatccctctggtccactattgttcagactaccaagtgaagatgtccaattaaagggatatgacatttctgcagggacacatgtcataatcaatgcttgggcactccaacgaaaccctgcgatatgggggcttgatgccaatgaatatagaccggagagacattttgggagaagactttgccctggaatcggattttctttggttttgtccaaattggcactagccaaccttgtgaaacgattcaactggagactcaaggtcggaccagtaggagatgataagcctgatctagctgaagcatctggtattgatgtttgtccctttctcttcctaaacccactcctcaaacgaaccaccaccaccaaacctaaccaaccaccctctccctggcggcttccggttatcggatacctccaccagctcagcctccaccctcaccgctcctttcgttccctcagcctccgcctatggtccgctcatgctccttcacttcggtcgtgtccctaccctcgattctcgaagtatatatcatcctctgacgtagctcatgacgtcatgaaaacacacgatcttaagtttgccaaccgtcccaaaaccaaagctgtcgatataattattaatggtgggagagatgtggctttctcctcctacggcgaatattggagacagatgaagagaagaagagataacatcagtgatatggggaagcttgagaaacaaagttcttcttctttgccggtaaatctaagtgatttactccttaacatgtcaaacgatgtgatatgtagaattgctgtgggaagaaaatatagccgggaggaaaacactagcgattttgaaaatcaactgagaaaagtcatggagcttctaggcgcatttcctgtcggagattacataccgggtttggcgtggatagataaagtccgcggcttggatcgtaaaatggaggaaattcaactagagaagacaaacgaatttgagcttgaaagaagcgacatcaggctcatcattttggaattcttcctaggaggaacgacaacaactttcacggccatcgattgggcaatgacacttgtcgtaagacatccagaatctatgaaaaaactccaagaagagatccaaacatattccaggaataagttatatgtaccagaagaagaagttgagaacatgaaatacttaaaagctgtgattaaagaagtctttcgtctacatcctccaggcccattgtcaattcccagacagcttagtgaagatgtattcatcaacgcttgggccatccatcgagataccgaaaaatggggaccatatgcagaagagtttaagccagagaggcatttggatctaccactgaatttccaaggacaagatttcaacttcattccattcggatcgggaagaaggttatgtcctgacatagattttgcaacaatgttaattgaggtgggattggcaaacttcgtgtaccgcttcaactggagagttgagactagaccacttggagatgatgatggttga

SEQ ID NO: 83327 - protein, 865 aa, Arabidopsis thaliana
  peptide (1)..(865): Ceres Seq. ID no. 12669817
MEMILISLCLTTLLAFLFLKPLLKRITTTKPKLPPSPWRLPVIGNLHQLGPNPHRYLHSLSLRYGPLMLLHFGRVPVLVVSCPDVTNDIMKTHDLKFANRPKSKAINIFMEGGRDIIFGPYGEDWKSMKSLGVVHLLNNKMVRSFENLREEEIKVMTEKLEEASSSSSSVNLSKLLMTLTNDIICRITLGRKYNEEEGGIDIKNLVMTSSEFFGKFFFGDFIPSLAWIDWISGIDDKMKDINNKLDCFLDSMVQEHVDADHKEPSDFIDMLLLIQKDKTKRFKFDRSDLILILKDMFFSGTATTASQLEWTMTELMRHPECMKKLQDEINSFSTHNLNVTEKEVEKMNYLHCVIKEGLRLHPSGPLLFRLPSEDVQLKGYDISAGTHVIINAWALQRNPAIWGLDANEYRPERHFGRRLCPGIGFSLVLSKLALANLVKRFNWRLKVGPVGDDKPDLAEASGIDVCPFLFLNPLLKRTTTTKPNQPPSPWRLPVIGYLHQLSLHPHRSFRSLSLRLWSAHAPSLRSCPYPRFSKYISSSDVAHDVMKTHDLKFANRPKTKAVDIIINGGRDVAFSSYGEYWRQMKRRRDNISDMGKLEKQSSSSLPVNLSDLLLNMSNDVICRIAVGRKYSREENTSDFENQLRKVMELLGAFPVGDYIPGLAWIDKVRGLDRKMEEIQLEKTNEFELERSDIRLIILEFFLGGTTTTFTAIDWAMTLVVRHPESMKKLQEEIQTYSRNKLYVPEEEVENMKYLKAVIKEVFRLHPPGPLSIPRQLSEDVFINAWAIHRDTEKWGPYAEEFKPERHLDLPLNFQGQDFNFIPFGSGRRLCPDIDFATMLIEVGLANFVYRFNWRVETRPLGDDDG

SEQ ID NO: 83328 - protein, 863 aa, Arabidopsis thaliana
  peptide (1)..(863): Ceres Seq. ID no. 12669818
MILISLCLTTLLAFLFLKPLLKRITTTKPKLPPSPWRLPVIGNLHQLGPNPHRYLHSLSLRYGPLMLLHFGRVPVLVVSCPDVTNDIMKTHDLKFANRPKSKAINIFMEGGRDIIFGPYGEDWKSMKSLGVVHLLNNKMVRSFENLREEEIKVMTEKLEEASSSSSSVNLSKLLMTLTNDIICRITLGRKYNEEEGGIDIKNLVMTSSEFFGKFFFGDFIPSLAWIDWISGIDDKMKDINNKLDCFLDSMVQEHVDADHKEPSDFIDMLLLIQKDKTKRFKFDRSDLILILKDMFFSGTATTASQLEWTMTELMRHPECMKKLQDEINSFSTHNLNVTEKEVEKMNYLHCVIKEGLRLHPSGPLLFRLPSEDVQLKGYDISAGTHVIINAWALQRNPAIWGLDANEYRPERHFGRRLCPGIGFSLVLSKLALANLVKRFNWRLKVGPVGDDKPDLAEASGIDVCPFLFLNPLLKRTTTTKPNQPPSPWRLPVIGYLHQLSLHPHRSFRSLSLRLWSAHAPSLRSCPYPRFSKYISSSDVAHDVMKTHDLKFANRPKTKAVDIIINGGRDVAFSSYGEYWRQMKRRRDNISDMGKLEKQSSSSLPVNLSDLLLNMSNDVICRIAVGRKYSREENTSDFENQLRKVMELLGAFPVGDYIPGLAWIDKVRGLDRKMEEIQLEKTNEFELERSDIRLIILEFFLGGTTTTFTAIDWAMTLVVRHPESMKKLQEEIQTYSRNKLYVPEEEVENMKYLKAVIKEVFRLHPPGPLSIPRQLSEDVFINAWAIHRDTEKWGPYAEEFKPERHLDLPLNFQGQDFNFIPFGSGRRLCPDIDFATMLIEVGLANFVYRFNWRVETRPLGDDDG

SEQ ID NO: 83329 - protein, 798 aa, Arabidopsis thaliana
  peptide (1)..(798): Ceres Seq. ID no. 12669819
MLLHFGRVPVLVVSCPDVTNDIMKTHDLKFANRPKSKAINIFMEGGRDIIFGPYGEDWKSMKSLGVVHLLNNKMVRSFENLREEEIKVMTEKLEEASSSSSSVNLSKLLMTLTNDIICRITLGRKYNEEEGGIDIKNLVMTSSEFFGKFFFGDFIPSLAWIDWISGIDDKMKDINNKLDCFLDSMVQEHVDADHKEPSDFIDMLLLIQKDKTKRFKFDRSDLILILKDMFFSGTATTASQLEWTMTELMRHPECMKKLQDEINSFSTHNLNVTEKEVEKMNYLHCVIKEGLRLHPSGPLLFRLPSEDVQLKGYDISAGTHVIINAWALQRNPAIWGLDANEYRPERHFGRRLCPGIGFSLVLSKLALANLVKRFNWRLKVGPVGDDKPDLAEASGIDVCPFLFLNPLLKRTTTTKPNQPPSPWRLPVIGYLHQLSLHPHRSFRSLSLRLWSAHAPSLRSCPYPRFSKYISSSDVAHDVMKTHDLKFANRPKTKAVDIIINGGRDVAFSSYGEYWRQMKRRRDNISDMGKLEKQSSSSLPVNLSDLLLNMSNDVICRIAVGRKYSREENTSDFENQLRKVMELLGAFPVGDYIPGLAWIDKVRGLDRKMEEIQLEKTNEFELERSDIRLIILEFFLGGTTTTFTAIDWAMTLVVRHPESMKKLQEEIQTYSRNKLYVPEEEVENMKYLKAVIKEVFRLHPPGPLSIPRQLSEDVFINAWAIHRDTEKWGPYAEEFKPERHLDLPLNFQGQDFNFIPFGSGRRLCPDIDFATMLIEVGLANFVYRFNWRVETRPLGDDDG

SEQ ID NO: 83330 - DNA, 2330 bp, Arabidopsis thaliana
  misc_feature (1)..(2330): Ceres Seq. ID no. 12669846
  misc_feature (1)..(2330): Ortholog of  Ceres SEQ ID NO 12623695 as cited in SEQ ID NO 61286
aataaatcaaattacaaataaaatgcatacaaaaagcaaacaacctccgtgcaaatcatatcatatgcatggcttaaagggtttaggcttcaccttcccgatcgctagagttactgtgctagtctctatcttcccatcacagtcacatctcgtccgtacacgtggacccacatcctctttaagctcactagctgattgatatcgtcttatacctttggccgtttcgtctctctctctctcgtttaattacttgtacctatcaactcagtgatactctcgcttctgagagagaagagagaaagcgaagctcgtttcgtatcgtcttctttctcttcatccgacgctggattcataagggcattgataattggacttgttggttaagatttgaatcaacctggagctatgtcgagttttaatctgagtgtagatgtgaatcagaatgggaatatcaagaatgttgattctttatctacattggacgatattgatgacattgattttgccaagttgctagagaagccaaggccattgaatattgatagactgagatcacttgacgaaaggtctcttactgaattaactggttcaccacagcttagaaatgcggataatgcttctcgggcccctgatcatgcggattatgtgatttcaccaagctttggtaggaggtctggattcaatactcctaggtcacagcctggatttgagtctcatcctatggttggtgaggcctgggatgctttgaggcgctcaatggtttactttcgtggacaacctgttggcactattgctgctgtggataattctgaagaaaaactcaactatgatcaggtgttcgtgagagattttgtaccaagtgctttagcattcttgatgaatggagagccagatatagttaaaaacttccttttgaagactcttcgtcttcaatcttgggagaaaaagattgatagattccagcttggtgagggtgttatgcctgctagcttcaaagttttccatgatcctgttagaaaccatgaaacgctgatagctgattttggcgagagtgctattggaagagtagcgccggttgattcagggttttggtggattatattgctcagagcctacacaaaatctacaggagactcttctcttgctgacatgcctgaatgccagaagggtattcggctgatacttagcctgtgtctgtctgagggatttgataccttccccactctcttatgtgctgatggttgctgtatgattgatcgtaggatgggagtttatggttacccgatagagattcaagcccttttctttatggccttaaggtgtgccttgctcctgcttaaacatgacggagaaggtaaagaaatggtggaacagatagtgaagcgacttcatgcattgagctaccacatgaggagctacttttggctagacttgaagcagcttaatgacatttaccgatataagacagaggaatactctcacactgctgtcaacaagttcaacgtaatccctgattctcttccagaatgggttttcgactttatgccgcctcacggagggttctttattggcaacgttagccctgcaagaatggatttccgttggtttgctttgggtaattgtatagcaatattgtcttccttggctacacctgaacagtcgacagcaattatggatctgatagaatctcgctgggaagagttggttggagaaatgccactgaaagtttgctatcccgccatagaaagccatgaatggagaatagtaactggttgtgaccccaaaaacactcggtggagctaccacaatggaggatcgtggccagtgctgctatggcttctgacggctgcttgtatcaaaactggtcgacctcaaatagcaagacgagcaattgaagtagcagaggctaggcttcataaggaccactggcctgaatactatgatggaaaggtagggagatacgtggggaaacagtcgcgtaaaaaccagacttggtcagtcgcaggatacttagtagccaagatgatgctggaagatccgtcacatgttggtatggtttgtcttgaggaagacaaacagatgaaacccgttatgagaagatccaactcctggacttgttgaaaacgttggaaagagatgagctaagaagaaccttcttcgtgattcctggctttaatgctgataacgactcttttcttcatttttcaattgcaaattttacgttgcttgctttgtgaaatatttttagactatgaaagatttaagcatcgtaaaaaatatttcgtatgtttagcttcatgtctttattaaagcataaggggttctttctc

SEQ ID NO: 83331 - protein, 571 aa, Arabidopsis thaliana
  peptide (1)..(571): Ceres Seq. ID no. 12669847
MSSFNLSVDVNQNGNIKNVDSLSTLDDIDDIDFAKLLEKPRPLNIDRLRSLDERSLTELTGSPQLRNADNASRAPDHADYVISPSFGRRSGFNTPRSQPGFESHPMVGEAWDALRRSMVYFRGQPVGTIAAVDNSEEKLNYDQVFVRDFVPSALAFLMNGEPDIVKNFLLKTLRLQSWEKKIDRFQLGEGVMPASFKVFHDPVRNHETLIADFGESAIGRVAPVDSGFWWIILLRAYTKSTGDSSLADMPECQKGIRLILSLCLSEGFDTFPTLLCADGCCMIDRRMGVYGYPIEIQALFFMALRCALLLLKHDGEGKEMVEQIVKRLHALSYHMRSYFWLDLKQLNDIYRYKTEEYSHTAVNKFNVIPDSLPEWVFDFMPPHGGFFIGNVSPARMDFRWFALGNCIAILSSLATPEQSTAIMDLIESRWEELVGEMPLKVCYPAIESHEWRIVTGCDPKNTRWSYHNGGSWPVLLWLLTAACIKTGRPQIARRAIEVAEARLHKDHWPEYYDGKVGRYVGKQSRKNQTWSVAGYLVAKMMLEDPSHVGMVCLEEDKQMKPVMRRSNSWTC

SEQ ID NO: 83332 - protein, 466 aa, Arabidopsis thaliana
  peptide (1)..(466): Ceres Seq. ID no. 12669848
MVGEAWDALRRSMVYFRGQPVGTIAAVDNSEEKLNYDQVFVRDFVPSALAFLMNGEPDIVKNFLLKTLRLQSWEKKIDRFQLGEGVMPASFKVFHDPVRNHETLIADFGESAIGRVAPVDSGFWWIILLRAYTKSTGDSSLADMPECQKGIRLILSLCLSEGFDTFPTLLCADGCCMIDRRMGVYGYPIEIQALFFMALRCALLLLKHDGEGKEMVEQIVKRLHALSYHMRSYFWLDLKQLNDIYRYKTEEYSHTAVNKFNVIPDSLPEWVFDFMPPHGGFFIGNVSPARMDFRWFALGNCIAILSSLATPEQSTAIMDLIESRWEELVGEMPLKVCYPAIESHEWRIVTGCDPKNTRWSYHNGGSWPVLLWLLTAACIKTGRPQIARRAIEVAEARLHKDHWPEYYDGKVGRYVGKQSRKNQTWSVAGYLVAKMMLEDPSHVGMVCLEEDKQMKPVMRRSNSWTC

SEQ ID NO: 83333 - protein, 454 aa, Arabidopsis thaliana
  peptide (1)..(454): Ceres Seq. ID no. 12669849
MVYFRGQPVGTIAAVDNSEEKLNYDQVFVRDFVPSALAFLMNGEPDIVKNFLLKTLRLQSWEKKIDRFQLGEGVMPASFKVFHDPVRNHETLIADFGESAIGRVAPVDSGFWWIILLRAYTKSTGDSSLADMPECQKGIRLILSLCLSEGFDTFPTLLCADGCCMIDRRMGVYGYPIEIQALFFMALRCALLLLKHDGEGKEMVEQIVKRLHALSYHMRSYFWLDLKQLNDIYRYKTEEYSHTAVNKFNVIPDSLPEWVFDFMPPHGGFFIGNVSPARMDFRWFALGNCIAILSSLATPEQSTAIMDLIESRWEELVGEMPLKVCYPAIESHEWRIVTGCDPKNTRWSYHNGGSWPVLLWLLTAACIKTGRPQIARRAIEVAEARLHKDHWPEYYDGKVGRYVGKQSRKNQTWSVAGYLVAKMMLEDPSHVGMVCLEEDKQMKPVMRRSNSWTC

SEQ ID NO: 83334 - DNA, 1704 bp, Arabidopsis thaliana
  misc_feature (1)..(1704): Ceres Seq. ID no. 12669854
  misc_feature (1)..(1704): Ortholog of  Ceres SEQ ID NO 13597411 as cited in SEQ ID NO 64125
atgggttttggtacatcttcttcttcatcttcttcctcagctctgaaatggctaggtttcgttactgccgtttgggtccaatccatctccggcaacaattacaccttctcaaattactccggcgcactcaaatccttaatgaacctcactcagttagaactcaacagtctctccgtcgctaaagacgtcggaaaagcattcggaatcctcgccggacttgcttccgaccgtctttcaactccggtgatcctcctcatcggttctttcgaaggtcttcttggttatggtgtacaatggcttgtcgttagccgcacgattcaacctataccttattggcagatgtgtgtgtttctctgtatgggaggaaacagtacgacgtggatgaacacggcggttctggttacttgtataagaaacttccggcgaaatcgtggtcctgtttcagggattcttaaaggatacgttggtttaagtactgcgattttcacggatctatgtaatgctctgttttcctctgacccagcttcgtttcttgtcctcctctccgtcgtgccttttgccgtttgtctcacggcggttttcttcctccgtgaaatccctccgtctactaccttcgccgaggataacgaagagtctaaatactttgctgtgtttaacatcgttgcggttgttgttgctgtgtaccttcagtcttacgacatcatcggaatcaaaacaggagctttctcaatcgcattcgcttccatacttctcatactcttagcctctcctgtcgctgtacctttccacgcttttatccgtagcaaagttcatgatgagcaagacgtagaaggacgaatagatgaacctttactaagatcaggatctgagattgaagtggaggaaacaatcgtaggtgctgcagcggcggcggataacgaattgccaccgtctcttaagccgttaagtaacgaggaggaagagaatcacggaactatagtgacgacggagaagaaaagaccggttcttggagaagaacacaccataatggaagctatgttgaccgttgacttttgggtgttgttcgtgtcgttcttgtgtggagtaggaactggtttagcagttatgaacaatatgggtcagatcgggcttgcgcttggttacactgatgtctccatttttgtctccatgactagcatttggggattctttggtcggattctctccggtactatctccgagcacttcatcaagaaagctggaacaccaagaccattatggaatgcagcagctcaaatcattatggccgtgggatatctactgatggctttagccttgcccggttcactctatattggttcaatggtggttggggtatgctatggagttcggttagcgataaccgtaccaacagcatcagaactcttcggtctcaaatactatggactcatctacaacatccttatacttaatatgcctctaggatcgttcctcttctcgggtctactcgcgggtttactctacgatgctgaagccacacctactcctggtggaggcaatacgtgtgtaggagctcattgtttccgtatcgtcttcattgtaatggcgtttgcttctatcattggggtcggtcttgaccttttgcttgcgtatagaaccaaggggatctatgcgaagattcatgcgagcaagaagactaagaaatctggtggtaatcttcgatga

SEQ ID NO: 83335 - protein, 567 aa, Arabidopsis thaliana
  peptide (1)..(567): Ceres Seq. ID no. 12669855
MGFGTSSSSSSSSALKWLGFVTAVWVQSISGNNYTFSNYSGALKSLMNLTQLELNSLSVAKDVGKAFGILAGLASDRLSTPVILLIGSFEGLLGYGVQWLVVSRTIQPIPYWQMCVFLCMGGNSTTWMNTAVLVTCIRNFRRNRGPVSGILKGYVGLSTAIFTDLCNALFSSDPASFLVLLSVVPFAVCLTAVFFLREIPPSTTFAEDNEESKYFAVFNIVAVVVAVYLQSYDIIGIKTGAFSIAFASILLILLASPVAVPFHAFIRSKVHDEQDVEGRIDEPLLRSGSEIEVEETIVGAAAAADNELPPSLKPLSNEEEENHGTIVTTEKKRPVLGEEHTIMEAMLTVDFWVLFVSFLCGVGTGLAVMNNMGQIGLALGYTDVSIFVSMTSIWGFFGRILSGTISEHFIKKAGTPRPLWNAAAQIIMAVGYLLMALALPGSLYIGSMVVGVCYGVRLAITVPTASELFGLKYYGLIYNILILNMPLGSFLFSGLLAGLLYDAEATPTPGGGNTCVGAHCFRIVFIVMAFASIIGVGLDLLLAYRTKGIYAKIHASKKTKKSGGNLR

SEQ ID NO: 83336 - protein, 521 aa, Arabidopsis thaliana
  peptide (1)..(521): Ceres Seq. ID no. 12669856
MNLTQLELNSLSVAKDVGKAFGILAGLASDRLSTPVILLIGSFEGLLGYGVQWLVVSRTIQPIPYWQMCVFLCMGGNSTTWMNTAVLVTCIRNFRRNRGPVSGILKGYVGLSTAIFTDLCNALFSSDPASFLVLLSVVPFAVCLTAVFFLREIPPSTTFAEDNEESKYFAVFNIVAVVVAVYLQSYDIIGIKTGAFSIAFASILLILLASPVAVPFHAFIRSKVHDEQDVEGRIDEPLLRSGSEIEVEETIVGAAAAADNELPPSLKPLSNEEEENHGTIVTTEKKRPVLGEEHTIMEAMLTVDFWVLFVSFLCGVGTGLAVMNNMGQIGLALGYTDVSIFVSMTSIWGFFGRILSGTISEHFIKKAGTPRPLWNAAAQIIMAVGYLLMALALPGSLYIGSMVVGVCYGVRLAITVPTASELFGLKYYGLIYNILILNMPLGSFLFSGLLAGLLYDAEATPTPGGGNTCVGAHCFRIVFIVMAFASIIGVGLDLLLAYRTKGIYAKIHASKKTKKSGGNLR

SEQ ID NO: 83337 - protein, 454 aa, Arabidopsis thaliana
  peptide (1)..(454): Ceres Seq. ID no. 12669857
MCVFLCMGGNSTTWMNTAVLVTCIRNFRRNRGPVSGILKGYVGLSTAIFTDLCNALFSSDPASFLVLLSVVPFAVCLTAVFFLREIPPSTTFAEDNEESKYFAVFNIVAVVVAVYLQSYDIIGIKTGAFSIAFASILLILLASPVAVPFHAFIRSKVHDEQDVEGRIDEPLLRSGSEIEVEETIVGAAAAADNELPPSLKPLSNEEEENHGTIVTTEKKRPVLGEEHTIMEAMLTVDFWVLFVSFLCGVGTGLAVMNNMGQIGLALGYTDVSIFVSMTSIWGFFGRILSGTISEHFIKKAGTPRPLWNAAAQIIMAVGYLLMALALPGSLYIGSMVVGVCYGVRLAITVPTASELFGLKYYGLIYNILILNMPLGSFLFSGLLAGLLYDAEATPTPGGGNTCVGAHCFRIVFIVMAFASIIGVGLDLLLAYRTKGIYAKIHASKKTKKSGGNLR

SEQ ID NO: 83338 - DNA, 909 bp, Arabidopsis thaliana
  misc_feature (1)..(909): Ceres Seq. ID no. 12669858
  misc_feature (1)..(909): Ortholog of  Ceres SEQ ID NO 13595569 as cited in SEQ ID NO 56778
  misc_feature (1)..(909): Ortholog of  Ceres SEQ ID NO 12611159 as cited in SEQ ID NO 59821
atgggaaggtctccttgctgtgagaaagaccacacaaacaaaggagcttggactaaggaagaagacgataagctcatctcttacatcaaagctcacggtgaaggttgttggcgttctcttcctagatccgccggtcttcaacgttgcggaaaaagctgtcgtctccgatggattaactatctccgacctgatctcaagaggggtaacttcaccctcgaagaagatgatctcatcatcaaactacatagccttctcggtaacaagtggtctcttattgcgacgagattaccaggaagaacagataacgagattaagaattactggaacacacatgttaagaggaagctattaagaaaagggattgatccggcgactcatcgacctatcaacgagaccaaaacttctcaagattcgtctgattctagtaaaacagaggaccctcttgtcaagattctctcttttggtcctcagctggagaaaatagcaaatttcggggacgagagaattcaaaagagagttgagtactcagttgttgaagaaagatgtctggacttgaatcttgagcttaggatcagtccaccatggcaagacaagctccatgatgagaggaacctaaggtttgggagagtgaagtataggtgcagtgcgtgccgttttggattcgggaacggcaaggagtgtagctgtaataatgtgaaatgtcaaacagaggacagtagtagcagcagttattcttcaaccgacattagtagtagcattggttatgacttcttgggtctaaacaacactagggttttggattttagcactttggaaatgaaatgaaatgaaatactatattaatcaatttatagctgtgaattgtgaaaaaaaaaaaaaaaaatcgatgtcgactcgagtcgggcggcc

SEQ ID NO: 83339 - protein, 274 aa, Arabidopsis thaliana
  peptide (1)..(274): Ceres Seq. ID no. 12669859
MGRSPCCEKDHTNKGAWTKEEDDKLISYIKAHGEGCWRSLPRSAGLQRCGKSCRLRWINYLRPDLKRGNFTLEEDDLIIKLHSLLGNKWSLIATRLPGRTDNEIKNYWNTHVKRKLLRKGIDPATHRPINETKTSQDSSDSSKTEDPLVKILSFGPQLEKIANFGDERIQKRVEYSVVEERCLDLNLELRISPPWQDKLHDERNLRFGRVKYRCSACRFGFGNGKECSCNNVKCQTEDSSSSSYSSTDISSSIGYDFLGLNNTRVLDFSTLEMK

SEQ ID NO: 83340 - DNA, 2415 bp, Arabidopsis thaliana
  misc_feature (1)..(2415): Ceres Seq. ID no. 12669868
  misc_feature (1)..(2415): Ortholog of  Ceres SEQ ID NO 12586556 as cited in SEQ ID NO 64667
  misc_feature (1)..(2415): Ortholog of  Ceres SEQ ID NO 13660894 as cited in SEQ ID NO 67475
atggctgcgactctgctgtctcaatgctaccgtatctacaattccgatgcgtgcaagtgtgtttcttctgagaatcaccagacgacggggaagcgaaatgggaatcgaaatctcgaattcgactcgggaatttcgaaaccagcacggctagtacttcgagaccgatacaaggtaactaagcaggtcaatgatcctgcgctgactagggctttacgtggtttcgctgattcccgtcttatggaggatgcactccaactgttcgatgaaatgaacaaagctgatgcttttctgtggaatgtgatgattaaaggtttcactagctgtgggttgtacattgaagcagttcaattttatagcagaatggtgtttgcaggggtcaaagctgatacctttacttatcctttcgtgattaaatcggttgcgggaatttcctcattggaagaagggaagaagattcatgcgatggtgattaagcttgggtttgtttcagatgtttacgtctgtaattctcttatatctttatacatgaagcttgggtgtgcttgggatgcagagaaagtgttcgaagaaatgcctgagagagacattgtttcgtggaattccatgatttctggatatcttgcgcttggagatggctttagctcgttgatgctgtttaaagaaatgctgaaatgtgggtttaaaccggacaggttcagtaccatgagtgctcttggtgcttgttctcatgtgtatagtccaaaaatgggaaaagagatacattgccacgctgttcgaagtaggattgaaactggtgatgttatggtaatgacatcaattcttgacatgtacagtaaatatggtgaagtgagttatgcggagaggatatttaacggtatgatccagaggaacatcgtagcttggaacgttatgatagggtgttatgctagaaatggccgagtcactgatgctttcctctgctttcagaaaatgtcagagcaaaatgggttgcagccagatgttatcacatcgattaatctgcttcctgcttctgcgatcttagagggtagaacgattcacgggtatgctatgaggagaggctttcttccccatatggtattggaaactgctctgattgatatgtatggagaatgtgggcagttaaaatcagctgaggttatatttgatcgaatggctgaaaagaatgtgatctcatggaactcgattattgctgcctatgtgcagaacgggaagaactattcagccttggagctatttcaagagctctgggattcatcgcttgtacctgattccacaacaattgctagtattctaccagcttatgcagaatctctatccttgagtgaaggtagagaaatccatgcttatattgttaagtctagatactggtcaaacaccatcatcttgaattcacttgttcacatgtatgccatgtgtggtgaccttgaggatgcaagaaaatgtttcaaccacatcttgttaaaggatgttgtttcatggaacagcatcatcatggcatatgcagtacatggttttgggagaatttcggtttggttattctctgagatgattgcttctagagtaaatccaaacaagagcacctttgcttcactattagcagcatgtagcatttctggtatggttgatgaaggatgggaatatttcgagtcgatgaaaagagaatacgggatagatcctggaatagagcattatgggtgcatgctggatctcattggccgtacaggaaacttcagcgcagccaagagattccttgaagaaatgccatttgtgccaacagctaggatttggggatcgttgttaaacgcaagcagaaaccacaaggacataaccatagctgaatttgcggcagaacagatatttaagatggaacacgataacacgggatgttatgtcttgcttttgaacatgtatgcagaagctggaagatgggaagatgtaaataggattaagcttctcatggagagcaaaggcatatccagaacatcaagtcgcagtactgttgaggcgaagggcaaaagtcatgtgttcacaaatggagacagatcccacgtggcgacgaacaagatctatgaagtcttagatgtcgtctcgaggatggttggagaagaagacatttatgttcactgtgtctcgaggttgagaccagagactctagttaagagcagaagcaattcaccaagaagacattcggtaaggctcgccacgtgttttggattgatctctacggaaacgggaagaagagttacggtgaggaataacacgagaatctgcagaaaatgtcacgagttcttggaaaaagcttcgagattgacgagaagagagatcgttgtgggagattccaagatttttcatcacttctccaatggtcgctgctcgtgtggaaattactggtga

SEQ ID NO: 83341 - protein, 804 aa, Arabidopsis thaliana
  peptide (1)..(804): Ceres Seq. ID no. 12669869
MAATLLSQCYRIYNSDACKCVSSENHQTTGKRNGNRNLEFDSGISKPARLVLRDRYKVTKQVNDPALTRALRGFADSRLMEDALQLFDEMNKADAFLWNVMIKGFTSCGLYIEAVQFYSRMVFAGVKADTFTYPFVIKSVAGISSLEEGKKIHAMVIKLGFVSDVYVCNSLISLYMKLGCAWDAEKVFEEMPERDIVSWNSMISGYLALGDGFSSLMLFKEMLKCGFKPDRFSTMSALGACSHVYSPKMGKEIHCHAVRSRIETGDVMVMTSILDMYSKYGEVSYAERIFNGMIQRNIVAWNVMIGCYARNGRVTDAFLCFQKMSEQNGLQPDVITSINLLPASAILEGRTIHGYAMRRGFLPHMVLETALIDMYGECGQLKSAEVIFDRMAEKNVISWNSIIAAYVQNGKNYSALELFQELWDSSLVPDSTTIASILPAYAESLSLSEGREIHAYIVKSRYWSNTIILNSLVHMYAMCGDLEDARKCFNHILLKDVVSWNSIIMAYAVHGFGRISVWLFSEMIASRVNPNKSTFASLLAACSISGMVDEGWEYFESMKREYGIDPGIEHYGCMLDLIGRTGNFSAAKRFLEEMPFVPTARIWGSLLNASRNHKDITIAEFAAEQIFKMEHDNTGCYVLLLNMYAEAGRWEDVNRIKLLMESKGISRTSSRSTVEAKGKSHVFTNGDRSHVATNKIYEVLDVVSRMVGEEDIYVHCVSRLRPETLVKSRSNSPRRHSVRLATCFGLISTETGRRVTVRNNTRICRKCHEFLEKASRLTRREIVVGDSKIFHHFSNGRCSCGNYW

SEQ ID NO: 83342 - protein, 725 aa, Arabidopsis thaliana
  peptide (1)..(725): Ceres Seq. ID no. 12669870
MEDALQLFDEMNKADAFLWNVMIKGFTSCGLYIEAVQFYSRMVFAGVKADTFTYPFVIKSVAGISSLEEGKKIHAMVIKLGFVSDVYVCNSLISLYMKLGCAWDAEKVFEEMPERDIVSWNSMISGYLALGDGFSSLMLFKEMLKCGFKPDRFSTMSALGACSHVYSPKMGKEIHCHAVRSRIETGDVMVMTSILDMYSKYGEVSYAERIFNGMIQRNIVAWNVMIGCYARNGRVTDAFLCFQKMSEQNGLQPDVITSINLLPASAILEGRTIHGYAMRRGFLPHMVLETALIDMYGECGQLKSAEVIFDRMAEKNVISWNSIIAAYVQNGKNYSALELFQELWDSSLVPDSTTIASILPAYAESLSLSEGREIHAYIVKSRYWSNTIILNSLVHMYAMCGDLEDARKCFNHILLKDVVSWNSIIMAYAVHGFGRISVWLFSEMIASRVNPNKSTFASLLAACSISGMVDEGWEYFESMKREYGIDPGIEHYGCMLDLIGRTGNFSAAKRFLEEMPFVPTARIWGSLLNASRNHKDITIAEFAAEQIFKMEHDNTGCYVLLLNMYAEAGRWEDVNRIKLLMESKGISRTSSRSTVEAKGKSHVFTNGDRSHVATNKIYEVLDVVSRMVGEEDIYVHCVSRLRPETLVKSRSNSPRRHSVRLATCFGLISTETGRRVTVRNNTRICRKCHEFLEKASRLTRREIVVGDSKIFHHFSNGRCSCGNYW

SEQ ID NO: 83343 - protein, 715 aa, Arabidopsis thaliana
  peptide (1)..(715): Ceres Seq. ID no. 12669871
MNKADAFLWNVMIKGFTSCGLYIEAVQFYSRMVFAGVKADTFTYPFVIKSVAGISSLEEGKKIHAMVIKLGFVSDVYVCNSLISLYMKLGCAWDAEKVFEEMPERDIVSWNSMISGYLALGDGFSSLMLFKEMLKCGFKPDRFSTMSALGACSHVYSPKMGKEIHCHAVRSRIETGDVMVMTSILDMYSKYGEVSYAERIFNGMIQRNIVAWNVMIGCYARNGRVTDAFLCFQKMSEQNGLQPDVITSINLLPASAILEGRTIHGYAMRRGFLPHMVLETALIDMYGECGQLKSAEVIFDRMAEKNVISWNSIIAAYVQNGKNYSALELFQELWDSSLVPDSTTIASILPAYAESLSLSEGREIHAYIVKSRYWSNTIILNSLVHMYAMCGDLEDARKCFNHILLKDVVSWNSIIMAYAVHGFGRISVWLFSEMIASRVNPNKSTFASLLAACSISGMVDEGWEYFESMKREYGIDPGIEHYGCMLDLIGRTGNFSAAKRFLEEMPFVPTARIWGSLLNASRNHKDITIAEFAAEQIFKMEHDNTGCYVLLLNMYAEAGRWEDVNRIKLLMESKGISRTSSRSTVEAKGKSHVFTNGDRSHVATNKIYEVLDVVSRMVGEEDIYVHCVSRLRPETLVKSRSNSPRRHSVRLATCFGLISTETGRRVTVRNNTRICRKCHEFLEKASRLTRREIVVGDSKIFHHFSNGRCSCGNYW

SEQ ID NO: 83344 - DNA, 1786 bp, Arabidopsis thaliana
  misc_feature (1)..(1786): Ceres Seq. ID no. 12669890
  misc_feature (1)..(1786): Ortholog of  Ceres SEQ ID NO 14313228 as cited in SEQ ID NO 67057
aaggagcgaaagagaaacactttccgacttgggtaaggaaaaagagtttgatgggttgttgtcaatccttgttttccggcgataacccacttgggaaagatggagttcagccgcaaccactatctcaaaacaatcacggcggagctacgacggctgataacggcggaagcggcggagctagtggtgtaggcggcggaggaggaggaggaggaatcccatctttctctgagttctctttcgctgaccttaaagcagctacaaacaactttagctcagacaacatcgtatcagaaagtggtgagaaagccccaaatcttgtctacaaaggccgacttcagaaccgtcgttggatcgctgtcaagaagtttactaagatggcttggcctgagcctaaacaatttgcggaagaagcatggggtgtggggaaattgaggcataatcgattagcgaatttgattggatattgttgtgatggagatgagaggcttcttgttgctgagttcatgcctaatgatactcttgctaagcatttgttccattgggaaaatcagacaattgagtgggctatgaggttgcgagtaggatattacatagctgaggctttggattattgtagtactgagggtcgtccattgtaccatgatttgaatgcttatagggttctctttgatgaggatggtgatcctcgtctctcatgttttggcttgatgaagaacagtagggatggtaaaagttatagcacaaatttagcttatacaccacctgaatatctaagaaatggaagagtgacacctgaaagtgttacgtatagctttggaactgtccttctggatttgcttagcggaaaacacatccctccaagccatgctctcgatatgatacgaggcaagaatattattctgttgatggattcacacctcgaaggaaagttctcaacagaagaggctactgtagtggtcgaactcgcctctcaatgtttacaatatgagcctcgagagagaccaaatacaaaagatcttgttgcaacacttgcaccattgcaaactaaatcagacgttccatcttatgtgatgcttggaataaagaagcaagaggaggcaccttcgactccacagagaccactttcgccattaggtgaggcctgctcaagaatggatctcacagctattcatcagattttggtcatgacacattacagagacgacgagggcacaaacgagttatcattccaagaatggactcaacaaatgaaagatatgcttgatgcacggaaacgcggtgatcaatctttccgcgagaaagatttcaaaacagccatcgactgttactcacagttcattgacgttggaacaatggtatctccaactgtatttggtcggcgaagtctatgctacttactatgcgatcaaccagatgcagcactacgcgacgcaatgcaagcgcagtgtgtgtatccggattggccaacagctttctacatgcagtctgtggcattagcgaagctgaacatgaacacagacgcagccgatatgttgaacgaagcagctcagctcgaagaaaagagacaacgaggcggcagaggatcttgattcttgagacacaaagtgttacatcttgttgtaaaatttgatgagcttcaagaattctttttaagaagaagagaaagaaaaaatacggttaaaaacttgttgctggattgtttgattggggatgtaatgtaaccatagggagagaaaacaattgaatgtttgtttgtatgcaatacatgttgtaagttttaatggtc

SEQ ID NO: 83345 - protein, 528 aa, Arabidopsis thaliana
  peptide (1)..(528): Ceres Seq. ID no. 12669891
GAKEKHFPTWVRKKSLMGCCQSLFSGDNPLGKDGVQPQPLSQNNHGGATTADNGGSGGASGVGGGGGGGGIPSFSEFSFADLKAATNNFSSDNIVSESGEKAPNLVYKGRLQNRRWIAVKKFTKMAWPEPKQFAEEAWGVGKLRHNRLANLIGYCCDGDERLLVAEFMPNDTLAKHLFHWENQTIEWAMRLRVGYYIAEALDYCSTEGRPLYHDLNAYRVLFDEDGDPRLSCFGLMKNSRDGKSYSTNLAYTPPEYLRNGRVTPESVTYSFGTVLLDLLSGKHIPPSHALDMIRGKNIILLMDSHLEGKFSTEEATVVVELASQCLQYEPRERPNTKDLVATLAPLQTKSDVPSYVMLGIKKQEEAPSTPQRPLSPLGEACSRMDLTAIHQILVMTHYRDDEGTNELSFQEWTQQMKDMLDARKRGDQSFREKDFKTAIDCYSQFIDVGTMVSPTVFGRRSLCYLLCDQPDAALRDAMQAQCVYPDWPTAFYMQSVALAKLNMNTDAADMLNEAAQLEEKRQRGGRGS

SEQ ID NO: 83346 - protein, 512 aa, Arabidopsis thaliana
  peptide (1)..(512): Ceres Seq. ID no. 12669892
MGCCQSLFSGDNPLGKDGVQPQPLSQNNHGGATTADNGGSGGASGVGGGGGGGGIPSFSEFSFADLKAATNNFSSDNIVSESGEKAPNLVYKGRLQNRRWIAVKKFTKMAWPEPKQFAEEAWGVGKLRHNRLANLIGYCCDGDERLLVAEFMPNDTLAKHLFHWENQTIEWAMRLRVGYYIAEALDYCSTEGRPLYHDLNAYRVLFDEDGDPRLSCFGLMKNSRDGKSYSTNLAYTPPEYLRNGRVTPESVTYSFGTVLLDLLSGKHIPPSHALDMIRGKNIILLMDSHLEGKFSTEEATVVVELASQCLQYEPRERPNTKDLVATLAPLQTKSDVPSYVMLGIKKQEEAPSTPQRPLSPLGEACSRMDLTAIHQILVMTHYRDDEGTNELSFQEWTQQMKDMLDARKRGDQSFREKDFKTAIDCYSQFIDVGTMVSPTVFGRRSLCYLLCDQPDAALRDAMQAQCVYPDWPTAFYMQSVALAKLNMNTDAADMLNEAAQLEEKRQRGGRGS

SEQ ID NO: 83347 - protein, 404 aa, Arabidopsis thaliana
  peptide (1)..(404): Ceres Seq. ID no. 12669893
MAWPEPKQFAEEAWGVGKLRHNRLANLIGYCCDGDERLLVAEFMPNDTLAKHLFHWENQTIEWAMRLRVGYYIAEALDYCSTEGRPLYHDLNAYRVLFDEDGDPRLSCFGLMKNSRDGKSYSTNLAYTPPEYLRNGRVTPESVTYSFGTVLLDLLSGKHIPPSHALDMIRGKNIILLMDSHLEGKFSTEEATVVVELASQCLQYEPRERPNTKDLVATLAPLQTKSDVPSYVMLGIKKQEEAPSTPQRPLSPLGEACSRMDLTAIHQILVMTHYRDDEGTNELSFQEWTQQMKDMLDARKRGDQSFREKDFKTAIDCYSQFIDVGTMVSPTVFGRRSLCYLLCDQPDAALRDAMQAQCVYPDWPTAFYMQSVALAKLNMNTDAADMLNEAAQLEEKRQRGGRGS

SEQ ID NO: 83348 - DNA, 2569 bp, Arabidopsis thaliana
  misc_feature (1)..(2569): Ceres Seq. ID no. 12669905
  misc_feature (1)..(2569): Ortholog of  Ceres SEQ ID NO 15178157 as cited in SEQ ID NO 57481
  misc_feature (1)..(2569): Ortholog of  Ceres SEQ ID NO 13597407 as cited in SEQ ID NO 64106
ttttctttttttttgatttaaaccaaaagggtaaacaatgctttatgattgcttagtgacgccattgaagcagcggctcactgatagtggcttcttctgcctccaattccaagtggattttgtttcactcactcatcgtcgttgatcagtgactctgtttttgcgaaattctcttcagatttcttgataaaagatagaagacggaattatgagtggagctgtgcttgttgctattgctgctgctgttggcaacttgttacaaggatgggataacgcaactattgcaggagctgtgttgtacataaaaaaggagtttaatttggagagtaatccatcagtggaaggtctaattgtggcgatgtcacttattggtgctactctgattacaacatgctctggaggggtagctgattggcttggtcgccgtcccatgctaatattgtcctcaattctctactttgttggttctctagtaatgctatggtctccgaatgtttatgtgttgctcttaggaaggttgttagatggatttggggttggtcttgtggtcacacttgttcctatttatatatctgagactgcaccacctgagattaggggactgttgaatacgctaccgcagttcactggctctggagggatgttcttatcttactgtatggttttcggaatgtcgttgatgccatcacctagctggagattgatgcttggtgtccttttcatcccttcccttgtctttttcttcctcacggtcttcttcttgcccgagtccccaaggtggctcgtgagcaaaggtcgaatgcttgaagcaaagcgggttcttcagagactgcgtggtcgcgaagatgtgtctggtgagatggctttgttggttgagggtcttggaattggaggtgaaacaaccatagaggaatatataattggtcccgcggatgaagttactgatgatcatgatatagctgtggataaggatcaaattaagttatatggtgcagaagaagggctgagttgggttgctaggccagtcaaaggaggaagcactatgagtgttttgtctcgccatggaagtacaatgagcaggaggcaaggctcattgattgatcctcttgtcacactgtttgggagcgttcacgagaagatgccggacactggaagcatgaggagtgccttgttcccacattttgggagtatgttcagtgttggagggaatcaaccaagacatgaagattgggatgaagagaatcttgttggagaaggtgaggattatccatccgaccatggagatgattctgaagatgatcttcattctccgttgatctcacgtcaaacgacaagcatggagaaagacatgcctcacactgctcatggaactctttctaccttcagacatggaagtcaagtgcagggagctcaaggggaaggagcgggtagtatggggattggaggtggatggcaagtggcatggaaatggacggaaagagaagatgaatcgggacagaaagaaggtgggtttaaacggatatacttgcatcaagaaggtttcccaggatctcgacgtggctcaattgtttcattgcctggtggtgatggaaccggtgaggcagattttgtacaagcgtctgctttggttagccaaccagctctttattccaaagaccttctcaaagaacatacaattggtcctgctatggtacatccatccgaaacaactaaagggtcaatttggcatgatcttcatgatcctggagtcaagcgtgcattagtcgtaggagttggacttcaaatacttcagcagttctcaggcatcaacggagttctttactacacaccgcaaatccttgagcaggcgggtgtcgggatcctactatcgaacatggggattagttcttcctcagcatccttacttataagtgcattgacaacctttgtgatgttacctgcaatagctgttgcaatgaggctcatggatctttctggtcgaaggaccttgcttctcaccacgataccaatcctgatagcatctctattggttttagtaatctcaaatcttgttcacatgaacagcattgtgcacgcggtcttatcaaccgtaagcgttgtgctctacttctgcttcttcgtgatgggtttcggtcctgctccaaacatcctctgttcagagatttttccaactcgagtccgcggaatctgcatcgccatctgcgcactcaccttctggatctgtgacataatcgtcacttacagtctccccgtgctgctcaaatccattggactagctggtgtgtttggaatgtacgcaatcgtatgttgcatttcatgggtctttgtgttcattaaagtcccggaaactaaaggcatgccacttgaagtcatcacagagttcttttctgttggagctagacaagctgaagctgctaaaaacgagtgagaaactgaaagacttgttgagataaaaagtttgtgtaatattcatgtggatttgttgttgtctttttactttgtgcagtaataatcatctctctctgtttcgtcttcttcatgtggggagaaaaaaaagtttcaaactttc

SEQ ID NO: 83349 - protein, 739 aa, Arabidopsis thaliana
  peptide (1)..(739): Ceres Seq. ID no. 12669906
MSGAVLVAIAAAVGNLLQGWDNATIAGAVLYIKKEFNLESNPSVEGLIVAMSLIGATLITTCSGGVADWLGRRPMLILSSILYFVGSLVMLWSPNVYVLLLGRLLDGFGVGLVVTLVPIYISETAPPEIRGLLNTLPQFTGSGGMFLSYCMVFGMSLMPSPSWRLMLGVLFIPSLVFFFLTVFFLPESPRWLVSKGRMLEAKRVLQRLRGREDVSGEMALLVEGLGIGGETTIEEYIIGPADEVTDDHDIAVDKDQIKLYGAEEGLSWVARPVKGGSTMSVLSRHGSTMSRRQGSLIDPLVTLFGSVHEKMPDTGSMRSALFPHFGSMFSVGGNQPRHEDWDEENLVGEGEDYPSDHGDDSEDDLHSPLISRQTTSMEKDMPHTAHGTLSTFRHGSQVQGAQGEGAGSMGIGGGWQVAWKWTEREDESGQKEGGFKRIYLHQEGFPGSRRGSIVSLPGGDGTGEADFVQASALVSQPALYSKDLLKEHTIGPAMVHPSETTKGSIWHDLHDPGVKRALVVGVGLQILQQFSGINGVLYYTPQILEQAGVGILLSNMGISSSSASLLISALTTFVMLPAIAVAMRLMDLSGRRTLLLTTIPILIASLLVLVISNLVHMNSIVHAVLSTVSVVLYFCFFVMGFGPAPNILCSEIFPTRVRGICIAICALTFWICDIIVTYSLPVLLKSIGLAGVFGMYAIVCCISWVFVFIKVPETKGMPLEVITEFFSVGARQAEAAKNE

SEQ ID NO: 83350 - protein, 689 aa, Arabidopsis thaliana
  peptide (1)..(689): Ceres Seq. ID no. 12669907
MSLIGATLITTCSGGVADWLGRRPMLILSSILYFVGSLVMLWSPNVYVLLLGRLLDGFGVGLVVTLVPIYISETAPPEIRGLLNTLPQFTGSGGMFLSYCMVFGMSLMPSPSWRLMLGVLFIPSLVFFFLTVFFLPESPRWLVSKGRMLEAKRVLQRLRGREDVSGEMALLVEGLGIGGETTIEEYIIGPADEVTDDHDIAVDKDQIKLYGAEEGLSWVARPVKGGSTMSVLSRHGSTMSRRQGSLIDPLVTLFGSVHEKMPDTGSMRSALFPHFGSMFSVGGNQPRHEDWDEENLVGEGEDYPSDHGDDSEDDLHSPLISRQTTSMEKDMPHTAHGTLSTFRHGSQVQGAQGEGAGSMGIGGGWQVAWKWTEREDESGQKEGGFKRIYLHQEGFPGSRRGSIVSLPGGDGTGEADFVQASALVSQPALYSKDLLKEHTIGPAMVHPSETTKGSIWHDLHDPGVKRALVVGVGLQILQQFSGINGVLYYTPQILEQAGVGILLSNMGISSSSASLLISALTTFVMLPAIAVAMRLMDLSGRRTLLLTTIPILIASLLVLVISNLVHMNSIVHAVLSTVSVVLYFCFFVMGFGPAPNILCSEIFPTRVRGICIAICALTFWICDIIVTYSLPVLLKSIGLAGVFGMYAIVCCISWVFVFIKVPETKGMPLEVITEFFSVGARQAEAAKNE

SEQ ID NO: 83351 - protein, 665 aa, Arabidopsis thaliana
  peptide (1)..(665): Ceres Seq. ID no. 12669908
MLILSSILYFVGSLVMLWSPNVYVLLLGRLLDGFGVGLVVTLVPIYISETAPPEIRGLLNTLPQFTGSGGMFLSYCMVFGMSLMPSPSWRLMLGVLFIPSLVFFFLTVFFLPESPRWLVSKGRMLEAKRVLQRLRGREDVSGEMALLVEGLGIGGETTIEEYIIGPADEVTDDHDIAVDKDQIKLYGAEEGLSWVARPVKGGSTMSVLSRHGSTMSRRQGSLIDPLVTLFGSVHEKMPDTGSMRSALFPHFGSMFSVGGNQPRHEDWDEENLVGEGEDYPSDHGDDSEDDLHSPLISRQTTSMEKDMPHTAHGTLSTFRHGSQVQGAQGEGAGSMGIGGGWQVAWKWTEREDESGQKEGGFKRIYLHQEGFPGSRRGSIVSLPGGDGTGEADFVQASALVSQPALYSKDLLKEHTIGPAMVHPSETTKGSIWHDLHDPGVKRALVVGVGLQILQQFSGINGVLYYTPQILEQAGVGILLSNMGISSSSASLLISALTTFVMLPAIAVAMRLMDLSGRRTLLLTTIPILIASLLVLVISNLVHMNSIVHAVLSTVSVVLYFCFFVMGFGPAPNILCSEIFPTRVRGICIAICALTFWICDIIVTYSLPVLLKSIGLAGVFGMYAIVCCISWVFVFIKVPETKGMPLEVITEFFSVGARQAEAAKNE

SEQ ID NO: 83352 - DNA, 825 bp, Arabidopsis thaliana
  misc_feature (1)..(825): Ceres Seq. ID no. 12669938
  misc_feature (1)..(825): Ortholog of  Ceres SEQ ID NO 13654989 as cited in SEQ ID NO 63117
  misc_feature (1)..(825): Ortholog of  Ceres SEQ ID NO 13584744 as cited in SEQ ID NO 69137
atgctttcgcaccgaaatctggtgaagttattgggatactgtcgtgaagacaaagagcttctccttgtctacgagttcatgcccaaaggaagtcttgagagtcatctttttagacgaaacgatccttttccttgggatttaaggatcaagattgtgattggtgcagctcgtggccttgcgtttctacacagcttacaaagagaagtcatctatagagacttcaaagcttccaatatacttcttgattcgaactatgacgcaaagctttcagatttcggactagcaaagctaggaccagcagatgagaagtcacacgtcacgactaggatcatgggcacatatggttatgctgctcctgaatatatggcaacaggccatttatacgttaagagtgacgtattcgcctttggtgtggttttactagaaataatgaccggactgacggcgcacaacacaaaacggcccagaggacaagagagtcttgtcgactggttaagaccagaactctcaaacaaacacagagtgaaacaaataatggacaaaggaatcaaaggtcaatacacaaccaaggtcgcgaccgaaatggcacgcattacactctcttgtatcgagccagacccaaaaaaccgaccacacatgaaggaagtagtcgaagtcctcgaacacatccaagggcttaatgttgtccctaaccgttcttccactaaacaggccgttgctaactcttcacgttcttcgccacatcactatcgctataaagctggcgcacttggggctgaacgcaagagagcaacgcctggacggtttggatcagtagaaaaataa

SEQ ID NO: 83353 - protein, 274 aa, Arabidopsis thaliana
  peptide (1)..(274): Ceres Seq. ID no. 12669939
MLSHRNLVKLLGYCREDKELLLVYEFMPKGSLESHLFRRNDPFPWDLRIKIVIGAARGLAFLHSLQREVIYRDFKASNILLDSNYDAKLSDFGLAKLGPADEKSHVTTRIMGTYGYAAPEYMATGHLYVKSDVFAFGVVLLEIMTGLTAHNTKRPRGQESLVDWLRPELSNKHRVKQIMDKGIKGQYTTKVATEMARITLSCIEPDPKNRPHMKEVVEVLEHIQGLNVVPNRSSTKQAVANSSRSSPHHYRYKAGALGAERKRATPGRFGSVEK

SEQ ID NO: 83354 - protein, 248 aa, Arabidopsis thaliana
  peptide (1)..(248): Ceres Seq. ID no. 12669940
MPKGSLESHLFRRNDPFPWDLRIKIVIGAARGLAFLHSLQREVIYRDFKASNILLDSNYDAKLSDFGLAKLGPADEKSHVTTRIMGTYGYAAPEYMATGHLYVKSDVFAFGVVLLEIMTGLTAHNTKRPRGQESLVDWLRPELSNKHRVKQIMDKGIKGQYTTKVATEMARITLSCIEPDPKNRPHMKEVVEVLEHIQGLNVVPNRSSTKQAVANSSRSSPHHYRYKAGALGAERKRATPGRFGSVEK

SEQ ID NO: 83355 - protein, 164 aa, Arabidopsis thaliana
  peptide (1)..(164): Ceres Seq. ID no. 12669941
MGTYGYAAPEYMATGHLYVKSDVFAFGVVLLEIMTGLTAHNTKRPRGQESLVDWLRPELSNKHRVKQIMDKGIKGQYTTKVATEMARITLSCIEPDPKNRPHMKEVVEVLEHIQGLNVVPNRSSTKQAVANSSRSSPHHYRYKAGALGAERKRATPGRFGSVEK

SEQ ID NO: 83356 - DNA, 2104 bp, Arabidopsis thaliana
  misc_feature (1)..(2104): Ceres Seq. ID no. 12669959
  misc_feature (1)..(2104): Ortholog of  Ceres SEQ ID NO 13593889 as cited in SEQ ID NO 53305
  misc_feature (1)..(2104): Ortholog of  Ceres SEQ ID NO 13581959 as cited in SEQ ID NO 56156
atacattacaccctctctctctcttctcttcaatttccgtcttctcactctctaatcttttcgcctttagttgaatctctgggatcattctacctttttgtggatttaggatcgaagaagagatcactcctactgttgaattctggttttacttgagagagtttttcaattctgatctgctgttttgcgatggcgatcaaagaggagacggaggagagttgcggaagcagagccgtggtagcttcaataacgaaagaaagccctagacagcaccgtatgaaactggaggtgtacggtgaggttcttcaacgaatccaggaatccaattacgaagaagctaatttccctggttttgatgatctcctctggcttcacttcaatcgtcttcctgctcgatatgctttggatgtaaatgttgagagagcagaagatgtacttactcatcagagattgttgaaattggctgaagatcctgctactagacctgttttcgaagttcgttgtgtgcaggtttctcccacattgaatggaaattctggtgacgttgatccttcggatcctgcggtcaatgaagatgctcaaagctcctataactcgaggtctcttgcacctccaacttttggttcttctccgaatttcgaagctcttactcaagcttacaaagatcatgctcaagacgatgatagtgctgtcaatgcacagttgcctaattctcgaccgatgcacgaaatcaccttttctacaatcgacaggccgaaactccttagtcagctaacttccatgcttggtgaacttggattgaatattcaagaggctcatgctttctctaccgccgatggtttctctctcgatgtatttgttgttgatggctggtcgcaggaggaaacagaaggtttaaaagatgcattgaagaaggagataagaaagtttaaggatcaaccttgttcaaaacagaaatctatcactttctttgagcatgacaaatcaaccaacgagctgctacctgcgtgtgttgaaatacctacggatggaactgatgagtgggaaattgacatgaagcagctcaaaattgaaaaaaaggtggcatgtggatcatacggggaactatttagaggaacctattgtagtcaggaagtagctatcaaaattctcaagcctgagcgtgttaatgcggaaatgctacgagagttttctcaggaagtatatataatgaggaaagttcggcataaaaatgttgtccagttcattggtgcatgtacacgatcaccaaacctctgcattgtgacagagttcatgactcgggggagcatttatgatttccttcacaaacacaaaggggtttttaaaattcaatctttgctcaaagtggcactcgacgtctcgaaaggaatgaattatctgcatcaaaacaatattattcatagagaccttaagactgctaatcttcttatggacgaacatgaagttgtcaaagttgccgattttggtgttgccagagtgcagactgagtcaggggttatgacagcggaaacagggacataccgatggatggctccagaggtcattgagcacaaaccttatgatcacagggcagatgtcttcagctacgcgattgtgctgtgggaacttttgactggggaactcccatattcttacttgactccactgcaagctgctgttggcgttgtccaaaagggacttagaccaaaaattccaaaggaaacacacccaaaactgactgaacttcttgagaaatgctggcagcaagacccagctctaagacccaattttgcagaaatcatagaaatgcttaaccaactaatccgcgaggttggagatgatgagcgccacaaggataaacatggtggttacttttcaggcctaaaaaaaggccatcgttgactctctcgggtgcgctgaaaaatttggtttgatcggtttgatagagctctactcacttctcgttttttcgttgtacagtttcttagagcctcactctttttgtccatgtataattttcttaaaaaacaatctccttttgatacaattatcactgcagagattgatttggattgcaactcaataaagtgaaagccattctttt

SEQ ID NO: 83357 - protein, 570 aa, Arabidopsis thaliana
  peptide (1)..(570): Ceres Seq. ID no. 12669960
MAIKEETEESCGSRAVVASITKESPRQHRMKLEVYGEVLQRIQESNYEEANFPGFDDLLWLHFNRLPARYALDVNVERAEDVLTHQRLLKLAEDPATRPVFEVRCVQVSPTLNGNSGDVDPSDPAVNEDAQSSYNSRSLAPPTFGSSPNFEALTQAYKDHAQDDDSAVNAQLPNSRPMHEITFSTIDRPKLLSQLTSMLGELGLNIQEAHAFSTADGFSLDVFVVDGWSQEETEGLKDALKKEIRKFKDQPCSKQKSITFFEHDKSTNELLPACVEIPTDGTDEWEIDMKQLKIEKKVACGSYGELFRGTYCSQEVAIKILKPERVNAEMLREFSQEVYIMRKVRHKNVVQFIGACTRSPNLCIVTEFMTRGSIYDFLHKHKGVFKIQSLLKVALDVSKGMNYLHQNNIIHRDLKTANLLMDEHEVVKVADFGVARVQTESGVMTAETGTYRWMAPEVIEHKPYDHRADVFSYAIVLWELLTGELPYSYLTPLQAAVGVVQKGLRPKIPKETHPKLTELLEKCWQQDPALRPNFAEIIEMLNQLIREVGDDERHKDKHGGYFSGLKKGHR

SEQ ID NO: 83358 - protein, 541 aa, Arabidopsis thaliana
  peptide (1)..(541): Ceres Seq. ID no. 12669961
MKLEVYGEVLQRIQESNYEEANFPGFDDLLWLHFNRLPARYALDVNVERAEDVLTHQRLLKLAEDPATRPVFEVRCVQVSPTLNGNSGDVDPSDPAVNEDAQSSYNSRSLAPPTFGSSPNFEALTQAYKDHAQDDDSAVNAQLPNSRPMHEITFSTIDRPKLLSQLTSMLGELGLNIQEAHAFSTADGFSLDVFVVDGWSQEETEGLKDALKKEIRKFKDQPCSKQKSITFFEHDKSTNELLPACVEIPTDGTDEWEIDMKQLKIEKKVACGSYGELFRGTYCSQEVAIKILKPERVNAEMLREFSQEVYIMRKVRHKNVVQFIGACTRSPNLCIVTEFMTRGSIYDFLHKHKGVFKIQSLLKVALDVSKGMNYLHQNNIIHRDLKTANLLMDEHEVVKVADFGVARVQTESGVMTAETGTYRWMAPEVIEHKPYDHRADVFSYAIVLWELLTGELPYSYLTPLQAAVGVVQKGLRPKIPKETHPKLTELLEKCWQQDPALRPNFAEIIEMLNQLIREVGDDERHKDKHGGYFSGLKKGHR

SEQ ID NO: 83359 - protein, 393 aa, Arabidopsis thaliana
  peptide (1)..(393): Ceres Seq. ID no. 12669962
MHEITFSTIDRPKLLSQLTSMLGELGLNIQEAHAFSTADGFSLDVFVVDGWSQEETEGLKDALKKEIRKFKDQPCSKQKSITFFEHDKSTNELLPACVEIPTDGTDEWEIDMKQLKIEKKVACGSYGELFRGTYCSQEVAIKILKPERVNAEMLREFSQEVYIMRKVRHKNVVQFIGACTRSPNLCIVTEFMTRGSIYDFLHKHKGVFKIQSLLKVALDVSKGMNYLHQNNIIHRDLKTANLLMDEHEVVKVADFGVARVQTESGVMTAETGTYRWMAPEVIEHKPYDHRADVFSYAIVLWELLTGELPYSYLTPLQAAVGVVQKGLRPKIPKETHPKLTELLEKCWQQDPALRPNFAEIIEMLNQLIREVGDDERHKDKHGGYFSGLKKGHR

SEQ ID NO: 83360 - DNA, 1347 bp, Arabidopsis thaliana
  misc_feature (1)..(1347): Ceres Seq. ID no. 12669973
  misc_feature (1)..(1347): Ortholog of  Ceres SEQ ID NO 15176219 as cited in SEQ ID NO 58640
  misc_feature (1)..(1347): Ortholog of  Ceres SEQ ID NO 14303413 as cited in SEQ ID NO 59769
atggaatgctctgcaactcctcccaagctttatccaaccgtcgacacttcaaccaccgttgctcctctccctaagtcctcttcctcctcctcttctactaataataataatctctatccttcaatcaatgtcaatgatcttgtcaacaatatcttccccgatcccaccgcctctgactcagcttcagcgcctcctctcgcgacggaggaagtgattctcacaatccacggcgcgatggtccacctcattgacaaatcctacagcgtagagctcgcttgcggcgatctcgagattctccgtcttgttcaaggagatatcaccgtcgcggttttcgctcgcgtcggtgacgagatccaatggccgttgactaaagacgaacccgccgttaaagtcgatgagtctcattacttcttctcgctccgacccgttaaagaatccgagtcatcggatcattcagtcaacgaaacagagaacgagatgttgaactacggattaacaatggcttcgaaaggtcaagaaccgatgcttgagaagctagacaagatcttagctgattacagtagtttcacagcggaggagaaacagaaagaagagaacgttttggatttgacggcggcgaaggagacttcaccggaggagctgaagggaaagaggaaaaagatggtggagaagcagtgtacggcttattggacgactctggctccgaatgttgaggattacagtggcgttgcagcgaaactgatcgctgctggttctggtcaattgattaaagggatcttatggtgtggggatctcacaatggatagactcatgtggggaaatgatttcatgaagaagaagttgtccaaagcagagaaggagagacaagttagtcctggaactttgaaacgtctcaaaagagtaaagaagatgacaaaaatgacagagaaagtggcgaatggtgtgctctctggtgttgttaaagtttctggattcttctcgagttcagtgataaatagcaaagctgggcagaaactctttgggcttcttcctggagaaatggttcttgcaacacttgatggattcaacaaggtttgtgatgctgtcgaagtagcaggaagacacgttatgaaaacaacttcagatgtaactactgaaatcgtcgatcacaagtatggagcaaagacagcacaagcgacaaacgaagggcttagcgcagcagggcatgcttttggaacggcgtggactgttttcaagattagacaagctcttaaccccaagagtgccatgaagccatcatcactcgctaaaaccgtagttaaaacggcagctaaagagagaaagaaggggaaaaaaagttctaagtag

SEQ ID NO: 83361 - protein, 448 aa, Arabidopsis thaliana
  peptide (1)..(448): Ceres Seq. ID no. 12669974
MECSATPPKLYPTVDTSTTVAPLPKSSSSSSSTNNNNLYPSINVNDLVNNIFPDPTASDSASAPPLATEEVILTIHGAMVHLIDKSYSVELACGDLEILRLVQGDITVAVFARVGDEIQWPLTKDEPAVKVDESHYFFSLRPVKESESSDHSVNETENEMLNYGLTMASKGQEPMLEKLDKILADYSSFTAEEKQKEENVLDLTAAKETSPEELKGKRKKMVEKQCTAYWTTLAPNVEDYSGVAAKLIAAGSGQLIKGILWCGDLTMDRLMWGNDFMKKKLSKAEKERQVSPGTLKRLKRVKKMTKMTEKVANGVLSGVVKVSGFFSSSVINSKAGQKLFGLLPGEMVLATLDGFNKVCDAVEVAGRHVMKTTSDVTTEIVDHKYGAKTAQATNEGLSAAGHAFGTAWTVFKIRQALNPKSAMKPSSLAKTVVKTAAKERKKGKKSSK

SEQ ID NO: 83362 - protein, 370 aa, Arabidopsis thaliana
  peptide (1)..(370): Ceres Seq. ID no. 12669975
MVHLIDKSYSVELACGDLEILRLVQGDITVAVFARVGDEIQWPLTKDEPAVKVDESHYFFSLRPVKESESSDHSVNETENEMLNYGLTMASKGQEPMLEKLDKILADYSSFTAEEKQKEENVLDLTAAKETSPEELKGKRKKMVEKQCTAYWTTLAPNVEDYSGVAAKLIAAGSGQLIKGILWCGDLTMDRLMWGNDFMKKKLSKAEKERQVSPGTLKRLKRVKKMTKMTEKVANGVLSGVVKVSGFFSSSVINSKAGQKLFGLLPGEMVLATLDGFNKVCDAVEVAGRHVMKTTSDVTTEIVDHKYGAKTAQATNEGLSAAGHAFGTAWTVFKIRQALNPKSAMKPSSLAKTVVKTAAKERKKGKKSSK

SEQ ID NO: 83363 - protein, 289 aa, Arabidopsis thaliana
  peptide (1)..(289): Ceres Seq. ID no. 12669976
MLNYGLTMASKGQEPMLEKLDKILADYSSFTAEEKQKEENVLDLTAAKETSPEELKGKRKKMVEKQCTAYWTTLAPNVEDYSGVAAKLIAAGSGQLIKGILWCGDLTMDRLMWGNDFMKKKLSKAEKERQVSPGTLKRLKRVKKMTKMTEKVANGVLSGVVKVSGFFSSSVINSKAGQKLFGLLPGEMVLATLDGFNKVCDAVEVAGRHVMKTTSDVTTEIVDHKYGAKTAQATNEGLSAAGHAFGTAWTVFKIRQALNPKSAMKPSSLAKTVVKTAAKERKKGKKSSK

SEQ ID NO: 83364 - DNA, 1134 bp, Arabidopsis thaliana
  misc_feature (1)..(1134): Ceres Seq. ID no. 12669995
  misc_feature (1)..(1134): Ortholog of  Ceres SEQ ID NO 13582619 as cited in SEQ ID NO 56520
  misc_feature (1)..(1134): Ortholog of  Ceres SEQ ID NO 14315846 as cited in SEQ ID NO 58094
  misc_feature (1)..(1134): Ortholog of  Ceres SEQ ID NO 13660872 as cited in SEQ ID NO 60830
  misc_feature (1)..(1134): Ortholog of  Ceres SEQ ID NO 15226831 as cited in SEQ ID NO 62916
  misc_feature (1)..(1134): Ortholog of  Ceres SEQ ID NO 12616221 as cited in SEQ ID NO 63291
atggaatcggtggatcaatcatgtagtgttcctccgggattcagattccatccaacagatgaagagctcgttggttactatttaaggaaaaaagttgcatcgcaaaagatcgatcttgatgtcataagagatattgatctctacagaatcgaaccatgggatttacaagagagctgccgaatcggatatgaggaaagaaatgaatggtatttcttcagccacaaagataagaaatatccaacaggaacaagaacaaacagagcgaccatggctgggttttggaaagccacgggccgagacaaggctgtttacgacaagtcaaaactgattggtatgagaaaaacacttgtgttctacaaaggaagagcccctaatggccaaaaaaccgattggatcatgcatgaataccggctagagtcagatgagaatgcacctcctcaggaagaagggtgggtggtttgtagagcgttcaagaaaaagccaatgaccgggcaagccaagaacacagaaacttggagctcaagttacttttacgacgaattaccgagtggagtacgctcagttacggagcctcttaactacgtatctaagcagaaacaaaacgtttttgcacaagatttaatgttcaagcaagaactagaaggatcagatatcggtttaaacttcatccactgcgatcaattcattcaacttccgcagcttgaaagcccttcactccctcttaccaaaagaccagtgagcttgacgtcaattacatcattggagaagaataaaaatatctacaaaagacatttaatagaagaggatgtgagcttcaatgcgctaataagtagtggaaataaagataagaagaagaagaaaacatcagtgatgacgacggattggagagcactcgataaatttgttgcttctcaacttatgagccaagaagatggagtttcgggttttggaggtcatcatgaagaagataacaataaaatcggtcattacaataacgaagagagcaataacaagggatcagtagagactgcttcttccacgttattgagtgatagagaagaagagaacagattcatcagtggattattgtgttccaacttggactatgacttatatagggatttacatgtttga

SEQ ID NO: 83365 - protein, 377 aa, Arabidopsis thaliana
  peptide (1)..(377): Ceres Seq. ID no. 12669996
MESVDQSCSVPPGFRFHPTDEELVGYYLRKKVASQKIDLDVIRDIDLYRIEPWDLQESCRIGYEERNEWYFFSHKDKKYPTGTRTNRATMAGFWKATGRDKAVYDKSKLIGMRKTLVFYKGRAPNGQKTDWIMHEYRLESDENAPPQEEGWVVCRAFKKKPMTGQAKNTETWSSSYFYDELPSGVRSVTEPLNYVSKQKQNVFAQDLMFKQELEGSDIGLNFIHCDQFIQLPQLESPSLPLTKRPVSLTSITSLEKNKNIYKRHLIEEDVSFNALISSGNKDKKKKKTSVMTTDWRALDKFVASQLMSQEDGVSGFGGHHEEDNNKIGHYNNEESNNKGSVETASSTLLSDREEENRFISGLLCSNLDYDLYRDLHV

SEQ ID NO: 83366 - protein, 288 aa, Arabidopsis thaliana
  peptide (1)..(288): Ceres Seq. ID no. 12669997
MAGFWKATGRDKAVYDKSKLIGMRKTLVFYKGRAPNGQKTDWIMHEYRLESDENAPPQEEGWVVCRAFKKKPMTGQAKNTETWSSSYFYDELPSGVRSVTEPLNYVSKQKQNVFAQDLMFKQELEGSDIGLNFIHCDQFIQLPQLESPSLPLTKRPVSLTSITSLEKNKNIYKRHLIEEDVSFNALISSGNKDKKKKKTSVMTTDWRALDKFVASQLMSQEDGVSGFGGHHEEDNNKIGHYNNEESNNKGSVETASSTLLSDREEENRFISGLLCSNLDYDLYRDLHV

SEQ ID NO: 83367 - protein, 266 aa, Arabidopsis thaliana
  peptide (1)..(266): Ceres Seq. ID no. 12669998
MRKTLVFYKGRAPNGQKTDWIMHEYRLESDENAPPQEEGWVVCRAFKKKPMTGQAKNTETWSSSYFYDELPSGVRSVTEPLNYVSKQKQNVFAQDLMFKQELEGSDIGLNFIHCDQFIQLPQLESPSLPLTKRPVSLTSITSLEKNKNIYKRHLIEEDVSFNALISSGNKDKKKKKTSVMTTDWRALDKFVASQLMSQEDGVSGFGGHHEEDNNKIGHYNNEESNNKGSVETASSTLLSDREEENRFISGLLCSNLDYDLYRDLHV

SEQ ID NO: 83368 - DNA, 1819 bp, Arabidopsis thaliana
  misc_feature (1)..(1819): Ceres Seq. ID no. 12670002
  misc_feature (1)..(1819): Ortholog of  Ceres SEQ ID NO 14316039 as cited in SEQ ID NO 62062
  misc_feature (1)..(1819): Ortholog of  Ceres SEQ ID NO 15176783 as cited in SEQ ID NO 65590
  misc_feature (1)..(1819): Ortholog of  Ceres SEQ ID NO 14308019 as cited in SEQ ID NO 65849
  misc_feature (1)..(1819): Ortholog of  Ceres SEQ ID NO 13502874 as cited in SEQ ID NO 66298
  misc_feature (1)..(1819): Ortholog of  Ceres SEQ ID NO 14307944 as cited in SEQ ID NO 66503
  misc_feature (1)..(1819): Ortholog of  Ceres SEQ ID NO 12614124 as cited in SEQ ID NO 68392
  misc_feature (1)..(1819): Ortholog of  Ceres SEQ ID NO 14307980 as cited in SEQ ID NO 69214
aaaaaaaacactcaatatggagtcttctatatcacaaacactaagcaaactatcagatcccacgacgtctcttgtcatcgttgtctctcttttcatcttcatcagcttcatcacacggcggcgaaggcctccatatcctcccggtccacgaggttggcccatcataggcaacatgttaatgatggaccaactcacccaccgtggtttagccaatttagctaaaaagtatggcggattgtgccatctccgcatgggattcctccatatgtacgctgtctcatcacccgaggtggctcgacaagtccttcaagtccaagacagcgtcttctcgaaccggcctgcaactatagctataagctatctgacttacgaccgagcggacatggctttcgctcactacggaccgttttggagacagatgagaaaagtgtgtgtcatgaaggtgtttagccgtaaaagagctgagtcatgggcttcagttcgtgatgaagtggacaaaatggtccggtcggtctcttgtaacgttggtaagcctataaacgtcggggagcaaatttttgcactgacccgcaacataacttaccgggcagcgtttgggtcagcctgcgagaagggacaagacgagttcataagaatcttacaagagttctctaagctttttggagccttcaacgtagcggatttcataccatatttcgggtggatcgatccgcaagggataaacaagcggctcgtgaaggcccgtaatgatctagacggatttattgacgatattatcgatgaacatatgaagaagaaggagaatcaaaacgctgtggatgatggggatgttgtcgataccgatatggttgatgatcttcttgctttttacagtgaagaggccaaattagtcagtgagacagcggatcttcaaaattccatcaaacttacccgtgacaatatcaaagcaatcatcatggacgttatgtttggaggaacggaaacggtagcgtcggcgatagagtgggccttaacggagttattacggagccccgaggatctaaaacgggtccaacaagaactcgccgaagtcgttggacttgacagacgagttgaagaatccgacatcgagaagttgacttatctcaaatgcacactcaaagaaaccctaaggatgcacccaccgatccctctcctcctccacgaaaccgcggaggacactagtatcgacggtttcttcattcccaagaaatctcgtgtgatgatcaacgcgtttgccataggacgcgacccaacctcttggactgacccggacacgtttagaccatcgaggtttttggaaccgggcgtaccggatttcaaagggagcaatttcgagtttataccgttcgggtcgggtcgtagatcgtgcccgggtatgcaactagggttatacgcgcttgacttagccgtggctcatatattacattgcttcacgtggaaattacctgatgggatgaaaccaagtgagctcgacatgaatgatgtgtttggtctcacggctcctaaagccacgcggcttttcgccgtgccaaccacgcgcctcatctgtgctctttaagtttatggttcgagtcacgtggcagggggtttggtatggtgaaaactgaaaagtttgaagttgccctcatcgaggatttgtggatgtcatatgtatgtatgtgtatacacgtgtgttctgatgaaaacagatttggctctttgtttgccctttttttttttttctttaatggggattttccttgaatgaaatgtaacagtaaaaataagatttttttcaataagtaatttagcatgttgc

SEQ ID NO: 83369 - protein, 525 aa, Arabidopsis thaliana
  peptide (1)..(525): Ceres Seq. ID no. 12670003
KKTLNMESSISQTLSKLSDPTTSLVIVVSLFIFISFITRRRRPPYPPGPRGWPIIGNMLMMDQLTHRGLANLAKKYGGLCHLRMGFLHMYAVSSPEVARQVLQVQDSVFSNRPATIAISYLTYDRADMAFAHYGPFWRQMRKVCVMKVFSRKRAESWASVRDEVDKMVRSVSCNVGKPINVGEQIFALTRNITYRAAFGSACEKGQDEFIRILQEFSKLFGAFNVADFIPYFGWIDPQGINKRLVKARNDLDGFIDDIIDEHMKKKENQNAVDDGDVVDTDMVDDLLAFYSEEAKLVSETADLQNSIKLTRDNIKAIIMDVMFGGTETVASAIEWALTELLRSPEDLKRVQQELAEVVGLDRRVEESDIEKLTYLKCTLKETLRMHPPIPLLLHETAEDTSIDGFFIPKKSRVMINAFAIGRDPTSWTDPDTFRPSRFLEPGVPDFKGSNFEFIPFGSGRRSCPGMQLGLYALDLAVAHILHCFTWKLPDGMKPSELDMNDVFGLTAPKATRLFAVPTTRLICAL

SEQ ID NO: 83370 - protein, 520 aa, Arabidopsis thaliana
  peptide (1)..(520): Ceres Seq. ID no. 12670004
MESSISQTLSKLSDPTTSLVIVVSLFIFISFITRRRRPPYPPGPRGWPIIGNMLMMDQLTHRGLANLAKKYGGLCHLRMGFLHMYAVSSPEVARQVLQVQDSVFSNRPATIAISYLTYDRADMAFAHYGPFWRQMRKVCVMKVFSRKRAESWASVRDEVDKMVRSVSCNVGKPINVGEQIFALTRNITYRAAFGSACEKGQDEFIRILQEFSKLFGAFNVADFIPYFGWIDPQGINKRLVKARNDLDGFIDDIIDEHMKKKENQNAVDDGDVVDTDMVDDLLAFYSEEAKLVSETADLQNSIKLTRDNIKAIIMDVMFGGTETVASAIEWALTELLRSPEDLKRVQQELAEVVGLDRRVEESDIEKLTYLKCTLKETLRMHPPIPLLLHETAEDTSIDGFFIPKKSRVMINAFAIGRDPTSWTDPDTFRPSRFLEPGVPDFKGSNFEFIPFGSGRRSCPGMQLGLYALDLAVAHILHCFTWKLPDGMKPSELDMNDVFGLTAPKATRLFAVPTTRLICAL

SEQ ID NO: 83371 - protein, 468 aa, Arabidopsis thaliana
  peptide (1)..(468): Ceres Seq. ID no. 12670005
MLMMDQLTHRGLANLAKKYGGLCHLRMGFLHMYAVSSPEVARQVLQVQDSVFSNRPATIAISYLTYDRADMAFAHYGPFWRQMRKVCVMKVFSRKRAESWASVRDEVDKMVRSVSCNVGKPINVGEQIFALTRNITYRAAFGSACEKGQDEFIRILQEFSKLFGAFNVADFIPYFGWIDPQGINKRLVKARNDLDGFIDDIIDEHMKKKENQNAVDDGDVVDTDMVDDLLAFYSEEAKLVSETADLQNSIKLTRDNIKAIIMDVMFGGTETVASAIEWALTELLRSPEDLKRVQQELAEVVGLDRRVEESDIEKLTYLKCTLKETLRMHPPIPLLLHETAEDTSIDGFFIPKKSRVMINAFAIGRDPTSWTDPDTFRPSRFLEPGVPDFKGSNFEFIPFGSGRRSCPGMQLGLYALDLAVAHILHCFTWKLPDGMKPSELDMNDVFGLTAPKATRLFAVPTTRLICAL

SEQ ID NO: 83372 - DNA, 1925 bp, Arabidopsis thaliana
  misc_feature (1)..(1925): Ceres Seq. ID no. 12670016
  misc_feature (1)..(1925): Ortholog of  Ceres SEQ ID NO 15176532 as cited in SEQ ID NO 58184
  misc_feature (1)..(1925): Ortholog of  Ceres SEQ ID NO 13597546 as cited in SEQ ID NO 65017
  misc_feature (1)..(1925): Ortholog of  Ceres SEQ ID NO 14308015 as cited in SEQ ID NO 65798
  misc_feature (1)..(1925): Ortholog of  Ceres SEQ ID NO 14307908 as cited in SEQ ID NO 67189
  misc_feature (1)..(1925): Ortholog of  Ceres SEQ ID NO 13654353 as cited in SEQ ID NO 68318
tgtgcttaggcatatagttattcccaagaaaccggtttaactgtttacgtatgcaacctccggcaagcgcaggacttttccggtcgccggaaaatctcccttggccttataattacatggattatttggtcgctggtttcttggttttgacggccggaatacttctccgtccatggctctggttacgtctacgaaactcgaaaacgaaagatggagatgaagaagaagataatgaggagaagaagaagggaatgattccaaacggaagcttaggctggccggtgatcggagaaaccctaaacttcatcgcttgtggttattcttctcggcctgttaccttcatggacaaacgaaagtctttatacgggaaagtgttcaaaacgaacataatagggacaccaatcataatatcaaccgatgcagaggtgaataaagtggtgctccaaaaccatgggaacacatttgtccctgcataccctaaatcaattacggaactacttggagaaaactctattctcagcatcaatggacctcatcaaaaaaggcttcacacgctcattggcgcgttcctcagatctcctcacctcaaagaccggatcactcgagacattgaggcctcggttgttctcactttggcgtcttgggctcaacttccattggttcatgttcaggatgagatcaaaaagatgacgtttgagatattagtaaaagtgttgatgagcacatctcctggtgaagatatgaacattctcaaacttgagttcgaagaattcatcaaaggtttgatttgtatcccaatcaaattccctggcactagactctacaaatccttaaaggcgaaagagaggttaataaagatggtaaaaaaggttgtggaggagagacaagtggcgatgacaacgacgtctccggcaaatgacgtggtggacgtacttctaagagacggtggtgattcagagaagcaatctcaaccgtcagatttcgtcagcggaaagatcgtagagatgatgatacccggagaggaaacaatgccaacggcgatgaccttggctgtcaaattcttaagtgacaaccccgtcgctctagccaaactcgtggaggagaatatggagatgaagaggcgtaaattggaattgggagaagaatacaagtggaccgattatatgtctctctcttttactcaaaatgtgataaacgaaacgcttagaatggctaacattattaacggggtgtggaggaaagctctcaaggatgtagaaattaaaggttacttaataccgaaaggatggtgtgtattggcatcattcatatcggttcacatggatgaagacatttatgataatccctatcaattcgatccgtggagatgggacagaattaatggatcggcaaacagcagtatttgcttcacaccctttggtggtgggcaaaggctatgtcctggtttagagctgtcgaagctcgaaatatccatctttcttcaccaccttgtaacccggtacagttggacggctgaggaagacgagatagtgtcatttccgactgtgaagatgaagcggaggctcccgatccgagtggctactgtagatgatagtgcttctccgatctcacttgaagatcattaatagatcatttcaaagaacaaaactgtttgtgcaaagaggaagcagagaagtaaacaaatgatcttattaacaaatagtagagaagagaagcaaacaagattggtgggtaagacagaaagagccatacgtacagctagtgatggctcaaagatgagagattctaattataattttttttgtttgtcatgtcaaattataagcgttggttaggttgtccctttctcttttatttatcgtaccaaacgcaagttgagatatgattccatatatatggatgatagatatgtatattaatatata

SEQ ID NO: 83373 - protein, 524 aa, Arabidopsis thaliana
  peptide (1)..(524): Ceres Seq. ID no. 12670017
MQPPASAGLFRSPENLPWPYNYMDYLVAGFLVLTAGILLRPWLWLRLRNSKTKDGDEEEDNEEKKKGMIPNGSLGWPVIGETLNFIACGYSSRPVTFMDKRKSLYGKVFKTNIIGTPIIISTDAEVNKVVLQNHGNTFVPAYPKSITELLGENSILSINGPHQKRLHTLIGAFLRSPHLKDRITRDIEASVVLTLASWAQLPLVHVQDEIKKMTFEILVKVLMSTSPGEDMNILKLEFEEFIKGLICIPIKFPGTRLYKSLKAKERLIKMVKKVVEERQVAMTTTSPANDVVDVLLRDGGDSEKQSQPSDFVSGKIVEMMIPGEETMPTAMTLAVKFLSDNPVALAKLVEENMEMKRRKLELGEEYKWTDYMSLSFTQNVINETLRMANIINGVWRKALKDVEIKGYLIPKGWCVLASFISVHMDEDIYDNPYQFDPWRWDRINGSANSSICFTPFGGGQRLCPGLELSKLEISIFLHHLVTRYSWTAEEDEIVSFPTVKMKRRLPIRVATVDDSASPISLEDH

SEQ ID NO: 83374 - protein, 502 aa, Arabidopsis thaliana
  peptide (1)..(502): Ceres Seq. ID no. 12670018
MDYLVAGFLVLTAGILLRPWLWLRLRNSKTKDGDEEEDNEEKKKGMIPNGSLGWPVIGETLNFIACGYSSRPVTFMDKRKSLYGKVFKTNIIGTPIIISTDAEVNKVVLQNHGNTFVPAYPKSITELLGENSILSINGPHQKRLHTLIGAFLRSPHLKDRITRDIEASVVLTLASWAQLPLVHVQDEIKKMTFEILVKVLMSTSPGEDMNILKLEFEEFIKGLICIPIKFPGTRLYKSLKAKERLIKMVKKVVEERQVAMTTTSPANDVVDVLLRDGGDSEKQSQPSDFVSGKIVEMMIPGEETMPTAMTLAVKFLSDNPVALAKLVEENMEMKRRKLELGEEYKWTDYMSLSFTQNVINETLRMANIINGVWRKALKDVEIKGYLIPKGWCVLASFISVHMDEDIYDNPYQFDPWRWDRINGSANSSICFTPFGGGQRLCPGLELSKLEISIFLHHLVTRYSWTAEEDEIVSFPTVKMKRRLPIRVATVDDSASPISLEDH

SEQ ID NO: 83375 - protein, 457 aa, Arabidopsis thaliana
  peptide (1)..(457): Ceres Seq. ID no. 12670019
MIPNGSLGWPVIGETLNFIACGYSSRPVTFMDKRKSLYGKVFKTNIIGTPIIISTDAEVNKVVLQNHGNTFVPAYPKSITELLGENSILSINGPHQKRLHTLIGAFLRSPHLKDRITRDIEASVVLTLASWAQLPLVHVQDEIKKMTFEILVKVLMSTSPGEDMNILKLEFEEFIKGLICIPIKFPGTRLYKSLKAKERLIKMVKKVVEERQVAMTTTSPANDVVDVLLRDGGDSEKQSQPSDFVSGKIVEMMIPGEETMPTAMTLAVKFLSDNPVALAKLVEENMEMKRRKLELGEEYKWTDYMSLSFTQNVINETLRMANIINGVWRKALKDVEIKGYLIPKGWCVLASFISVHMDEDIYDNPYQFDPWRWDRINGSANSSICFTPFGGGQRLCPGLELSKLEISIFLHHLVTRYSWTAEEDEIVSFPTVKMKRRLPIRVATVDDSASPISLEDH

SEQ ID NO: 83376 - DNA, 1086 bp, Arabidopsis thaliana
  misc_feature (1)..(1086): Ceres Seq. ID no. 12670024
  misc_feature (1)..(1086): Ortholog of  Ceres SEQ ID NO 13592852 as cited in SEQ ID NO 20709
  misc_feature (1)..(1086): Ortholog of  Ceres SEQ ID NO 13532807 as cited in SEQ ID NO 53012
  misc_feature (1)..(1086): Ortholog of  Ceres SEQ ID NO 14313425 as cited in SEQ ID NO 54973
  misc_feature (1)..(1086): Ortholog of  Ceres SEQ ID NO 13663060 as cited in SEQ ID NO 60964
  misc_feature (1)..(1086): Ortholog of  Ceres SEQ ID NO 13656849 as cited in SEQ ID NO 65764
  misc_feature (1)..(1086): Ortholog of  Ceres SEQ ID NO 13500573 as cited in SEQ ID NO 67431
  misc_feature (1)..(1086): Ortholog of  Ceres SEQ ID NO 13656501 as cited in SEQ ID NO 69206
atggcgatgctagttgatcctccaaatgggataagacaagaagggaaacattactacacgatgtggcaaacattattcgaaatcgacactaagtatgttccgattaagccgattggaagaggagcttatggtgtggtttgttcttcaatcaacagcgaaaccaatgagagagttgctattaagaagatccacaatgtgtttgagaatcgcatcgatgctttgagaacattgagagagcttaagcttttaaggcatgtgagacacgaaaacgttatctcccttaaggatgttatgctgcctactcacaggtacagcttcagagatgtttatttggtctatgagcttatggattctgatttgaatcagatcatcaaatcctctcagtctctctccgatgatcactgcaagtacttcttgtttcagttgctaagaggattgaagtatcttcactcagcaaacatccttcatcgcgatttaaagccagggaatctcttagtgaatgctaattgtgatctaaagatttgtgatttcgggcttgcgagaacttatgaacagtttatgacagagtatgtggtcactcgttggtaccgagcacctgagcttcttctctgttgtgataactacggaacctccattgatgtttggtcggtaggatgcatattcgcagagattcttggaagaaaaccgatattcccgggaacagaatgtctcaaccaactaaagctaatcataaatgttgttggtagccaacaagactgggatctccagttcatagataaccagaaagctaggagatttataaagtctcttcctttctcaaagggtactcacttttctcatatttacccgcacgcaaatccgctggcgatagatttgttacagaggatgcttgtgtttgatccaaccaagagaatatcggtcagcgatgcgcttttacacccctacatggagggactgttggaaccggaatgtaacccgtcggaaaatgttccggtcagtagtttggagatagatgagaacatggaaggagatatgatcagggagatgatgtgggaagagatgcttcattacctcccccgagcttaa

SEQ ID NO: 83377 - protein, 361 aa, Arabidopsis thaliana
  peptide (1)..(361): Ceres Seq. ID no. 12670025
MAMLVDPPNGIRQEGKHYYTMWQTLFEIDTKYVPIKPIGRGAYGVVCSSINSETNERVAIKKIHNVFENRIDALRTLRELKLLRHVRHENVISLKDVMLPTHRYSFRDVYLVYELMDSDLNQIIKSSQSLSDDHCKYFLFQLLRGLKYLHSANILHRDLKPGNLLVNANCDLKICDFGLARTYEQFMTEYVVTRWYRAPELLLCCDNYGTSIDVWSVGCIFAEILGRKPIFPGTECLNQLKLIINVVGSQQDWDLQFIDNQKARRFIKSLPFSKGTHFSHIYPHANPLAIDLLQRMLVFDPTKRISVSDALLHPYMEGLLEPECNPSENVPVSSLEIDENMEGDMIREMMWEEMLHYLPRA

SEQ ID NO: 83378 - protein, 359 aa, Arabidopsis thaliana
  peptide (1)..(359): Ceres Seq. ID no. 12670026
MLVDPPNGIRQEGKHYYTMWQTLFEIDTKYVPIKPIGRGAYGVVCSSINSETNERVAIKKIHNVFENRIDALRTLRELKLLRHVRHENVISLKDVMLPTHRYSFRDVYLVYELMDSDLNQIIKSSQSLSDDHCKYFLFQLLRGLKYLHSANILHRDLKPGNLLVNANCDLKICDFGLARTYEQFMTEYVVTRWYRAPELLLCCDNYGTSIDVWSVGCIFAEILGRKPIFPGTECLNQLKLIINVVGSQQDWDLQFIDNQKARRFIKSLPFSKGTHFSHIYPHANPLAIDLLQRMLVFDPTKRISVSDALLHPYMEGLLEPECNPSENVPVSSLEIDENMEGDMIREMMWEEMLHYLPRA

SEQ ID NO: 83379 - protein, 341 aa, Arabidopsis thaliana
  peptide (1)..(341): Ceres Seq. ID no. 12670027
MWQTLFEIDTKYVPIKPIGRGAYGVVCSSINSETNERVAIKKIHNVFENRIDALRTLRELKLLRHVRHENVISLKDVMLPTHRYSFRDVYLVYELMDSDLNQIIKSSQSLSDDHCKYFLFQLLRGLKYLHSANILHRDLKPGNLLVNANCDLKICDFGLARTYEQFMTEYVVTRWYRAPELLLCCDNYGTSIDVWSVGCIFAEILGRKPIFPGTECLNQLKLIINVVGSQQDWDLQFIDNQKARRFIKSLPFSKGTHFSHIYPHANPLAIDLLQRMLVFDPTKRISVSDALLHPYMEGLLEPECNPSENVPVSSLEIDENMEGDMIREMMWEEMLHYLPRA

SEQ ID NO: 83380 - DNA, 2098 bp, Arabidopsis thaliana
  misc_feature (1)..(2098): Ceres Seq. ID no. 12670028
  misc_feature (1)..(2098): Ortholog of  Ceres SEQ ID NO 14316424 as cited in SEQ ID NO 58251
tacttttttttttttctctctgaaattgattttttttttttgccgtctgcgttatcaaaaatctcgaaaaaacgttgaaagtcaatctttttgcatcgccgaatttgaacaacactcctcgtgtgtttgacactcttgtgggcacgataccttctgctccttgtccattttgccacccaaaatccaattgggatcaggttttcccaaagttgagctagcttctcttatgctcgattcgtcgagcaaattaatactatagaagaaaaaagtacagagctttattaaagcaaattagcaatggcttcgaatctcgtggaaatgtttaatgctgctttgaattgggttactatgattctggagagtccttcagctagagttgtcttgtttggtgtcccaatccgagggcacttctttgtggaagggttgttgggtgttgtcattatcattctcctcactcggaagagttataaacctcccaagcgaccattgaccgagcaggaaatagatgagttgtgtgatgagtgggttcctgaacctcttataccgccaattactgaagacatgaagcatgagccaccagttcttgaaagtgctgctggaccgcatacaacagttaatggaaaagatgtggtgaattttgcctcagctaattatcttgggctcattggccacgagaagttgctggaatcatgtacttctgcattagaaaaatatggggtcggttcttgtgggcctcgtggattctatggtacaattgatgtccaccttgactgcgaaaccagaatatccaaatttttgggtactcctgattcaatcctttactcttatggactttccacaatgttcagcacaattccttgtttctgtaagaaaggcgatgtcattgttgctgatgagggtgttcactggggaatacaaaatggacttcagctttcaagaagtacaattgtgtacttcaagcacaatgacatggaatcccttcgaattacccttgagaaaatcatgacaaagtacaagcgctcaaagaacttgaggcgttatattgtagctgaagctgtatatcaaaattcaggtcaaattgcgcctctggatgagattgtaaaactaaaagagaagtatcggtttcgtgttatattggatgaaagcaactcttttggtgtgcttggccgttctgggagaggtcttgcagagcatcatagtgtccctattgagaagatagatgttgtgactgctgcaatgggccatgcattagccacagaaggtggattttgcactgggaatgcccgcatcatcgattaccagagacttagcagttcaggatatgtgttctctgcttctttaccaccataccttgcaagtgctgctatcaccgccattgatgtcattgatcaaaaccctgatatgttagttaagctgaagcaaaatgttgctctgttatggaaaggattgtcagatatcaaggggatgtcattaacaagcaaccgggaatcacctattgttttcttaaaattagagaaatctagcggttcagctaaagatgatttgcttctacttgagaaaatggctgaccgtgctctgaaggaagactcattgttggttgtgagttctaaaagatcatttcttgataaatgccggttacctgtgggaatcaaactctacgtctcagcgggacattcggaatccgatcttcttaaagcgtcggagtcactgaagagacttgcttcagagcttctactcaagtcctgaaacaccgaaactcttttttcttcaagaacaacaacactgaagggaactctttgaacacatccgtgtgagatagtagacaacagaatccgcagagtcagtagcttgaagatgttcatagcagattcctaaactggttctccactttcagtgatgggcttgtggttgatctgaagctcaattgacgaaggaggattatcgaagacaatggcttcttgttcttacatttatttcatttgatcatctgagttctttttttttttttcctactcatacccttcaatgatcaagtagcttagtgttgttgccgaaattcaaaaactttcaatttatgggaaacaaaaaagttcatgtg

SEQ ID NO: 83381 - protein, 482 aa, Arabidopsis thaliana
  peptide (1)..(482): Ceres Seq. ID no. 12670029
MASNLVEMFNAALNWVTMILESPSARVVLFGVPIRGHFFVEGLLGVVIIILLTRKSYKPPKRPLTEQEIDELCDEWVPEPLIPPITEDMKHEPPVLESAAGPHTTVNGKDVVNFASANYLGLIGHEKLLESCTSALEKYGVGSCGPRGFYGTIDVHLDCETRISKFLGTPDSILYSYGLSTMFSTIPCFCKKGDVIVADEGVHWGIQNGLQLSRSTIVYFKHNDMESLRITLEKIMTKYKRSKNLRRYIVAEAVYQNSGQIAPLDEIVKLKEKYRFRVILDESNSFGVLGRSGRGLAEHHSVPIEKIDVVTAAMGHALATEGGFCTGNARIIDYQRLSSSGYVFSASLPPYLASAAITAIDVIDQNPDMLVKLKQNVALLWKGLSDIKGMSLTSNRESPIVFLKLEKSSGSAKDDLLLLEKMADRALKEDSLLVVSSKRSFLDKCRLPVGIKLYVSAGHSESDLLKASESLKRLASELLLKS

SEQ ID NO: 83382 - protein, 475 aa, Arabidopsis thaliana
  peptide (1)..(475): Ceres Seq. ID no. 12670030
MFNAALNWVTMILESPSARVVLFGVPIRGHFFVEGLLGVVIIILLTRKSYKPPKRPLTEQEIDELCDEWVPEPLIPPITEDMKHEPPVLESAAGPHTTVNGKDVVNFASANYLGLIGHEKLLESCTSALEKYGVGSCGPRGFYGTIDVHLDCETRISKFLGTPDSILYSYGLSTMFSTIPCFCKKGDVIVADEGVHWGIQNGLQLSRSTIVYFKHNDMESLRITLEKIMTKYKRSKNLRRYIVAEAVYQNSGQIAPLDEIVKLKEKYRFRVILDESNSFGVLGRSGRGLAEHHSVPIEKIDVVTAAMGHALATEGGFCTGNARIIDYQRLSSSGYVFSASLPPYLASAAITAIDVIDQNPDMLVKLKQNVALLWKGLSDIKGMSLTSNRESPIVFLKLEKSSGSAKDDLLLLEKMADRALKEDSLLVVSSKRSFLDKCRLPVGIKLYVSAGHSESDLLKASESLKRLASELLLKS

SEQ ID NO: 83383 - protein, 465 aa, Arabidopsis thaliana
  peptide (1)..(465): Ceres Seq. ID no. 12670031
MILESPSARVVLFGVPIRGHFFVEGLLGVVIIILLTRKSYKPPKRPLTEQEIDELCDEWVPEPLIPPITEDMKHEPPVLESAAGPHTTVNGKDVVNFASANYLGLIGHEKLLESCTSALEKYGVGSCGPRGFYGTIDVHLDCETRISKFLGTPDSILYSYGLSTMFSTIPCFCKKGDVIVADEGVHWGIQNGLQLSRSTIVYFKHNDMESLRITLEKIMTKYKRSKNLRRYIVAEAVYQNSGQIAPLDEIVKLKEKYRFRVILDESNSFGVLGRSGRGLAEHHSVPIEKIDVVTAAMGHALATEGGFCTGNARIIDYQRLSSSGYVFSASLPPYLASAAITAIDVIDQNPDMLVKLKQNVALLWKGLSDIKGMSLTSNRESPIVFLKLEKSSGSAKDDLLLLEKMADRALKEDSLLVVSSKRSFLDKCRLPVGIKLYVSAGHSESDLLKASESLKRLASELLLKS

SEQ ID NO: 83384 - DNA, 636 bp, Arabidopsis thaliana
  misc_feature (1)..(636): Ceres Seq. ID no. 12670039
  misc_feature (1)..(636): Ortholog of  Ceres SEQ ID NO 13587149 as cited in SEQ ID NO 0
atgggtttctcaatgttcttctcccccgaaaacgacgtcagccatcattcctctccatatgcttctgttgactgcactctctcacttggaactccctccactcgcctctgcaacgaggatgatgaacgtagattctcgtctcatacctccgacaccataggctgggacttcttgaacggttccaagaaaggcggtggaggcggcggacataacctcctcgctcgccgttgcgccaactgcgacaccacttctactcctctttggagaaacggtccaagaggtcccaagtcgttgtgtaatgcgtgtggaatccgattcaagaaagaagagagacgtgcatcgaccgccagaaactcgacctccggcggaggatcaactgcagctggagttccaactttggatcatcaagcaagtgcaaattattattataacaataataaccaatatgcttcatcgtcgccttggcaccatcagcataatacgcagagagttccatattactcgccggccaataacgaatactcatacgttgatgatgtcagagttgttgatcatgacgtcacaaccgacccgttcttgtcttggaggcttaacgtcgccgaccggaccggccttgtccacgattttacgatgtga

SEQ ID NO: 83385 - protein, 211 aa, Arabidopsis thaliana
  peptide (1)..(211): Ceres Seq. ID no. 12670040
MGFSMFFSPENDVSHHSSPYASVDCTLSLGTPSTRLCNEDDERRFSSHTSDTIGWDFLNGSKKGGGGGGHNLLARRCANCDTTSTPLWRNGPRGPKSLCNACGIRFKKEERRASTARNSTSGGGSTAAGVPTLDHQASANYYYNNNNQYASSSPWHHQHNTQRVPYYSPANNEYSYVDDVRVVDHDVTTDPFLSWRLNVADRTGLVHDFTM

SEQ ID NO: 83386 - protein, 207 aa, Arabidopsis thaliana
  peptide (1)..(207): Ceres Seq. ID no. 12670041
MFFSPENDVSHHSSPYASVDCTLSLGTPSTRLCNEDDERRFSSHTSDTIGWDFLNGSKKGGGGGGHNLLARRCANCDTTSTPLWRNGPRGPKSLCNACGIRFKKEERRASTARNSTSGGGSTAAGVPTLDHQASANYYYNNNNQYASSSPWHHQHNTQRVPYYSPANNEYSYVDDVRVVDHDVTTDPFLSWRLNVADRTGLVHDFTM

SEQ ID NO: 83387 - protein, 112 aa, Arabidopsis thaliana
  peptide (1)..(112): Ceres Seq. ID no. 12670042
MRVESDSRKKRDVHRPPETRPPAEDQLQLEFQLWIIKQVQIIIITIITNMLHRRLGTISIIRREFHITRRPITNTHTLMMSELLIMTSQPTRSCLGGLTSPTGPALSTILRC

SEQ ID NO: 83388 - DNA, 1611 bp, Arabidopsis thaliana
  misc_feature (1)..(1611): Ceres Seq. ID no. 12670072
  misc_feature (1)..(1611): Ortholog of  Ceres SEQ ID NO 13659971 as cited in SEQ ID NO 67565
  misc_feature (1)..(1611): Ortholog of  Ceres SEQ ID NO 13500385 as cited in SEQ ID NO 67583
atgggtctctgtttctcgtctcctaaagccaccagacgtggcaccggtagtcggaaccctaatcctgattctccgacgcaggggaaggcgagtgagaaggttagtaataaaaacaagaagaatacgaagaagatccaattgaggcaccaaggagggatcccgtacggtaaacgcatcgattttgggtacgctaaggatttcgataaccgatacaccattgggaaattgctcggacatggccagtttggctttacctacgtcgccaccgataacaacaatggcaatcgcgttgcagtcaagagaatcgacaaggccaagatgactcaaccgattgaagtggaagatgtgaagcgagaggttaagatactacaagctttaggtgggcatgagaatgtggtaggctttcacaatgcatttgaggacaagacctatatttacattgtcatggagttatgtgacggtggtgaattgctagatcgaatactagctaaccgttacaccgagaaagatgcagcggttgtggtgagacaaatgctgaaagttgcagctgaatgtcatttacgaggtctagttcaccgcgacatgaagccagagaattttctgttcaaatcaaccgaagaaggttcatctctaaaggctacagattttggtctgtcggacttcataaagccaggagtgaaatttcaggatatagtaggaagcgcatactacgttgcacctgaagtgttgaaacgtaggtcaggacctgaatcagacgtttggagtattggtgtcatcacttacattctgctctgcgggagaagacccttctgggataagactcaagacggaatattcaatgaggtcatgaggaaaaaacctgatttcagagaagtcccatggccaaccattagcaacggtgccaaagatttcgtgaagaagttgttagttaaggagcctcgggcacggttaacagcagctcaagcgctatcacattcatgggtgaaagaaggaggtgaggcctcagaggttccaatagacatatctgttcttaacaatatgcgtcagtttgtgaaattcagccgtctgaagcagattgcacttagggctctggcgaaaacaattaatgaggatgagctggatgatctcagagaccagtttgatgcgattgacattgacaagaacggttctataagccttgaggaaatgaggcaggctcttgcgaaagatgttccttggaaactcaaagatgcaagagttgcagagattctccaagcgaatgatagcaacactgatggtttggtggatttcactgagtttgtggtggctgctttgcacgtgaaccaattggaggagcatgactctgagaagtggcaacagaggtcaagagcagcatttgacaagtttgacatagacggagatgggtttataactcccgaagaacttagattgaatcaatgtttgcagcaaacgggtttaaaaggctccatcgaaccacttcttgaagaggccgacgtagatgaagatgggagaatcagcatcaatgagtttcgcagacttttgagaagtgcaagcctcaagtcaaaaaatgttaaaagccctcctggttaccagctttcacaaaagatgtaa

SEQ ID NO: 83389 - protein, 536 aa, Arabidopsis thaliana
  peptide (1)..(536): Ceres Seq. ID no. 12670073
MGLCFSSPKATRRGTGSRNPNPDSPTQGKASEKVSNKNKKNTKKIQLRHQGGIPYGKRIDFGYAKDFDNRYTIGKLLGHGQFGFTYVATDNNNGNRVAVKRIDKAKMTQPIEVEDVKREVKILQALGGHENVVGFHNAFEDKTYIYIVMELCDGGELLDRILANRYTEKDAAVVVRQMLKVAAECHLRGLVHRDMKPENFLFKSTEEGSSLKATDFGLSDFIKPGVKFQDIVGSAYYVAPEVLKRRSGPESDVWSIGVITYILLCGRRPFWDKTQDGIFNEVMRKKPDFREVPWPTISNGAKDFVKKLLVKEPRARLTAAQALSHSWVKEGGEASEVPIDISVLNNMRQFVKFSRLKQIALRALAKTINEDELDDLRDQFDAIDIDKNGSISLEEMRQALAKDVPWKLKDARVAEILQANDSNTDGLVDFTEFVVAALHVNQLEEHDSEKWQQRSRAAFDKFDIDGDGFITPEELRLNQCLQQTGLKGSIEPLLEEADVDEDGRISINEFRRLLRSASLKSKNVKSPPGYQLSQKM

SEQ ID NO: 83390 - protein, 430 aa, Arabidopsis thaliana
  peptide (1)..(430): Ceres Seq. ID no. 12670074
MTQPIEVEDVKREVKILQALGGHENVVGFHNAFEDKTYIYIVMELCDGGELLDRILANRYTEKDAAVVVRQMLKVAAECHLRGLVHRDMKPENFLFKSTEEGSSLKATDFGLSDFIKPGVKFQDIVGSAYYVAPEVLKRRSGPESDVWSIGVITYILLCGRRPFWDKTQDGIFNEVMRKKPDFREVPWPTISNGAKDFVKKLLVKEPRARLTAAQALSHSWVKEGGEASEVPIDISVLNNMRQFVKFSRLKQIALRALAKTINEDELDDLRDQFDAIDIDKNGSISLEEMRQALAKDVPWKLKDARVAEILQANDSNTDGLVDFTEFVVAALHVNQLEEHDSEKWQQRSRAAFDKFDIDGDGFITPEELRLNQCLQQTGLKGSIEPLLEEADVDEDGRISINEFRRLLRSASLKSKNVKSPPGYQLSQKM

SEQ ID NO: 83391 - protein, 388 aa, Arabidopsis thaliana
  peptide (1)..(388): Ceres Seq. ID no. 12670075
MELCDGGELLDRILANRYTEKDAAVVVRQMLKVAAECHLRGLVHRDMKPENFLFKSTEEGSSLKATDFGLSDFIKPGVKFQDIVGSAYYVAPEVLKRRSGPESDVWSIGVITYILLCGRRPFWDKTQDGIFNEVMRKKPDFREVPWPTISNGAKDFVKKLLVKEPRARLTAAQALSHSWVKEGGEASEVPIDISVLNNMRQFVKFSRLKQIALRALAKTINEDELDDLRDQFDAIDIDKNGSISLEEMRQALAKDVPWKLKDARVAEILQANDSNTDGLVDFTEFVVAALHVNQLEEHDSEKWQQRSRAAFDKFDIDGDGFITPEELRLNQCLQQTGLKGSIEPLLEEADVDEDGRISINEFRRLLRSASLKSKNVKSPPGYQLSQKM

SEQ ID NO: 83392 - DNA, 1116 bp, Arabidopsis thaliana
  misc_feature (1)..(1116): Ceres Seq. ID no. 12670080
  misc_feature (1)..(1116): Ortholog of  Ceres SEQ ID NO 14304654 as cited in SEQ ID NO 53301
  misc_feature (1)..(1116): Ortholog of  Ceres SEQ ID NO 13658153 as cited in SEQ ID NO 66326
  misc_feature (1)..(1116): Ortholog of  Ceres SEQ ID NO 14303011 as cited in SEQ ID NO 67226
atggataagaaggatatggagagagagttttacatgacaggaggagatggaaaaactagttatgccagaaactcttccctccagaagaaagcatctgatacggcaaagcacataacactagagacacttcaacaactctacaaagagacaagaccaaagagtttaggaatagctgatctaggatgttcttcaggaccaaacactctctccaccattacagacttcatcaaaaccgtccaagttgctcaccaccgcgagatcccaatccagcccttaccagaattcagcatcttccttaacgatctccctggaaatgatttcaacttcatattcaagtcattaccagactttcacatagagctcaagagagacaacaacaatggtgattgcccttcagttttcattgcagcttaccctgggtcattttatggaagactcttccctgaaaacaccatccactttgtctatgcctctcatagcttacactggctttccaaggttcctacagctttatatgacgagcaaggcaagtccataaacaaaggttgtgttagtatctgctccttaagctctgaagctgtttccaaagcttactgcagtcaattcaaggaagatttctccattttcctccggtgtagatcaaaagagatggtttctgcaggaagaatggtgcttattatactcggaagagaaggtcctgatcatgtcgatagaggaaactctttcttttgggaacttctctcaagatccatagcagatcttgttgcacagggagagactgaggaagagaagcttgattcttacgatatgcacttctacgctccgagtgctgatgagatagaaggtgaagtggacaaagaagggtcttttgaattagagaggttagagatgttagaagtgaagaaggacaaagggaataccgagggtgatataagttatggtaaggcggttgcaaagacggtaagagcagttcaagaatcaatgcttgttcaacactttggggaaaagattcttgacaagctctttgatacatattgtagaatggttgacgatgagttagctaaggaagacataagacccatcacatttgttgttgtcctaagaaagaagctctga

SEQ ID NO: 83393 - protein, 371 aa, Arabidopsis thaliana
  peptide (1)..(371): Ceres Seq. ID no. 12670081
MDKKDMEREFYMTGGDGKTSYARNSSLQKKASDTAKHITLETLQQLYKETRPKSLGIADLGCSSGPNTLSTITDFIKTVQVAHHREIPIQPLPEFSIFLNDLPGNDFNFIFKSLPDFHIELKRDNNNGDCPSVFIAAYPGSFYGRLFPENTIHFVYASHSLHWLSKVPTALYDEQGKSINKGCVSICSLSSEAVSKAYCSQFKEDFSIFLRCRSKEMVSAGRMVLIILGREGPDHVDRGNSFFWELLSRSIADLVAQGETEEEKLDSYDMHFYAPSADEIEGEVDKEGSFELERLEMLEVKKDKGNTEGDISYGKAVAKTVRAVQESMLVQHFGEKILDKLFDTYCRMVDDELAKEDIRPITFVVVLRKKL

SEQ ID NO: 83394 - protein, 366 aa, Arabidopsis thaliana
  peptide (1)..(366): Ceres Seq. ID no. 12670082
MEREFYMTGGDGKTSYARNSSLQKKASDTAKHITLETLQQLYKETRPKSLGIADLGCSSGPNTLSTITDFIKTVQVAHHREIPIQPLPEFSIFLNDLPGNDFNFIFKSLPDFHIELKRDNNNGDCPSVFIAAYPGSFYGRLFPENTIHFVYASHSLHWLSKVPTALYDEQGKSINKGCVSICSLSSEAVSKAYCSQFKEDFSIFLRCRSKEMVSAGRMVLIILGREGPDHVDRGNSFFWELLSRSIADLVAQGETEEEKLDSYDMHFYAPSADEIEGEVDKEGSFELERLEMLEVKKDKGNTEGDISYGKAVAKTVRAVQESMLVQHFGEKILDKLFDTYCRMVDDELAKEDIRPITFVVVLRKKL

SEQ ID NO: 83395 - protein, 360 aa, Arabidopsis thaliana
  peptide (1)..(360): Ceres Seq. ID no. 12670083
MTGGDGKTSYARNSSLQKKASDTAKHITLETLQQLYKETRPKSLGIADLGCSSGPNTLSTITDFIKTVQVAHHREIPIQPLPEFSIFLNDLPGNDFNFIFKSLPDFHIELKRDNNNGDCPSVFIAAYPGSFYGRLFPENTIHFVYASHSLHWLSKVPTALYDEQGKSINKGCVSICSLSSEAVSKAYCSQFKEDFSIFLRCRSKEMVSAGRMVLIILGREGPDHVDRGNSFFWELLSRSIADLVAQGETEEEKLDSYDMHFYAPSADEIEGEVDKEGSFELERLEMLEVKKDKGNTEGDISYGKAVAKTVRAVQESMLVQHFGEKILDKLFDTYCRMVDDELAKEDIRPITFVVVLRKKL

SEQ ID NO: 83396 - DNA, 1537 bp, Arabidopsis thaliana
  misc_feature (1)..(1537): Ceres Seq. ID no. 12670084
  misc_feature (1)..(1537): Ortholog of  Ceres SEQ ID NO 13655660 as cited in SEQ ID NO 63727
gcgtctccttttctcgccaccactctccacaatacccatttctgcaaaatggcttcttctcgtatttctctccgccttgttcgccgatttgcctcagccgccgctgacggtacgaccaccgctccctcttcaggcaaaatctctgtctccaaagctaagtccactctccggaaagaacacgatcccgacaaagctcttaagatctacgccaatgtctccgatcactcagcctctcctgtttcatctcgctacgcccaagagctcactgttcgtcgcctcgccaagtgtcgccgtttctcagacatcgaaaccctaattgaatcccacaaaaatgatcccaaaatcaaagaagaacctttctactctacgcttatcagatcttacggccaagcctctatgtttaatcacgccatgagaaccttcgagcagatggatcaatacggcacacccagatcagctgtttccttcaacgccttgctcaacgcttgtctccattccaagaatttcgataaagtcccccaactgttcgacgaaattcctcagaggtacaataagatcatccctgacaaaatctcttacggtatattgattaagtcatactgtgactctggtacccctgaaaaagccattgagattatgagacagatgcaaggtaaaggcatggaagttactaccattgctttcaccaccattttgagttcattgtataagaaaggtgagctcgaggtagctgataacttgtggaatgagatggtgaagaaaggctgtgaattggataatgcagcgtataatgttcgtataatgagtgctcaaaaggaaagccctgaaagagttaaggagttgattgaagaaatgagtagtatgggattgaaacctgatacgattagctataactatcttatgactgcgtattgtgagagaggaatgttggacgaagctaagaaagtgtatgaaggacttgaaggtaacaactgtgctcccaacgcagctacttttaggacattgatatttcatctttgttatagccgattgtacgagcaaggctatgcgatcttcaagaagagtgtgtatatgcacaagattccagatttcaacactttgaagcatttggttgtgggattggtggagaacaagaaaagagatgacgctaaagggttgattagaacggtgaagaagaaattccctccgagtttcttgaatgcgtggaagaaactcgaggaggaactcgggctgtattcaaaaaccgatgcttttccatcttctgcaaaagaggctgctgctgcttaatagctcaagagcatttcgattgaacatcttattttgttgcttgaagacttgttgaaaactatgatctagtatgcaggtttatttataagctgctcctgcatttttctttcctcataaattagcttgtaaaagcttgacggtttgttgttggaatctctagaattccatagtcaacaattttcaggttcatatagttcactgctttgttctacacacttgtgcttcatgatgaattcaagtttctttcagt

SEQ ID NO: 83397 - protein, 428 aa, Arabidopsis thaliana
  peptide (1)..(428): Ceres Seq. ID no. 12670085
ASPFLATTLHNTHFCKMASSRISLRLVRRFASAAADGTTTAPSSGKISVSKAKSTLRKEHDPDKALKIYANVSDHSASPVSSRYAQELTVRRLAKCRRFSDIETLIESHKNDPKIKEEPFYSTLIRSYGQASMFNHAMRTFEQMDQYGTPRSAVSFNALLNACLHSKNFDKVPQLFDEIPQRYNKIIPDKISYGILIKSYCDSGTPEKAIEIMRQMQGKGMEVTTIAFTTILSSLYKKGELEVADNLWNEMVKKGCELDNAAYNVRIMSAQKESPERVKELIEEMSSMGLKPDTISYNYLMTAYCERGMLDEAKKVYEGLEGNNCAPNAATFRTLIFHLCYSRLYEQGYAIFKKSVYMHKIPDFNTLKHLVVGLVENKKRDDAKGLIRTVKKKFPPSFLNAWKKLEEELGLYSKTDAFPSSAKEAAAA

SEQ ID NO: 83398 - protein, 412 aa, Arabidopsis thaliana
  peptide (1)..(412): Ceres Seq. ID no. 12670086
MASSRISLRLVRRFASAAADGTTTAPSSGKISVSKAKSTLRKEHDPDKALKIYANVSDHSASPVSSRYAQELTVRRLAKCRRFSDIETLIESHKNDPKIKEEPFYSTLIRSYGQASMFNHAMRTFEQMDQYGTPRSAVSFNALLNACLHSKNFDKVPQLFDEIPQRYNKIIPDKISYGILIKSYCDSGTPEKAIEIMRQMQGKGMEVTTIAFTTILSSLYKKGELEVADNLWNEMVKKGCELDNAAYNVRIMSAQKESPERVKELIEEMSSMGLKPDTISYNYLMTAYCERGMLDEAKKVYEGLEGNNCAPNAATFRTLIFHLCYSRLYEQGYAIFKKSVYMHKIPDFNTLKHLVVGLVENKKRDDAKGLIRTVKKKFPPSFLNAWKKLEEELGLYSKTDAFPSSAKEAAAA

SEQ ID NO: 83399 - protein, 296 aa, Arabidopsis thaliana
  peptide (1)..(296): Ceres Seq. ID no. 12670087
MFNHAMRTFEQMDQYGTPRSAVSFNALLNACLHSKNFDKVPQLFDEIPQRYNKIIPDKISYGILIKSYCDSGTPEKAIEIMRQMQGKGMEVTTIAFTTILSSLYKKGELEVADNLWNEMVKKGCELDNAAYNVRIMSAQKESPERVKELIEEMSSMGLKPDTISYNYLMTAYCERGMLDEAKKVYEGLEGNNCAPNAATFRTLIFHLCYSRLYEQGYAIFKKSVYMHKIPDFNTLKHLVVGLVENKKRDDAKGLIRTVKKKFPPSFLNAWKKLEEELGLYSKTDAFPSSAKEAAAA

SEQ ID NO: 83400 - DNA, 913 bp, Arabidopsis thaliana
  misc_feature (1)..(913): Ceres Seq. ID no. 12670094
  misc_feature (1)..(913): Ortholog of  Ceres SEQ ID NO 12608945 as cited in SEQ ID NO 51209
  misc_feature (1)..(913): Ortholog of  Ceres SEQ ID NO 14316444 as cited in SEQ ID NO 59233
  misc_feature (1)..(913): Ortholog of  Ceres SEQ ID NO 12619999 as cited in SEQ ID NO 66123
  misc_feature (1)..(913): Ortholog of  Ceres SEQ ID NO 13656436 as cited in SEQ ID NO 69154
aagtttgtgtgcgaccgagtcatcgtcgtcgtgctctccttcttcttcatcgtcgagacctaagaaagacgagactctgattcttctgatctttgaatcacactttttctttttttccttcttcttccaacggaacggaacatatggcttcggtttcacctttggcaaagtttaaactggtgttcttaggagaccaatctgtcggaaaaaccagcatcatcactcgtttcatgtatgacaaattcgacaccacgtaccagcctaccattggaatcgattttctatcgaaaacaatgtacctcgaagatcgaacagttcgtttgcagctatgggatactgctggacaagaaagattcaggagtctaatcccaagttacatcagagattcttctgttgccattgttgtatacgatgtatccaataggcaaacgtttctgaatacctcgaaatggattgaggatgttcacagagaaagaggtcaaagcaatgttatcatcgttcttgttggaaacaaaactgatcttgttgaaaaacggcaagtatcaatcagtgaaggagaagacaagggtaaagagtatggagtgatgttcattgagaccagtgccaaagaaaacttcaacattaaggctttgttccggaagattgctgcagctttacccggggtagactcatattcattggcaacaaaatcagatgacatggttgatgtgaatctaaagaccacttcaaattcatcacaaggtgagcaacaaggaggagcaggtggtggtggaggctgttcttgttgattcaaaaatacataattccaaaacttgtgaagcaaacaaaagggatcacgttagttttgtggttttcatcttattaactgacacagaatataaaacatcaaagagaaaaggattactatttttac

SEQ ID NO: 83401 - protein, 214 aa, Arabidopsis thaliana
  peptide (1)..(214): Ceres Seq. ID no. 12670095
MASVSPLAKFKLVFLGDQSVGKTSIITRFMYDKFDTTYQPTIGIDFLSKTMYLEDRTVRLQLWDTAGQERFRSLIPSYIRDSSVAIVVYDVSNRQTFLNTSKWIEDVHRERGQSNVIIVLVGNKTDLVEKRQVSISEGEDKGKEYGVMFIETSAKENFNIKALFRKIAAALPGVDSYSLATKSDDMVDVNLKTTSNSSQGEQQGGAGGGGGCSC

SEQ ID NO: 83402 - protein, 185 aa, Arabidopsis thaliana
  peptide (1)..(185): Ceres Seq. ID no. 12670096
MYDKFDTTYQPTIGIDFLSKTMYLEDRTVRLQLWDTAGQERFRSLIPSYIRDSSVAIVVYDVSNRQTFLNTSKWIEDVHRERGQSNVIIVLVGNKTDLVEKRQVSISEGEDKGKEYGVMFIETSAKENFNIKALFRKIAAALPGVDSYSLATKSDDMVDVNLKTTSNSSQGEQQGGAGGGGGCSC

SEQ ID NO: 83403 - protein, 164 aa, Arabidopsis thaliana
  peptide (1)..(164): Ceres Seq. ID no. 12670097
MYLEDRTVRLQLWDTAGQERFRSLIPSYIRDSSVAIVVYDVSNRQTFLNTSKWIEDVHRERGQSNVIIVLVGNKTDLVEKRQVSISEGEDKGKEYGVMFIETSAKENFNIKALFRKIAAALPGVDSYSLATKSDDMVDVNLKTTSNSSQGEQQGGAGGGGGCSC

SEQ ID NO: 83404 - DNA, 1779 bp, Arabidopsis thaliana
  misc_feature (1)..(1779): Ceres Seq. ID no. 12670115
  misc_feature (1)..(1779): Ortholog of  Ceres SEQ ID NO 15170788 as cited in SEQ ID NO 52635
  misc_feature (1)..(1779): Ortholog of  Ceres SEQ ID NO 13638058 as cited in SEQ ID NO 55054
  misc_feature (1)..(1779): Ortholog of  Ceres SEQ ID NO 15170362 as cited in SEQ ID NO 57883
  misc_feature (1)..(1779): Ortholog of  Ceres SEQ ID NO 14303297 as cited in SEQ ID NO 67765
atggacgtccgaagtctaccaagcaacggcgtcgcaacaatccaagactccgctcccaccgccgcaaccatactcggctcctctgcagcgactcttggacgtcacttatcccgccgtcttgtccaagccggagtcaccgacattttcactgttcccggtgatttcaacctatctctgcttgaccagctcatcgccaacccggagctcaacaacatcgggtgctgtaacgagctaaacgccggttacgccgccgatggatacgctcgatctcgtggagtcggtgcttgcgtcgtgactttcaccgttggtggactcagcgttttgaacgctatcgctggtgcgtacagtgagaacctaccagttatatgtatcgttggaggtcctaactccaacgattttggcactaaccggattcttcatcacaccattggtttacctgattttagccaagagcttaggtgtttccaaactgttacttgctatcaggctgtggtgaaccatttagaggatgctcatgaacagatcgacaaggcgatagcaacagctctgagagagagcaagcctgtgtacattagcatcagctgtaacttagctgccattcctcatcctacatttgctagttatcctgtcccttttgacctaactccaaggttgagcaacaaggattgtttagaagctgccgtggaagcaacattggagtttctaaacaaggccgtgaagcccgttatggtcggtggtcccaagttgcgtgtggctaaagctagggatgcctttgtggagctagctgatgcttcaggctaccccgtggcagtgatgccatctgccaaaggctttgtcccagagaaccatcctcatttcattggcacttactggggagcagtgagcactcttttctgctctgagattgtcgagtccgcggatgcttacatcttcgcaggtccaatcttcaacgactacagctccgttggttactcacttctcctcaagaaagaaaaagccatcattgtgcatcctgatagtgtcgttgtggctaatggtcctacctttggttgcgttcggatgagcgaattcttcagggagttggctaagagggtgaaacctaacaagacggcttatgagaactaccatagaatctttgtccctgaaggtaagcctttgaaatgcaaaccaagagagcctttgagaatcaacgcaatgttccaacacattcagaagatgctctctaatgaaaccgctgtgattgctgaaactggtgattcttggttcaattgtcagaaacttaagctgcctaaaggatgtgggtacgagtttcaaatgcagtatggatcaattggttggtctgttggtgcgactctaggatacgctcaagcaacaccggagaagagagtgttgtctttcattggagacggaagtttccaagtgacggctcaggacgtttccacaatgattcgtaacggacagaagaccatcatcttcctgatcaacaacggtggctacaccattgaagttgagattcatgatggtccttacaatgtgatcaagaattggaactacactggtcttgtcgatgctattcataatggtgaaggcaaatgctggaccacaaaggtgagatacgaggaggagttagtggaagcgattaacacggcgacattggagaagaaagatagtctttgtttcattgaagtgattgttcacaaggatgatacgagcaaagagttgcttgagtggggctctcgcgtctcagctgctaatggtcgtcctcccaatcctcagtag

SEQ ID NO: 83405 - protein, 592 aa, Arabidopsis thaliana
  peptide (1)..(592): Ceres Seq. ID no. 12670116
MDVRSLPSNGVATIQDSAPTAATILGSSAATLGRHLSRRLVQAGVTDIFTVPGDFNLSLLDQLIANPELNNIGCCNELNAGYAADGYARSRGVGACVVTFTVGGLSVLNAIAGAYSENLPVICIVGGPNSNDFGTNRILHHTIGLPDFSQELRCFQTVTCYQAVVNHLEDAHEQIDKAIATALRESKPVYISISCNLAAIPHPTFASYPVPFDLTPRLSNKDCLEAAVEATLEFLNKAVKPVMVGGPKLRVAKARDAFVELADASGYPVAVMPSAKGFVPENHPHFIGTYWGAVSTLFCSEIVESADAYIFAGPIFNDYSSVGYSLLLKKEKAIIVHPDSVVVANGPTFGCVRMSEFFRELAKRVKPNKTAYENYHRIFVPEGKPLKCKPREPLRINAMFQHIQKMLSNETAVIAETGDSWFNCQKLKLPKGCGYEFQMQYGSIGWSVGATLGYAQATPEKRVLSFIGDGSFQVTAQDVSTMIRNGQKTIIFLINNGGYTIEVEIHDGPYNVIKNWNYTGLVDAIHNGEGKCWTTKVRYEEELVEAINTATLEKKDSLCFIEVIVHKDDTSKELLEWGSRVSAANGRPPNPQ

SEQ ID NO: 83406 - protein, 350 aa, Arabidopsis thaliana
  peptide (1)..(350): Ceres Seq. ID no. 12670117
MVGGPKLRVAKARDAFVELADASGYPVAVMPSAKGFVPENHPHFIGTYWGAVSTLFCSEIVESADAYIFAGPIFNDYSSVGYSLLLKKEKAIIVHPDSVVVANGPTFGCVRMSEFFRELAKRVKPNKTAYENYHRIFVPEGKPLKCKPREPLRINAMFQHIQKMLSNETAVIAETGDSWFNCQKLKLPKGCGYEFQMQYGSIGWSVGATLGYAQATPEKRVLSFIGDGSFQVTAQDVSTMIRNGQKTIIFLINNGGYTIEVEIHDGPYNVIKNWNYTGLVDAIHNGEGKCWTTKVRYEEELVEAINTATLEKKDSLCFIEVIVHKDDTSKELLEWGSRVSAANGRPPNPQ

SEQ ID NO: 83407 - protein, 321 aa, Arabidopsis thaliana
  peptide (1)..(321): Ceres Seq. ID no. 12670118
MPSAKGFVPENHPHFIGTYWGAVSTLFCSEIVESADAYIFAGPIFNDYSSVGYSLLLKKEKAIIVHPDSVVVANGPTFGCVRMSEFFRELAKRVKPNKTAYENYHRIFVPEGKPLKCKPREPLRINAMFQHIQKMLSNETAVIAETGDSWFNCQKLKLPKGCGYEFQMQYGSIGWSVGATLGYAQATPEKRVLSFIGDGSFQVTAQDVSTMIRNGQKTIIFLINNGGYTIEVEIHDGPYNVIKNWNYTGLVDAIHNGEGKCWTTKVRYEEELVEAINTATLEKKDSLCFIEVIVHKDDTSKELLEWGSRVSAANGRPPNPQ
